(19) United States
(12) Patent Application Publication
(10) Pub. No.: US 2014/0221463 A1
(43) Pub. Date: Aug. 7, 2014

(54) METHODS FOR HEART REGENERATION

(71) Applicant: THE SALK INSTITUTE FOR BIOLOGICAL STUDIES, LA JOLLA, CA (US)

(72) Inventors: Aitor Aguirre, La Jolla, CA (US); Ignacio Sancho-Martinez, San Diego, CA (US); Juan Carlos Izpisua-Belmonte, La Jolla, CA (US)

(73) Assignee: THE SALK INSTITUTE FOR BIOLOGICAL STUDIES, LA JOLLA, CA (US)

(21) Appl. No.: 14/052,538

(22) Filed: Oct. 11, 2013

Related U.S. Application Data
(60) Provisional application No. 61/712,701, filed on Oct. 11, 2012.

(51) Int. Cl. C12N 15/11; A61K 31/7088

(52) U.S. Cl. CPC C12N 15/11; A61K 31/7088
USPC 514/44 R; 435/375

(57) ABSTRACT

Methods for heart regeneration are provided. The invention provided herein includes methods of modulating proliferation of cardiomyocytes using small molecules and micro RNAs. In embodiments, the methods provided may be used to increase proliferation or cardiomyocytes. Further provided are methods to be used for the treatment of myocardial infarction.

### CROSS-REFERENCES TO RELATED APPLICATIONS

[0001] This application claims the benefit of U.S. Provisional Appl. No. 61/712,701, filed Oct. 11, 2012, the contents of which are incorporated herein by reference and for all purposes.

### REFERENCE TO A “SEQUENCE LISTING,” A TABLE, OR A COMPUTER PROGRAM LISTING APPENDIX SUBMITTED AS AN ASCII TEXT FILE

[0002] The Sequence Listing written in file 92150_{—}846394_ST25.TXT, created on Oct. 11, 2013, 7,821,616 bytes, machine format IBM-PC, MS Windows operating system, is hereby incorporated by reference.

### BACKGROUND OF THE INVENTION

[0003] Heart failure remains one of the leading causes of mortality in the developed world. Whereas the mammalian heart is endowed with certain regenerative potential, endogenous cardiomyocyte proliferation is insufficient for functional heart repair upon injury. Interestingly, non-mammalian vertebrates, such as the zebrafish, can regenerate the damaged heart by inducing cardiomyocyte dedifferentiation and proliferation. By screening regenerating zebrafish hearts Applicants identified miR-99/100 down-regulation as a key process driving cardiomyocyte dedifferentiation. Experimental down-regulation of miR-99/100 in primary adult murine and human cardiomyocytes led to an increase in the number of proliferating cardiomyocytes. AAV-mediated in vivo down-regulation of miR-99/100 after acute myocardial injury in mice induced mature cardiomyocyte proliferation, diminished infarct size and improved heart function. Applicants' study unveils conserved regenerative mechanisms between zebrafish and mammalian cardiomyocytes and represents a proof-of-concept on the suitability of activating pro-regenerative responses for healing the diseased mammalian heart.

### BRIEF SUMMARY OF THE INVENTION

[0004] In one aspect, a method of modulating proliferation of a cardiomyocyte is provided. The method includes (i) transfecting a cardiomyocyte with a nucleic acid encoding a micro RNA modulator, thereby forming a transfected cardiomyocyte; and (ii) allowing the transfected cardiomyocyte to divide, thereby modulating proliferation of the cardiomyocyte.

[0005] In another aspect, a method of modulating proliferation of a cardiomyocyte is provided. The method includes (i) contacting a cardiomyocyte with a small molecule, thereby forming a treated cardiomyocyte; and (ii) allowing the treated cardiomyocyte to divide, thereby modulating proliferation of the cardiomyocyte.

[0006] In another aspect, a method of treating myocardial infarction in a subject in need thereof is provided. The method includes administering to the subject a therapeutically effective amount of a nucleic acid encoding a micro RNA modulator, wherein the RNA modulator increases cardiomyocyte proliferation thereby treating the myocardial infarction.

[0007] In another aspect, a method of treating myocardial infarction in a subject in need thereof is provided. The method includes administering to the subject a therapeutically effective amount of a nucleic acid encoding an antagonist of a mir 99 micro RNA and a nucleic acid encoding an antagonist of a let-7a micro RNA, thereby treating the myocardial infarction.

[0008] In another aspect, a method of treating myocardial infarction in a subject in need thereof is provided. The method includes administering to the subject a therapeutically effective amount of a small molecule, wherein the small molecule increases cardiomyocyte proliferation thereby treating the myocardial infarction.

### BRIEF DESCRIPTION OF THE DRAWINGS

[0009] FIGS. 1A-J. miR-99/100 and Let-7a/c are involved in the early cardiac regenerative response in the zebrafish. (FIG. 1A) Amputated hearts were allowed to regenerate for 3 and 7 days, and then analyzed by real time RT-PCR for microRNA candidates miR-99/100 and Let-7a/c (n=8). (FIGS. 1B, C) FISH/double immunofluorescence was used to determine cardiomyocyte specific expression of microRNA-100 (n=5, see also FIG. 6) and its downstream targets fntβ (FIG. 1B) and smarca5 (FIG. 1C) in uninjured (left panel) and 7 dpa conditions (right panel). Cardiomyocytes in regenerating hearts exhibited remarkable low levels of both miRs, and inversely correlating high levels of Fntβ and Smarca5. (FIG. 1D) Gene expression fold change of fntβ and smarca5 in amputated hearts (n=8). (FIG. 1E) Chemical inhibition of fnt activity with Tipifarnib dramatically reduced cardiomyocyte proliferation and heart regeneration in amputated fish, leading to scarring as determined by Masson's Trichromic (FIG. 1F) staining and BrDU incorporation (FIG. 1G) (n=6). (FIGS. 1H, I, J) Knock-down of fntβ and/or smarca5 in embryos resulted in abnormally small animals and reduced ventricle size in cmlc2:GFP animals. The same phenotype was observed upon injection of miR-99/100 mimics (n>50). Dashed line: amputation plane. Boxed area: magnified field. Arrowheads: cells of interest.

[0010] FIGS. 2A-J. Heart regeneration in the fish is controlled by miR-99/100 and Let-7a/c. (FIG. 2A,B) Dedifferentiating cardiomyocytes express high levels of Fntβ (from top to bottom, uninjured, 3 dpa and 7 dpa, panel FIG. 2A) and Smarca5 (from top to bottom, uninjured, 3 dpa and 7 dpa, panel FIG. 2B) with a 3.5-fold and 7-fold protein increment at 7 dpa, respectively, (see histogram in FIGS. 2C, D; n=5). (FIGS. 2E, F, G) Exogenous intra-cardiac administration of miR-99/100 mimics led to defective cardiac regeneration, scarring and reduced cardiomyocyte proliferation (n=6). (FIG. 2H) miR-99/100 inhibitors exerted the opposite effect in uninjured adult animals, inducing significant cardiac hyperplasia (FIG. 2I) and increased ventricle size (FIG. 2J; n=6). Dashed line: amputation plane. Boxed area: magnified area. Ec: endocardial cells; cm: cardiomyocytes. Arrowheads: cells of interest.

[0011] FIGS. 3A-H. Adult mammalian cardiomyocytes can be directed to a proliferative state by forced silencing of the miR-99/100 cluster. Expression patterns of the miR-99/100 cluster during development in murine (FIG. 3A) and human cardiomyocytes (FIG. 3C) were determined by qRT-PCR (n=6). (FIGS. 3B, D) Dynamics of cardiomyocyte progenitor marker and Fntβ/Smarca5 expression during murine (FIG. 3B) and human (FIG. 3D) cardiac maturation. Both Fntβ and Smarca5 are up-regulated at cardiac progenitor stages, and strongly repressed in adult hearts (n=6). (FIGS. 3E, F) Cultured adult murine cardiomyocytes transduced with anti-miR-99/100+anti-Let-7 reverted to a dedifferentiated-like state, re-expressing GATA4 and dissembling the cytoskeleton (see also FIG. 17; n=3). (FIGS. 3G, H) Transduction with anti-miRs was sufficient to efficiently drive adult cardiomyocytes to a proliferative state (FIG. 3G), with beating functionality (FIG. 3H) (n=3).

[0012] FIGS. 4A-L. MicroRNA silencing is sufficient to induce heart regeneration in a murine model of myocardial infarction. (FIGS. 4A, B) Organotypic cultures of adult heart tissue were employed to study the effects of microRNA-99/100 and Let-7a/c silencing. (FIG. 4A) After 7 days of treatment, myocardial tissue became disorganized, with a loss of sarcomeric structures as determined by electron microscopy analysis (n=6). (FIG. 4B) Furthermore, re-expression of dedifferentiation markers was detected by immunofluorescence evaluation/quantification, as well as cardiomyocyte proliferation and FNTβ and SMARCA5 expression in normoxic and hypoxic conditions (n=6). (FIG. 4C) Representative pictures of echocardiography performed in control (left panel) and treated animals (right panel) at 18 days post-myocardial infarction (MI). In vivo silencing of miR-99/100 and Let-7 led to significant improvements in fractional shortening (FIGS. 4D, F) and ejection fraction (FIGS. 4E, F) at 18 days post-MI (n=5). (FIG. 4G) Left panel, reduced infarct size in miR-99/100 and Let-7 treated animals is confirmed by Masson's trichromic staining; (FIG. 4G) Right panel, quantification of scar size by Masson's thrichromic staining (FIG. 4G; n=5). (FIGS. 4H-J) Recovery was accompanied by cardiomyocyte-specific expression of FNTβ (FIG. 4H) and SMARCA5 (FIG. 4I), as well as GATA4 re-expression (FIG. 4J, right panel shows quantification of this data) as determined by immunofluorescence analyses (n=5). (FIGS. 4K, L, panel on the right shows quantification of this data) Regeneration was mediated by a dramatic increase in proliferating cardiomyocytes as determined by PCNA (FIG. 4K) and H3P (FIG. 4L) stainings (n=5). Arrowheads: cells of interest.

[0013] FIGS. 5A-C. miR-99/100 and Let-7a/c are located in same genomic cluster and their functions and protein targets are conserved across vertebrates. (FIG. 5A) Microarray analysis identified a subset of differentially regulated microRNAs during early stages of regeneration in the zebrafish heart (n=4). Interestingly, most of them were consistently down-regulated. (FIG. 5B) Bioinformatic analysis of the most relevant signaling pathways targeted by miR-99/100 and Let-7a/c. (FIG. 5C) Genomic organization and conservation of miR-99/100 and Let-7a/c clusters in vertebrates (upper left: zebrafish miR-100 cluster; upper right: zebrafish miR-99 cluster; lower left: human miR-99/100 clusters; lower right: murine miR-99/100 clusters).

[0014] FIGS. 6A-D. Expression of miR-99/100 is restricted to cardiomyocytes and inversely correlates with Fntβ and Smarca5. (FIGS. 6A-D) FISH/immunofluorescence analyses on zebrafish heart sections from uninjured and amputated animals at 3 and/or 7 dpa. (FIGS. 6A, B) FISH/immunofluorescence analysis of miR-100 and Fntβ/Smarca5 expression (see also FIG. 1; n=8). (FIGS. 6C, D) FISH/immunofluorescent analysis of miR-99 and Fntβ/Smarca5 expression during regeneration (upper row, miR-99 effects on Fntb expression at uninjured (left), 3 dpa (center) and 7 dpa (right) conditions; lower row, miR-99 effects on Smarca5 expression at uninjured (left), 3 dpa (center) and 7 dpa (right) conditions). (n=8). Dashed line: amputation plane. Boxed area: magnified in inset.

[0015] FIGS. 7A-B. Relevant protein targets of interest in heart regeneration regulated by miR-99/100 and Let-7a/c. (FIG. 7A) Miranda-based binding predictions of miR-99/100 to zebrafish Fntb (upper panel) and Smarca5 (lower panel) 3′ UTRs. (FIG. 7B) Luciferase assay to determine biochemical binding of miR-99/100 to the predicted targets Fntb and Smarca5 for zebrafish (upper and middle rows) and human (lower row) 3′UTRs. Fish and human UTRs were subcloned in the pGL3 vector and subjected to microRNA mimic knockdown in vitro. pGL3: empty vector; AS-UTR: antisense-UTR (negative control); UTR: 3′ untranslated region.

[0016] FIGS. 8A-B. Fntα, the structural subunit of Fnt, was constitutively expressed in cardiomyocytes regardless of regeneration conditions. Fntα expression was determined by immunofluorescence (FIG. 8A) and qRT-PCR (FIG. 8B, n=4). Dashed line: amputation plane. Boxed area: magnified section.

[0017] FIGS. 9A-D. MiR-99/100 plays a role in heart development. (FIG. 9A) Expression of miR-99/100 is very low during the first stages of development and dramatically increases at 3 dpf in zebrafish (n=10). (FIG. 9B) fntβ and smarca5 expression inversely correlate with miR-99/100 in developing embryos (n=10). (FIGS. 9C, D) Both Fntβ and Smarca5 are present at high levels in developing hearts (n=10). V: ventricle; A: atrium; Eb: erythroblasts.

[0018] FIGS. 10A-D. Targets of miR-99/100 and Let-7a/c return to basal levels of expression after cardiomyocytes come back to their quiescent state. (FIGS. 10A, B) Immunofluorescent stainings for proliferating cardiomyocytes at 30 dpa, when regeneration in the zebrafish heart is mostly complete (n=3). Fntβ and Smarca5 presence in the myocardium returned to pre-amputation levels at 30 dpa, when regeneration is mostly completed. (FIG. 10C) Strategy for the scarring experiments to identify the improtance in regeneration of miR-99/100. (FIG. 10D) Successful heart delivery of antagomiRs was evaluated by injection of a matched-size Cy5-labelled oligonucleotide against GFP in cmlc2:GFP animals (n=3). Dashed line: amputation plane. Boxed area: magnified section.

[0019] FIGS. 11A-B. Direct substrates of fnt are activated in regenerating hearts. (FIGS. 11A, B) At 3 and 7 dpa, a significant fraction of farnesylated proteins was detected in dedifferentiating cardiomyocytes as determined by immunofluorecence (n=5). Boxed area: magnified section.

[0020] FIGS. 12A-F. Signaling downstream of fntβ in the MAPK signaling pathway were consistently up-regulated in regenerating hearts. Ras (FIGS. 12A, B, C) and c-myc (FIGS. 12D, E, F), activators of the MAPK pathway regulated by miR-99/100 and Let-7a/c were up-regulated as determined by immunofluorescence (FIGS. 12A,D) and by qRT-PCR (FIGS. 12B,C,E,F; n=5). Dashed line: amputation plane. Boxed area: magnified section. Arrowheads: cells of interest.

[0021] FIGS. 13A-B. Chromatin remodeling is a necessary step in cardiomyocyte dedifferentiation. (FIGS. 13A,B) The chromatin remodeling agents Cbx5 (FIG. 13A) and Cbx3a (FIG. 13B), which act in concert with Smarca5, were found in the nucleus of dedifferentiating cardiomyocytes indicating a wave of chromatin remodeling. The following is shown in the histograms of FIG. 13A and FIG. 13B from left to right: First panel (bottom and top histogram): DAPI stain, second panel (bottom and top histogram): MyHC stain; third panel (bottom and top histogram): PCNA stain; forth panel (bottom and top histogram):Cbx5 stain; fifth panel (bottom and top histogram): merge of histograms of panels one, two three and four.(n=4). Arrowheads: cells of interest.

[0022] FIG. 14. Expression of miR-99/100 cluster is a switch to promote or inhibit cardiomyocyte dedifferentiation and proliferation in vertebrates. In the proposed model of action, quiescent cardiomyocytes express high levels of miR-99/100 and Let-7a/c, which inhibit the expression of key members of the proliferative activation cascade (Uninjured condition shown in left panel). Upon injury, cardiomyocytes cease to express these miRs, leading to the over-expression of key regulators of two parallel pathways simultaneously: MAPK signaling and chromatin remodeling (Injury condition shown in right panel). These changes lead to a proliferation-permissive state in cardiomyocytes, which become more receptive towards proliferative signals coming from the injured area and proliferate to replenish the lost tissue. The symbols “X” indicate blocked pathways.

[0023] FIGS. 15A-D. FISH/IF for different developmental stages in the mouse heart. (FIGS. 15A-C) Identical patterns of expression were found for miR-99/100 and Let-7a/c, as well as Fntβ and Smarca5, to those observed in the developing zebrafish (FIG. 15A: embryonic day 11; FIG. 15B: postnatal day 2; FIG. 15C: adult) (n=6). (FIG. 15D) Quantification showing the number of double positive cells for miR-99/100 (FIG. 15D upper left), Let-7a/c (FIG. 15D upper right), Fntβ (FIG. 15D lower left) and Smarca5 (FIG. 15D lower right) (n=6).

[0024] FIGS. 16A-B. Human ESC-derived, proliferation-competent immature cardiomyocytes (hiCM) possessed the same phenotype observed in fish and mouse dedifferentiated cardiomyocytes. (FIG. 16A) Immunofluorescence for the indicated proteins in human embryonic stem cells (FIG. 16A, Images are individual panels of the merged figure shown at in the last column). (FIG. 16B) hiCMs showed expression of GATA4, SMARCA5 and FNTβ, which was progressively lost with decreased proliferative capacity (n=3). The following is shown in the histograms of FIG. 16A and FIG. 16B from left to right: Histograms show immunostaining with DAPI (first panel), MyHC (second panel), GATA4 (third panel), SMARCA5 (forth panel top), FNTbeta (forth panel middle), of H3P (forth panel bottom) and a merged histogram (fifth panel).

[0025] FIGS. 17A-F. miR silencing leads to dedifferentiation and proliferation of cardiomyocytes. (FIG. 17A, Images represent individual panels of the merged image shown in the last column) Untreated adult murine cardiomyocytes spontaneously disorganized sarcomeric structures in vitro, but did not dedifferentiate or express FNTβ, SMARCA5, GATA4 or proliferative markers. However, upon lentiviral transduction with anti-Let-7 alone (FIG. 17B, Images represent individual panels of the merged image shown in the last column) or both anti-Let-7and anti-miR-99/100 (FIG. 17C, Images represent individual panels of the merged image shown in the last column) they re-expressed all those markers (n=3). (FIG. 17D) Functional beating properties were preserved in dedifferentiated cardiomyocytes, suggesting a degree of spontaneous redifferentiation, except for anti-Let-7 treatment. (FIGS. 17E, F) Cardiomyocyte dedifferentiation was evaluated by simultaneously measuring GATA4 and sarcomeric myosin expression and organization in cultured cardiomyocytes (n=3).

[0026] FIGS. 18A-C. microRNA silencing is specific for cardiomyocytes. (FIG. 18A) Human Fibroblasts (left panel) or endothelial cells (right panel) expressed basal levels of FNTβ, SMARCA5 and negligible levels of miR-99/100 and Let-7a/c (data not shown), and were insensitive to miR silencing (FIGS. 18A, B, C), indicating specificity of the treatment in a heart setting. (FIG. 18C) Images used for quantification of data shown in A and B (Images represent individual panels of the merged image shown in the last column) (n=3).

[0027] FIGS. 19A-B (from top to bottom, confocal analysis of FNTB, SMARCA5, Cx43, GATA4 and H3P). Histograms to the left represent positional information from the numbers shown in the insets. Ex vivo organotypic culture of murine myocardial tissue reveals sustained cardiomyocyte proliferation. Adult mouse heart tissue was cultured and treated with empty vector (pmiRZip), anti-miR-99/100 or both anti-miR-99/100 and anti-Let-7 (lentiviral activation was followed with a GFP reporter). Confocal analysis after 7 days of miR silencing led to significantly increased FNTβ and SMARCA5 (FIGS. 19A, B), enhanced numbers of dedifferentiated cardiomyocytes—determined by Cx43 and GATA4 expression—(FIG. 19B) and significantly increased number of proliferating cells (n=4). Dashed line and corresponding numbers: nuclear profile of representative cells. Boxed area: magnified section.

[0028] FIGS. 20A-E. Hypoxic injury in organotypic culture leads to increased dedifferentiation. (FIG. 20A) Schematic of hypoxia experiments. (FIG. 20B) Efficient lentiviral delivery was achieved in ex vivo conditions for all anti-miRs. (FIGS. 20C, D) Histomorphometric evaluation of the damaged myocardium in normoxic and hypoxic conditions by employing Masson's trichrome staining (n=4). (FIG. 20E) The dedifferentiation response was characterized by GATA4, Cx43, H3P, Fntβ and Smarca5 stainings (From top to bottom, Cx43, SMARCA5, H3P) (n=4). Dashed line: adjacent necrotic patch. Boxed area: magnified section. Dashed lines: necrotic tissue.

[0029] FIGS. 21A-B. Echocardiography showing functional improvement in infarcted mice treated with anti-miR-99/100 and anti-Let-7a (upper panel) and quantification of that data (lower panel). Animals were subjected to LAD artery ligation to provike infarction followed by tintramyocardial administration of antimiR containing AAV2/9 vectors. Functional heart recovery was measured versus untreated contrail animals. (FIG. 21A) At 18 dpi (days post infarction) mice treated with antimiR's exhibit a significant improvement in ejection fraction and fractional shortening, as well as reduction in scar size. (FIG. 21B) At 3 mpi (months post infarction) the improvements are still present (left panels, echocardiographic quantification; right panel, representative images), with further reduction of scar size and significant enlargement of the LAVW, indicative of replenishment of the myocardial mass.

[0030] FIGS. 22A-B. In vivo regenerative reprogramming by anti-miR delivery (FIG. 22A). In vivo-induced cardiomyocyte proliferation by anti-miR delivery (18 days post-infarction) (left panels, PCNA and H3P staining showing proliferating cardiomyocytes; right panel, quantification of the data) (FIG. 22B).

[0031] FIGS. 23A-B. In vivo dedifferentiation by anti-miR delivery. (FIG. 23A): left panel, GATA4 immunofluorescence; right panel, quantification of the data shown (FIG. 23B): histogram showing percentage of dedifferentiated CMs; (FIG. 23C): SMARCA5 immunofluorescence.

[0032] FIGS. 24A-B. Anti-miR99/100/let-7 delivery enhances functional recovery after infarction. Echocardiography measurements in infarcted animals treated with control vs. anti-miR treatment indicate significant regeneration after treatment (FIG. 24A). Quantification of those animals shows statistically significant functional recovery, both in farction shortening (left panel) as well as ejection fraction (right panel).

[0033] FIGS. 25A-B. Anti-miR99/100/let-7 delivery enhances functional recovery after infarction. Heart function improvement by anti-miR treatment is sustained over long periods of time (ejection fraction) and seems to involve regeneration of the myocardial mass (LAWV thickening, immunohistological analysis shown in FIG. 25A). Ultrasound analysis shown in FIG. 25B (abbreviations AW; anterior wall; ID: internal diameter; reflects heart dilation; PW: posterior wall).

### DETAILED DESCRIPTION OF THE INVENTION

### Definitions

[0034] While various embodiments and aspects of the present invention are shown and described herein, it will be obvious to those skilled in the art that such embodiments and aspects are provided by way of example only. Numerous variations, changes, and substitutions will now occur to those skilled in the art without departing from the invention. It should be understood that various alternatives to the embodiments of the invention described herein may be employed in practicing the invention.

[0035] The section headings used herein are for organizational purposes only and are not to be construed as limiting the subject matter described. All documents, or portions of documents, cited in the application including, without limitation, patents, patent applications, articles, books, manuals, and treatises are hereby expressly incorporated by reference in their entirety for any purpose.

[0036] Unless defined otherwise, technical and scientific terms used herein have the same meaning as commonly understood by a person of ordinary skill in the art. See, e.g., Singleton et al., DICTIONARY OF MICROBIOLOGY AND MOLECULAR BIOLOGY 2nd ed., J. Wiley & Sons (New York, N.Y. 1994); Sambrook et al., MOLECULAR CLONING, A LABORATORY MANUAL, Cold Springs Harbor Press (Cold Springs Harbor, N.Y. 1989). Any methods, devices and materials similar or equivalent to those described herein can be used in the practice of this invention. The following definitions are provided to facilitate understanding of certain terms used frequently herein and are not meant to limit the scope of the present disclosure.

[0037] “Nucleic acid” refers to deoxyribonucleotides or ribonucleotides and polymers thereof in either single- or double-stranded form, and complements thereof. The term “polynucleotide” refers to a linear sequence of nucleotides. The term “nucleotide” typically refers to a single unit of a polynucleotide, i.e., a monomer. Nucleotides can be ribonucleotides, deoxyribonucleotides, or modified versions thereof. Examples of polynucleotides contemplated herein include single and double stranded DNA, single and double stranded RNA (including siRNA), and hybrid molecules having mixtures of single and double stranded DNA and RNA. The terms also encompass nucleic acids containing known nucleotide analogs or modified backbone residues or linkages, which are synthetic, naturally occurring, and non-naturally occurring, which have similar binding properties as the reference nucleic acid, and which are metabolized in a manner similar to the reference nucleotides. Examples of such analogs include, without limitation, phosphorothioates, phosphoramidates, methyl phosphonates, chiral-methyl phosphonates, and 2-O-methyl ribonucleotides.

[0038] A “miRNA” or “microRNA” as provided herein refers to a nucleic acid that forms a double stranded RNA, which double stranded RNA has the ability to reduce or inhibit expression of a gene or target gene when expressed in the same cell as the gene or target gene. The complementary portions of the nucleic acid that hybridize to form the double stranded molecule typically have substantial or complete identity. In one embodiment, a microRNA refers to a nucleic acid that has substantial or complete identity to a target gene and forms a double stranded miRNA. In embodiments, the miRNA inhibits gene expression by interacting with a complementary cellular mRNA thereby interfering with the expression of the complementary mRNA. Typically, the nucleic acid is at least about 15-50 nucleotides in length (e.g., each complementary sequence of the double stranded miRNA is 15-50 nucleotides in length, and the double stranded miRNA is about 15-50 base pairs in length). In other embodiments, the length is 20-30 base nucleotides, preferably about 20-25 or about 24-29 nucleotides in length, e.g., 20, 21, 22, 23, 24, 25, 26, 27, 28, 29, or 30 nucleotides in length.

[0039] The words “complementary” or “complementarity” refer to the ability of a nucleic acid in a polynucleotide to form a base pair with another nucleic acid in a second polynucleotide. For example, the sequence A-G-T is complementary to the sequence T-C-A. Complementarity may be partial, in which only some of the nucleic acids match according to base pairing, or complete, where all the nucleic acids match according to base pairing.

[0040] The terms “protein”, “peptide”, and “polypeptide” are used interchangeably to denote an amino acid polymer or a set of two or more interacting or bound amino acid polymers. The terms apply to amino acid polymers in which one or more amino acid residue is an artificial chemical mimetic of a corresponding naturally occurring amino acid, as well as to naturally occurring amino acid polymers and non-naturally occurring amino acid polymer.

[0041] The term “amino acid” refers to naturally occurring and synthetic amino acids, as well as amino acid analogs and amino acid mimetics that function in a manner similar to the naturally occurring amino acids. Naturally occurring amino acids are those encoded by the genetic code, as well as those amino acids that are later modified, e.g., hydroxyproline, γ-carboxyglutamate, and O-phosphoserine. Amino acid analogs refers to compounds that have the same basic chemical structure as a naturally occurring amino acid, i.e., an α carbon that is bound to a hydrogen, a carboxyl group, an amino group, and an R group, e.g., homoserine, norleucine, methionine sulfoxide, methionine methyl sulfonium. Such analogs have modified R groups (e.g., norleucine) or modified peptide backbones, but retain the same basic chemical structure as a naturally occurring amino acid. Amino acid mimetics refers to chemical compounds that have a structure that is different from the general chemical structure of an amino acid, but that functions in a manner similar to a naturally occurring amino acid. The terms “non-naturally occurring amino acid” and “unnatural amino acid” refer to amino acid analogs, synthetic amino acids, and amino acid mimetics which are not found in nature.

[0042] Amino acids may be referred to herein by either their commonly known three letter symbols or by the one-letter symbols recommended by the IUPAC-IUB Biochemical Nomenclature Commission. Nucleotides, likewise, may be referred to by their commonly accepted single-letter codes.

[0043] “Conservatively modified variants” applies to both amino acid and nucleic acid sequences. With respect to particular nucleic acid sequences, conservatively modified variants refers to those nucleic acids which encode identical or essentially identical amino acid sequences, or where the nucleic acid does not encode an amino acid sequence, to essentially identical sequences. Because of the degeneracy of the genetic code, a large number of functionally identical nucleic acids encode any given protein. For instance, the codons GCA, GCC, GCG and GCU all encode the amino acid alanine Thus, at every position where an alanine is specified by a codon, the codon can be altered to any of the corresponding codons described without altering the encoded polypeptide. Such nucleic acid variations are “silent variations,” which are one species of conservatively modified variations. Every nucleic acid sequence herein which encodes a polypeptide also describes every possible silent variation of the nucleic acid. One of skill will recognize that each codon in a nucleic acid (except AUG, which is ordinarily the only codon for methionine, and TGG, which is ordinarily the only codon for tryptophan) can be modified to yield a functionally identical molecule. Accordingly, each silent variation of a nucleic acid which encodes a polypeptide is implicit in each described sequence with respect to the expression product, but not with respect to actual probe sequences.

[0044] The terms “identical” or percent “identity,” in the context of two or more nucleic acids or proteins, refer to two or more sequences or subsequences that are the same or have a specified percentage of nucleotides or amino acids that are the same (i.e., about 60% identity, 65%, 70%, 75%, 80%, 85%, 90%, 91%, 92%, 93%, 94%, 95%, 96%, 97%, 98%, 99%, or higher identity over a specified region, when compared and aligned for maximum correspondence over a comparison window or designated region) as measured using a BLAST or BLAST 2.0 sequence comparison algorithms with default parameters described below, or by manual alignment and visual inspection. See e.g., the NCBI web site at ncbi.nlm.nih.gov/BLAST. Such sequences are then said to be “substantially identical.” This definition also refers to, or may be applied to, the compliment of a test sequence. The definition also includes sequences that have deletions and/or additions, as well as those that have substitutions. Identity typically exists over a region that is at least about 50 amino acids or nucleotides in length, or over a region that is 50-100 amino acids or nucleotides in length, or over the entire length of a given sequence.

[0045] The term “gene” means the segment of DNA involved in producing a protein; it includes regions preceding and following the coding region (leader and trailer) as well as intervening sequences (introns) between individual coding segments (exons). The leader, the trailer as well as the introns include regulatory elements that are necessary during the transcription and the translation of a gene. Further, a “protein gene product” is a protein expressed from a particular gene.

[0046] The word “expression” or “expressed” as used herein in reference to a gene means the transcriptional and/or translational product of that gene. The level of expression of a DNA molecule in a cell may be determined on the basis of either the amount of corresponding mRNA that is present within the cell or the amount of protein encoded by that DNA produced by the cell (Sambrook et al., 1989, Molecular Cloning: A Laboratory Manual, 18.1-18.88).

[0047] The term “recombinant” when used with reference, e.g., to a cell, or nucleic acid, protein, or vector, indicates that the cell, nucleic acid, protein or vector, has been modified by the introduction of a heterologous nucleic acid or protein or the alteration of a native nucleic acid or protein, or that the cell is derived from a cell so modified. Thus, for example, recombinant cells express genes that are not found within the native (non-recombinant) form of the cell or express native genes that are otherwise abnormally expressed, under expressed or not expressed at all.

[0048] The term “heterologous” when used with reference to portions of a nucleic acid or protein indicates that the nucleic acid or protein comprises two or more subsequences that are not found in the same relationship to each other in nature. For instance, the nucleic acid is typically recombinantly produced, having two or more sequences from unrelated genes arranged to make a new functional nucleic acid, e.g., a promoter from one source and a coding region from another source. Similarly, a heterologous protein indicates that the protein comprises two or more subsequences that are not found in the same relationship to each other in nature (e.g., a fusion protein).

[0049] The term “exogenous” refers to a molecule or substance (e.g., nucleic acid or protein) that originates from outside a given cell or organism. Conversely, the term “endogenous” refers to a molecule or substance that is native to, or originates within, a given cell or organism.

[0050] A “vector” is a nucleic acid that is capable of transporting another nucleic acid into a cell. A vector is capable of directing expression of a protein or proteins encoded by one or more genes carried by the vector when it is present in the appropriate environment.

[0051] A “viral vector” is a viral-derived nucleic acid that is capable of transporting another nucleic acid into a cell. A viral vector is capable of directing expression of a protein or proteins encoded by one or more genes carried by the vector when it is present in the appropriate environment. Examples for viral vectors include, but are not limited to retroviral, adenoviral, lentiviral and adeno-associated viral vectors.

[0052] A “cell culture” is an in vitro population of cells residing outside of an organism. The cell culture can be established from primary cells isolated from a cell bank or animal, or secondary cells that are derived from one of these sources and immortalized for long-term in vitro cultures.

[0053] The terms “culture,” “culturing,” “grow,” “growing,” “maintain,” “maintaining,” “expand,” “expanding,” etc., when referring to cell culture itself or the process of culturing, can be used interchangeably to mean that a cell is maintained outside the body (e.g., ex vivo) under conditions suitable for survival. Cultured cells are allowed to survive, and culturing can result in cell growth, differentiation, or division. The term does not imply that all cells in the culture survive or grow or divide, as some may naturally senesce, etc. Cells are typically cultured in media, which can be changed during the course of the culture.

[0054] The terms “media” and “culture solution” refer to the cell culture milieu. Media is typically an isotonic solution, and can be liquid, gelatinous, or semi-solid, e.g., to provide a matrix for cell adhesion or support. Media, as used herein, can include the components for nutritional, chemical, and structural support necessary for culturing a cell.

[0055] The term “derived from,” when referring to cells or a biological sample, indicates that the cell or sample was obtained from the stated source at some point in time. For example, a cell derived from an individual can represent a primary cell obtained directly from the individual (i.e., unmodified), or can be modified, e.g., by introduction of a recombinant vector, by culturing under particular conditions, or immortalization. In some cases, a cell derived from a given source will undergo cell division and/or differentiation such that the original cell is no longer exists, but the continuing cells will be understood to derive from the same source.

[0056] The term “transfection” or “transfecting” is defined as a process of introducing a nucleic acid molecule to a cell using non-viral or viral-based methods. The nucleic acid molecule can be a sequence encoding complete proteins or functional portions thereof. Typically, a nucleic acid vector, comprising the elements necessary for protein expression (e.g., a promoter, transcription start site, etc.). Non-viral methods of transfection include any appropriate transfection method that does not use viral DNA or viral particles as a delivery system to introduce the nucleic acid molecule into the cell. Exemplary non-viral transfection methods include calcium phosphate transfection, liposomal transfection, nucleofection, sonoporation, transfection through heat shock, magnetifection and electroporation. For viral-based methods, any useful viral vector can be used in the methods described herein. Examples of viral vectors include, but are not limited to retroviral, adenoviral, lentiviral and adeno-associated viral vectors. In some aspects, the nucleic acid molecules are introduced into a cell using a retroviral vector following standard procedures well known in the art.

[0057] Expression of a transfected gene can occur transiently or stably in a host cell. During “transient expression” the transfected nucleic acid is not integrated into the host cell genome, and is not transferred to the daughter cell during cell division. Since its expression is restricted to the transfected cell, expression of the gene is lost over time. In contrast, stable expression of a transfected gene can occur when the gene is co-transfected with another gene that confers a selection advantage to the transfected cell. Such a selection advantage may be a resistance towards a certain toxin that is presented to the cell. Expression of a transfected gene can further be accomplished by transposon-mediated insertion into to the host genome. During transposon-mediated insertion, the gene is positioned in a predictable manner between two transposon linker sequences that allow insertion into the host genome as well as subsequent excision.

[0058] The terms “inhibitor,” “repressor” or “antagonist” or “downregulator” interchangeably refer to a substance that results in a detectably lower expression or activity level as compared to a control. The inhibited expression or activity can be 10%, 20%, 30%, 40%, 50%, 60%, 70%, 80%, 90% or less than that in a control. In certain instances, the inhibition is 1.5-fold, 2-fold, 3-fold, 4-fold, 5-fold, 10-fold, or more in comparison to a control.

[0059] The terms “therapy,” “treatment,” and “amelioration” refer to any reduction in the severity of symptoms, e.g., of a neurodegenerative disorder or neuronal injury. As used herein, the terms “treat” and “prevent” are not intended to be absolute terms. Treatment can refer to any delay in onset, amelioration of symptoms, improvement in patient survival, increase in survival time or rate, etc. The effect of treatment can be compared to an individual or pool of individuals not receiving the treatment, or to the same patient prior to treatment or at a different time during treatment. In some aspects, the severity of disease is reduced by at least 10%, as compared, e.g., to the individual before administration or to a control individual not undergoing treatment. In some aspects the severity of disease is reduced by at least 25%, 50%, 75%, 80%, or 90%, or in some cases, no longer detectable using standard diagnostic techniques.

[0060] The term “therapeutically effective amount,” as used herein, refers to that amount of the therapeutic agent sufficient to ameliorate a given disorder or symptoms. For example, for the given parameter, a therapeutically effective amount will show an increase or decrease of at least 5%, 10%, 15%, 20%, 25%, 40%, 50%, 60%, 75%, 80%, 90%, or at least 100%. Therapeutic efficacy can also be expressed as “-fold” increase or decrease. For example, a therapeutically effective amount can have at least a 1.2-fold, 1.5-fold, 2-fold, 5-fold, or more effect over a control.

[0061] “Subject,” “patient,” “individual in need of treatment” and like terms are used interchangeably and refer to, except where indicated, mammals such as humans and non-human primates, as well as rabbits, rats, mice, goats, pigs, and other mammalian species. The term does not necessarily indicate that the subject has been diagnosed with a particular disease, but typically refers to an individual under medical supervision.

### Methods of Modulating Cardiomyocyte Proliferation

[0062] Provided herein are methods of modulating proliferation of a cardiomyocyte using micro RNA modulators. A micro RNA modulator as used herein refers to an agent capable of modulating the level of expression of a micro RNA (e.g. let-7a, mir 100). In some embodiments, the micro RNA modulator is encoded by a nucleic acid. In other embodiments, the micro RNA modulator is a small molecule (e.g. a chemical compound, synthetic micro RNA molecule). In some embodiments, the micro RNA modulator decreases the level of expression of a micro RNA compared to the level of expression in the absence of the micro RNA modulator. Where the micro RNA modulator decreases the level of expression of a micro RNA relative to the absence of the modulator, the micro RNA modulator is an antagonist of said micro RNA. In other embodiments, the micro RNA modulator increases the level expression of a micro RNA compared to the level of expression in the absence of the micro RNA modulator. Where the micro RNA modulator increases the level of expression of a micro RNA relative to the absence of the modulator, the micro RNA modulator is an agonist of the micro RNA.

[0063] In one aspect, a method of modulating proliferation of a cardiomyocyte is provided. The method includes (i) transfecting a cardiomyocyte with a nucleic acid encoding a micro RNA modulator, thereby forming a transfected cardiomyocyte; and (ii) allowing the transfected cardiomyocyte to divide, thereby modulating proliferation of the cardiomyocyte. In some embodiments, the nucleic acid is a lentiviral vector. In embodiments, the nucleic acid includes a nucleic acid sequence as set forth in SEQ ID NO:1124 or SEQ ID NO:1125. In some embodiments, the nucleic acid is a lentiviral vector. In embodiments, the nucleic acid includes a nucleic acid sequence as set forth in SEQ ID NO:1124 and SEQ ID NO:1125. In embodiments, the nucleic acid includes a nucleic acid sequence as set forth in SEQ ID NO:1124. In embodiments, the nucleic acid includes a nucleic acid sequence as set forth in SEQ ID NO:1125. In embodiments, the nucleic acid has the sequence as set forth in SEQ ID NO:1124 or SEQ ID NO:1125. In embodiments, the nucleic acid has the sequence as set forth in SEQ ID NO:1124. In embodiments, the nucleic acid has the sequence as set forth in SEQ ID NO:1125.

[0064] In other embodiments, the micro RNA modulator is an antagonist of a mir 99 micro RNA, a let-7a micro RNA, a mir 100 micro RNA, a mir 4458 micro RNA, a mir 4500 micro RNA or a mir 89 micro RNA. In some embodiments, the proliferation of the cardiomyocyte is increased compared to a control cardiomyocyte lacking the nucleic acid encoding said RNA modulator. In some embodiments, the micro RNA modulator is an agonist of a mir 99 micro RNA, a let-7a micro RNA, a mir 100 micro RNA, a mir 4458 micro RNA, a mir 4500 micro RNA or a mir 89 micro RNA.

[0065] In another aspect, a method of modulating proliferation of a cardiomyocyte is provided. The method includes (i) contacting a cardiomyocyte with a small molecule, thereby forming a treated cardiomyocyte; and (ii) allowing the treated cardiomyocyte to divide, thereby modulating proliferation of the cardiomyocyte. In some embodiments, the proliferation of the cardiomyocyte is increased compared to a control cardiomyocyte lacking the small molecule. In some further embodiment, the small molecule modulates expression of a mir 99 micro RNA-regulated protein, a let-7a micro RNA-regulated protein, a mir 100 micro RNA-regulated protein, a mir 4458 micro RNA-regulated protein, a mir 4500 micro RNA-regulated protein or a mir 89 micro RNA-regulated protein. In other embodiments, the small molecule is a chemical compound. In some embodiments, the small molecule is a synthetic micro RNA molecule. In embodiments, the synthetic micro RNA molecule includes a nucleic acid sequence as set forth in SEQ ID NO:1124 or SEQ ID NO:1125. In embodiments, the synthetic micro RNA molecule includes a nucleic acid sequence as set forth in SEQ ID NO:1124 and SEQ ID NO:1125. In embodiments, the synthetic micro RNA molecule includes a nucleic acid sequence as set forth in SEQ ID NO:1124. In embodiments, the synthetic micro RNA molecule includes a nucleic acid sequence as set forth in SEQ ID NO:1125. In embodiments, the synthetic micro RNA molecule has a nucleic acid sequence as set forth in SEQ ID NO:1124. In embodiments, the synthetic micro RNA molecule has a nucleic acid sequence as set forth in SEQ ID NO:1125.

[0066] In other embodiments, the proliferation of the cardiomyocyte is increased compared to a control cardiomyocyte lacking the synthetic micro RNA molecule. In some embodiments, the synthetic micro RNA molecule is an antagonist of a mir 99 micro RNA, a let-7a micro RNA, a mir 100 micro RNA, a mir 4458 micro RNA, a mir 4500 micro RNA or a mir 89 micro RNA. In other embodiments, the synthetic micro RNA molecule is an agonist of a mir 99 micro RNA, a let-7a micro RNA, a mir 100 micro RNA, a mir 4458 micro RNA, a mir 4500 micro RNA or a mir 89 micro RNA.

[0067] In another aspect, a method of treating myocardial infarction in a subject in need thereof is provided. The method includes administering to the subject a therapeutically effective amount of a nucleic acid encoding a micro RNA modulator, wherein the RNA modulator increases cardiomyocyte proliferation thereby treating the myocardial infarction. In some embodiments, the micro RNA modulator is an antagonist of a mir 99 micro RNA, a let-7a micro RNA, a mir 100 micro RNA, a mir 4458 micro RNA, a mir 4500 micro RNA or a mir 89 micro RNA. In embodiments, the micro RNA modulator is an antagonist of a mir 99 micro RNA and an antagonist of a let-7a micro RNA. In embodiments, the nucleic acid includes a nucleic acid sequence as set forth in SEQ ID NO:1124 or SEQ ID NO:1125. In embodiments, the nucleic acid includes a nucleic acid sequence as set forth in SEQ ID NO:1124. In embodiments, the nucleic acid includes a nucleic acid sequence as set forth in SEQ ID NO:1125. In embodiments, the nucleic acid includes a nucleic acid sequence as set forth in SEQ ID NO:1124 and SEQ ID NO:1125.

[0068] In embodiments, the method includes administering to the subject a therapeutically effective amount of a first nucleic acid and a second nucleic acid, wherein the first nucleic acid encodes an antagonist of a mir 99 micro RNA and the second nucleic acid encodes an antagonist of a let-7a micro RNA. In embodiments, the administering to the subject a therapeutically effective amount of a nucleic acid includes administering a first nucleic acid and a second nucleic acid, wherein the first nucleic acid encodes an antagonist of a mir 99 micro RNA and the second nucleic acid encodes an antagonist of a let-7a micro RNA.

[0069] In another aspect, a method of treating myocardial infarction in a subject in need thereof is provided. The method includes administering to the subject a therapeutically effective amount of a nucleic acid encoding an antagonist of a mir 99 micro RNA and a nucleic acid encoding an antagonist of a let-7a micro RNA, thereby treating the myocardial infarction.

[0070] In another aspect, a method of treating myocardial infarction in a subject in need thereof is provided. The method includes administering to the subject a therapeutically effective amount of a small molecule, wherein the small molecule increases cardiomyocyte proliferation thereby treating the myocardial infarction. In some embodiments, the small molecule modulates expression of a mir 99 micro RNA-regulated protein, a let-7a micro RNA-regulated protein, a mir 100 micro RNA-regulated protein, a mir 4458 micro RNA-regulated protein, a mir 4500 micro RNA-regulated protein or a mir 89 micro RNA-regulated protein. In embodiments, the small molecule modulates expression of a mir 99 micro RNA-regulated protein and a let-7a micro RNA-regulated protein. In some other embodiments, the small molecule is a chemical compound. In other embodiments, the small molecule is a synthetic micro RNA molecule. In embodiments, the synthetic micro RNA molecule includes a nucleic acid sequence as set forth by SEQ ID NO:1124 or SEQ ID NO:1125. In embodiments, the synthetic micro RNA molecule includes a nucleic acid sequence as set forth by SEQ ID NO:1124 and SEQ ID NO:1125. In embodiments, the synthetic micro RNA molecule includes a nucleic acid sequence as set forth by SEQ ID NO:1124. In embodiments, the synthetic micro RNA molecule includes a nucleic acid sequence as set forth by SEQ ID NO:1125. In some embodiments, the synthetic micro RNA molecule is an antagonist of a mir 99 micro RNA, a let-7a micro RNA, a mir 100 micro RNA, a mir 4458 micro RNA, a mir 4500 micro RNA or a mir 89 micro RNA.

### EXAMPLES

[0071] Heart failure remains one of the leading causes of mortality in the developed world. Whereas the mammalian heart is endowed with certain regenerative potential, endogenous cardiomyocyte proliferation is insufficient for functional heart repair upon injury. Interestingly, non-mammalian vertebrates, such as the zebrafish, can regenerate the damaged heart by inducing cardiomyocyte dedifferentiation and proliferation. By screening regenerating zebrafish hearts Applicants identified miR-99/100 down-regulation as a key process driving cardiomyocyte dedifferentiation. Experimental down-regulation of miR-99/100 in primary adult murine and human cardiomyocytes led to an increase in the number of proliferating cardiomyocytes. AAV-mediated in vivo down-regulation of miR-99/100 after acute myocardial injury in mice induced mature cardiomyocyte proliferation, diminished infarct size and improved heart function. Applicants' study unveils conserved regenerative mechanisms between zebrafish and mammalian cardiomyocytes and represents a proof-of-concept on the suitability of activating pro-regenerative responses for healing the diseased mammalian heart.

[0072] Cardiovascular disease remains the leading cause of mortality in the developed world. Attempts at developing curative strategies have mainly focused on the activation of endogenous cardiac progenitor cells and the transplantation of in vitro-derived cardiomyocytes (A. Aguirre et al., Cell Stem Cell 12, 275-284 (2013); S. R. Braam et al., Trends in pharmacological sciences 30, 536-45 (2009)). More recently, in vivo reprogramming strategies have emerged as potential treatments for heart failure (L. Qian et al., Nature (2012), doi:10.1038/nature11044; K. Song et al., Nature 485, 599-604 (2012) A. Eulalio et al., Nature (2012), doi:10.1038/nature11739). Along this line, a recent report by Porrello et al. has highlighted a remarkable regenerative capacity in neonatal murine hearts upon injury (E. R. Porrello et al., Science (New York, N.Y.) 331, 1078-80 (2011)). Although adult mammalian cardiomyocytes retain a certain ability to proliferate (S. E. Senyo et al., Nature, 2-6 (2012)), endogenous regenerative responses during adulthood are largely insufficient for replenishing the lost cardiac tissue. Noticeably, heart repair can be induced upon manipulation of miRNA pathways identified as drivers of cardiomyocyte proliferation in neonatal murine models (A. Eulalio et al., Nature (2012), doi:10.1038/nature11739L; E. R. Porrello et al., Circulation research 109, 670-9 (2011)). This may suggest that the mechanisms underlying heart regeneration at birth are still present, yet dormant and/or repressed, in adult murine hearts. Other vertebrates, such as the zebrafish, are able, throughout their entire lifetime, to activate endogenous regenerative responses that lead to complete cardiomyocyte-mediated heart regeneration similar to that observed in neonatal mice (R. Zhang et al., Nature (2013), doi:10.1038/nature12322; K. D. Poss et al., Science (New York, N.Y.) 298, 2188-90 (2002); A. Raya et al., Proceedings of the National Academy of Sciences of the United States of America 100 Suppl, 11889-95 (2003); C. Jopling et al., Nature 464, 606-9 (2010); K. Kikuchi et al., Nature 464, 601-5 (2010)). Together, these observations led us to hypothesize on the existence of conserved pro-regenerative pathways between zebrafish and mammals (A. W. Seifert et al., Nature 489, 561-5 (2012)), and if present, whether they could be altered to drive terminally differentiated mammalian cardiomyocytes to a regeneration-competent state.

[0073] To first elucidate the presence of conserved regulatory pathways underlying regeneration Applicants decided to focus on microRNAs promoting cardiomyocyte dedifferentiation in the zebrafish. Expression of 90 microRNAs was significantly changed 3 days post amputation (dpa) of the ventricular apex (FIG. 5A). Bioinformatic analysis of signaling pathways and GO processes indicated significant enrichment in proliferation pathways, as well as processes related to chromatin remodeling (S. L. Paige et al., Cell 151, 221-32 (2012)), morphogenesis and kinase activity (FIG. 5B). Interestingly, two well-defined down-regulated microRNA clusters (miR-99/Let-7a and miR-100/Let-7c) were highly conserved in sequence and genomic organization across different vertebrates (FIG. 5C). Putative protein targets were also shared between zebrafish and mammals (Table S1 and Table S2). Further expression analysis demonstrated a significant down-regulation of miR-99/100 and Let-7a/c during the early regenerative stages (3-7 dpa) (FIG. 1A) in agreement with previous reports (C. Jopling et al., Nature 464, 606-9 (2010)). Noticeably, miR-99/100 and Let-7a/c expression (data not shown) was high and confined to cardiomyocytes in uninjured hearts, and almost undetectable upon injury (FIG. 1, B and C and FIG. 6). microRNA target prediction highlighted two proteins specifically expressed in the regenerating zebrafish heart, Fntβ (beta subunit of farnesyl-transferase) and Smarca5 (SWI/SNF-related matrix associated actin-dependent regulator of chromatin subfamily a, member 5) (FIG. 1, B to D and FIG. 6). Binding experiments confirmed miRNA targeting of the 3′UTRs in both human and zebrafish Fntβ and Smarca5 (a C. Mueller et al., 2H., Oncogene, 1-9 (2012)) (FIG. 7). Accompanying Fntβ up-regulation, the structural subunit of fnt (Fntα) was also expressed during heart regeneration (FIG. 8). Chemical inhibition of fnt with the specific antagonist tipifarnib significantly impaired heart regeneration by decreasing the number of proliferating cardiomyocytes (FIG. 1, E to G). Taken together, these data suggest that targets downstream of miR-99/100 play a functional role during heart regeneration.

[0074] Since regeneration might be considered to a large extent redolent of development (J. P. Brockes, A. Kumar, Annual review of cell and developmental biology 24, 525-49 (2008); J. L. Whited, C. J. Tabin, 2-4 (2010); D. Knapp, E. M. Tanaka, Current Opinion in Genetics & Development (2012), doi:10.1016/j.gde.2012.09.006) Applicants next decided to investigate the role of miR-99/100 and their target proteins Fntβ and Smarca5 during zebrafish heart development and maturation. qRT-PCR and immunofluorescence analyses demonstrated low levels of miR-99/100 expression during early heart development concomitantly with high levels of Smarca5 and Fntβ (FIG. 9). Functional analyses by injection of miR-99/100 mimics, and/or fntβ/smarca5 translation-blocking morpholinos in one-cell stage cmlc2:GFP transgenic fish embryos resulted in a significantly reduced ventricle size in spite of the presence of apparently normal heart anatomical structures (ventricle, atrium, valve) (FIG. 1, H to J). To determine if cardiomyocytes showing up-regulation of Fntβ and Smarca5 progress into a proliferative state, Applicants analyzed the expression of nuclear proliferative markers at different time points post-amputation (FIG. 2, A to D). In all cases high levels of Fntβ and Smarca5 correlated with PCNA and/or H3P expression in the nucleus. Concomitantly, disorganized sarcomeric structures were particularly evident at 7 dpa (FIG. 2, A and B). miR-99/100 expression levels, and their respective protein targets, returned to basal levels when regeneration of the ventricle was mostly complete at 30 dpa (FIG. 10, A and B). Next, Applicants designed a series of in vivo experiments to exogenously manipulate miR-99/100 levels with mimics and antagomiRs in adult regenerating animals (FIG. 10, C and D). Intra-cardiac injection of miR-99/100 mimics efficiently blocked the regenerative response in all animals tested (FIG. 2, E and F) and BrdU incorporation confirmed that cardiomyocyte proliferation was significantly disrupted in mimic-treated animals (FIG. 2G). Conversely, microRNA inhibition of size-matched sibling fish led to significantly enlarged hearts (FIG. 2, H and I). Histological analysis indicated cardiomyocyte proliferation in the absence of cardiac hypertrophy (FIG. 2J), suggesting hyperplasia as the underlying mechanism of action of miRNA-99/100. Applicants next decided to study the downstream signaling mechanisms of miR-99/100 and Let-7a/c. Applicants detected increased farnesylation as a consequence of fnt activity in regenerating hearts at 3 and 7 dpa (FIG. 11). Ras family proteins, targets of fnt, appeared up-regulated and preferentially located to the cell membrane (FIG. 12, A to C). Similarly, c-Myc, a transcription factor essential for cellular proliferation downstream of this pathway, was significantly up-regulated and localized to the cell nucleus in dedifferentiating cardiomyocytes (FIG. 12, D to F). Interestingly, Cbx5 and Cbx3a, chromatin-remodeling proteins critical in proliferating cardiomyocytes (J. K. Takeuchi et al., Nature communications 2, 187 (2011); N. Collins et al., Nature genetics 32, 627-32 (2002); S. H. Kwon, J. L. Workman, BioEssays: news and reviews in molecular, cellular and developmental biology 33, 280-9 (2011)), demonstrated enhanced expression at 7 dpa, when Smarca5 levels in the nucleus were highest (FIG. 13). Taken together, Applicants' results indicate that miR-99/100 down-regulation plays a role, possibly by chromatin remodeling, in the dedifferentiation process that leads to zebrafish heart regeneration (FIG. 14).

[0075] In light of the evolutionary conservation of their structures and downstream signaling pathways, Applicants wondered whether microRNA-99/100 and Let-7a/c functions would be similar between mammals and zebrafish. To this end, Applicants first analyzed microRNA-99/100 and FNTβ/SMARCA5 expression in developing and adult murine hearts. qRT-PCR and immunofluorescence analyses highlighted a progressive up-regulation of microRNA-99/100 paralleling cardiac maturation and FNTβ/SMARCA5 down-regulation (FIG. 3, A and B and FIG. 15). Analyses of human cardiomyocytes at progressive differentiation stages, including adult heart samples, demonstrated a peak in miR-99/100 expression in adult mature human cardiomyocytes, a point at which FNTβ/SMARCA5 expression was undetectable (FIG. 3, C and D). hESC-derived immature proliferative cardiomyocytes (hiCM) expressed GATA4 (a cardiac progenitor marker), FNTβ, SMARCA5 and intermediate-low levels of the identified miRNAs (FIG. 16) resembling a regenerative, proliferative state as described before (K. Kikuchi et al., Nature 464, 601-5 (2010), C. Jopling et al., Nature reviews. Molecular cell biology 12, 79-89 (2011)).

[0076] Applicants next sought to evaluate the effects of microRNA down-regulation in adult murine cardiomyocytes. Seven days after shRNA-mediated microRNA silencing significant up-regulation of SMARCA5 and FNTβ was observed accompanied by an increased amount of cardiomyocytes with disorganized sarcomeric structures and immature morphology (FIG. 3, E and F and FIG. 17, A to C). Further analysis demonstrated enhanced proliferation paralleling GATA4 and PCNA re-expression (FIG. 3, E to G and FIG. 17). These effects were more pronounced when miR-99/100 and Let-7a/c were simultaneously blocked (FIG. 3G and FIG. 17). Similarly, microRNA silencing in human cardiomyocytes resulted in increased proliferation and higher numbers of beating colonies (FIG. 3, G and H and Videos 1 to 5). Functional analyses demonstrated minimal changes in the beating rate before and after anti-miR delivery (FIG. 17D). Indicative of cardiomyocyte specificity, microRNA down-regulation did not affect proliferation or FNTβ/SMARCA5 expression in human fibroblasts or vascular cells (FIG. 18). Organotypic cultures of adult murine hearts, a setting more closely resembling physiological conditions (M. Brandenburger et al., Cardiovascular research 93, 50-9 (2012)), demonstrated low to undetectable levels of FNTβ/SMARCA5 (FIG. 19). Delivery of anti-miR-99/100 and/or anti-miR-Let-7 to murine heart organotypic slices resulted in cardiomyocyte proliferation as demonstrated by down-regulation of MyHC as well as re-expression of GATA4 and H3 phosphorylation (FIG. 19). Ultrastructural electron microscopy analysis confirmed cytoskeletal disassembly (FIG. 4A). Further supporting these observations, Connexin 43 (Cx43), an essential component of coupling GAP junctions in cardiomyocytes, was profoundly down-regulated (FIG. 19). Next, Applicants mimicked tissue ischemia and heart damage in organotypic slices to determine the effects of the treatment upon injury (FIG. 20A). Control organotypic slices developed necrotic areas accompanied by marginal proliferation under hypoxic conditions whereas anti-microRNA delivery resulted in reduced necrosis (FIG. 20B to D) and the appearance of proliferative cardiomyocyte populations (FIG. 4B and FIG. 20D).

[0077] Lastly, Applicants decided to test the efficacy of anti-microRNA delivery for the induction of regeneration in a murine model of myocardial infarction. Following LAD artery ligation, anti-miR-99/100 and anti-Let-7 were administered by injection of serotype 9 adeno-associated viral (AAV) particles, specifically targeting the cardiomyocyte population, in the periphery of the infarcted area. 18 days after treatment, both ejection fraction and fractional shortening significantly improved in the treated group (FIG. 4, C to F). Reduced fibrotic scarring and infarct sizes were readily observed three weeks after LAD artery ligation, indicative of an underlying regenerative response (FIG. 4G). Treated animals exhibited increased numbers of FNTβ/SMARCA5 positive cardiomyocytes, as well as a marked increase of cardiomyoctes re-expressing GATA4. PCNA and H3P staining demonstrated increased DNA synthesis and cardiomyocyte mitosis (FIG. 4, H to L). Of note, the number of mitotic cardiomyocytes was higher in areas of trabeculated muscle as opposed to the myocardium proper. Taken together, all these observations indicate that anti-miR delivery in adult murine cardiomyocytes suffices for the induction of a pro-regenerative proliferative response towards repairing a damaged heart.

[0078] These observations constitute a proof-of-concept on how animal models naturally capable of regeneration can be used for the identification of regenerative factors that may, subsequently, be applied to mammals. Experimental manipulation of conserved microRNAs unveiled during adult zebrafish heart regeneration led to similar responses in mice after heart infarction (replenishment of the lost cardiac tissue and inhibition of scar formation). In vivo activation of conserved cardiac regenerative responses may help to circumvent many of the problems associated with heart cell transplantation as well as those associated with reprogramming technologies (A. Aguirre et al., Cell Stem Cell 12, 275-284 (2013), M. a. Laflamme, C. E. Murry, Nature 473, 326-335 (2011)), serving as an additional tool to the clinical armamentarium of regenerative medicine towards the treatment of human heart disease (K. R. Chien et al., Journal of molecular and cellular cardiology 53, 311-3 (2012)).

### Experimental Procedures

[0079] Detailed experimental procedures can be found in Supplementary information.

[0080] Animals.

[0081] Wild-type zebrafish (AB) and cmlc2:GFP were maintained at 28.5° C. by standard methods, unless otherwise indicated. All protocols were previously approved and performed under institutional guidelines.

[0082] Culture and isolation of adult mouse ventricular myocytes. Wild-type mice (C57B6/J) were sacrificed and hearts were quickly recovered and washed with ice-cold Ca²⁺-free ModifiedTyrode's Solution (MTS). Ventricles were dissected from the rest of the heart and subjected to enzymatic digestion (Liberase DH, Roche) for 10-15 min in a spinner flask at 37 C under continuous agitation. Afterwards cells were pelleted by short centrifugation, resuspended in KB solution and cardiomyocytes were left to sediment by gravity, thus greatly reducing the presence of other contaminating cell types. Calcium was restore to 1 mM in a step-wise fashion in three gradual steps and subsequently cardiomyocytes were centrifuged, resuspended in culture medium (IMDM 5%, 1% Pen/Strep, 0.1 ng/ml FGFb, 1 ng/ml TGF-β3) and seeded in laminin-coated tissue-culture plates. Cells were kept in culture for 1 week.

[0083] Lentiviral and AAV constructs. Anti-miR constructs, miRZip-99/100 and miRZip-let7 (SBI), were used according to the manufacturer instructions. As respective controls, the anti-miRs were removed from the parent vector by digesting with BamHI and EcoRI, end filled and re-ligated. Lentiviruses were packaged by transfecting in 293T cells followed by spinfection in the respective mouse or human ES derived cardiomyocytes. AAVs were generated as described before (Eulalio et al, 2012). Briefly, the antimiR constructs contained in the miRZip vectors were excised and ligated into pZacf-U6-luc-ZsGreen. Serotype 9 AAVs were packaged by transfection of 293T cells with the appropriate plasmids.

[0084] Organotypic Heart Slice Culture.

[0085] Mice ventricles were washed in cold Modified Tyrode's Solution, embedded in 4% low melting point agarose and immediately cut into 300 μm slices using a vibratome (Leica). Heart slices were then maintained in complete IMDM 5%, 1% Pent/Strep in 12-well plates at the medium-air interface using 0.4 μm membrane transwells (Corning) at 37 C in a 5% CO₂ incubator. For experimental hypoxia-like conditions, slices were kept in a hypoxia chamber incubator for 4 hours at 37 C, 5% O₂. Lentiviral transduction was performed by immersion of the slices in virus-containing medium for 24 h.

[0086] Myocardial Infarction.

[0087] Myocardial infarction was induced CD1 mice (8-12 weeks old) by permanent left anterior descending (LAD) coronary artery ligation. Briefly, mice were anesthetized with an injection of ketamine and xylazine, intubated and placed on a rodent ventilator. Body temperature was maintained at 37° C. on a heating pad. After removing the pericardium, a descending branch of the LAD coronary artery was visualized with a stereomicroscope and occluded with a nylon suture. Ligation was confirmed by the whitening of a region of the left ventricle. Recombinant AAV vectors, at a dose of 10¹¹ viral genome particles per animal, were injected immediately after LAD ligation into the myocardium bordering the infarct zone (single injection), using an insulin syringe with incorporated 30-gauge needle. Three groups of animals were studied, receiving AAV9-control (shRNA-Luc), AAV9-antimiR-99/100 or AAV9-anti-Let-7a/c. The chest was closed, and the animals moved to a prone position until the occurrence of spontaneous breathing. BrdU was administered intraperitoneally (500 μg per animal) every 2 days, for a period of ten days. Echocardiography analysis was performed at days 12, 30 and 60 after infarction, as described below, and hearts were collected at 12 (n=6 animals per group) and 60 (n=10 animals per group) days after infarction.

[0088] Echocardiography Analysis.

[0089] To evaluate left ventricular function and dimensions, transthoracic two-dimensional echocardiography was performed on mice sedated with 5% isoflurane at 12, 30 and 60 days after myocardial infarction, using a Visual Sonics Vevo 770 Ultrasound (Visual Sonics) equipped with a 30-MHz linear array transducer. M-mode tracings in parasternal short axis view were used to measure left ventricular anterior and posterior wall thickness and left ventricular internal diameter at end-systole and end-diastole, which were used to calculate left ventricular fractional shortening and ejection fraction.

[0090] Heart Collection and Histological Analysis.

[0091] At the end of the studies, animals were anaesthetized with 5% isoflurane and then killed by injection of 10% KCl, to stop the heart at diastole. The heart was excised, briefly washed in PBS, weighted, fixed in 10% formalin at room temperature, embedded in paraffin and further processed for histology or immunofluorescence. Haematoxylin-eosin and Masson's trichrome staining were performed according to standard procedures, and analysed for regular morphology and extent of fibrosis. Infarct size was measured as the percentage of the total left ventricular area showing fibrosis.

[0092] Zebrafish Heart Amputation.

[0093] Adult fish were anaesthetized in 0.4% Tricaine and secured, ventral side uppermost, in a slotted sponge. Watchmaker forceps were used to remove the surface scales and penetrate the skin, muscle and pericardial sac. Once exposed, the ventricle was gently pulled at the apex and cut with iridectomy scissors. After surgery, fish were immediately returned to system water.

[0094] Cryosectioning.

[0095] At the specified time points, hearts were removed, washed in PBS-EDTA 0.4% and fixed for 20 min in 4% paraformaldehyde at 4° C. Afterwards, they were washed several times in PBS, equilibrated in 30% sucrose, and then frozen for cryosectioning. 10 μm slices were obtained with a cryostat (Leica).

[0096] Real Time RT-PCR.

[0097] For RNA, tissue was obtained from adult heart ventricles from different time points and conditions, extensively washed in PBS-EDTA 0.4% to remove blood, and then mechanically homogenized and processed using RNeasy kit (Qiagen) as per manufacturer's instructions. RT and PCR were performed using Quantitect Reverse Transcription Kit (Qiagen) and Quantitect Primers for the following genes: Fntb, Fntα, Smarca5, myc-a, myc-b, H-rasa, H-rasb, N-ras, K-ras, tnnt2. For miRNAs, small RNA (<200 pb) was obtained employing the miRNeasy mini kit (Qiagen) using the same procedure as before. RT and PCR reactions were carried out employing miRCURY LNA RT and PCR kits (Exiqon) and stem-loop LNA primers (Exiqon).

[0098] MicroRNA microarrays. RNA was obtained as for PCR applications. GenechipmiRNA 2.0 microarrays were purchased from Affymetrix and small RNA labeling was performed using FlashTag HSR labeling kit (Genesphere). 200 ng of small RNA was polyA-tailed and biotin conjugated. After labelling, RNA was hybridized using GeneChip reagents (Affymetrix) and protocols as indicated by the manufacturer. The chip contains hybridization probes for the miRbase v15 annotations, including 248 zebrafishmiRNAs. MicroRNA data was analyzed by using the R package.

[0099] Bioinformatic Analysis of miRNA Targets.

[0100] Signaling pathways and downstream target prediction related to the identified miRNAs were determined by using DIANA, Miranda and TargetScan. Gene ontology analysis was performed with DAVID software.

[0101] Fluorescence In Situ Hybridization.

[0102] 10 μm heart slices were further fixed in 4% PFA for 10 min at room temperature, washed in PBS and acetylated for 10 min in acetylation solution. After washing in PBS, samples were treated with proteinase K, prehybridized for 4 h and hybridized overnight at the appropriate temperature with LNA DIG-labeled probes for the corresponding miRNAs (Exiqon). The next day slides were washed and immunolabeled with anti-DIG-alkaline phosphatase antibodies (1:2,000) and antibodies against cardiomyocytic proteins of interest (1:100) overnight at 4° C. Secondary antibody incubation was performed as for immunofluorescence experiments. Alkaline phosphatase activity was detected by incubating samples in a Fast Red solution (Dako) for 2 hours. Samples were then washed, mounted in Vecta-shield and imaged in a confocal microscope. Fast Red fluorescence was detected with Cy3 settings.

[0103] Immunofluorescence.

[0104] Tissue slices were fixed for 15 min in 4% paraformaldehyde, washed in PBS-gly 0.3 M, and blocked in PBS-10% donkey serum, 0.5% TX-100, 0.5% BSA for 1 hour. Primary antibodies were diluted at the appropriate concentrations in PBS-1% donkey serum, 0.5% TX-100, 0.5% BSA and incubated overnight. After washing, slices were incubated overnight with secondary antibodies, washed and mounted in Vecta-shield. Antibodies employed are listed in table S3.

[0105] Cell Culture.

[0106] COS7 cells were maintained in DMEM (high glucose) supplemented with 10% FBS, L-Glutamine and non-essential amino acids (Invitrogen). Human ES cells, H1 and H9 (WA1 and WA9, WiCell), were cultured in chemically defined hES/hiPS growth media, mTeSR1 on growth factor reduced matrigel (BD biosciences) coated plates. Briefly, 70-80% confluent hES/iPS cells were treated with dispase (Invitrogen) for 7 minutes at 37° C. and the colonies were dispersed to small clusters and lifted carefully using a 5 ml glass pipette, at a ratio of ˜1:4.

[0107] Culture and Isolation of Adult Mouse Ventricular Myocytes.

[0108] Wild-type mice (C57B6/J) were sacrificed and hearts were quickly recovered and washed with ice-cold Ca²⁺-free ModifiedTyrode's Solution (MTS). Ventricles were dissected from the rest of the heart and subjected to enzymatic digestion (Liberase DH, Roche) for 10-15 min in a spinner flask at 37 C under continuous agitation. Afterwards cells were pelleted by short centrifugation, resuspended in KB solution and cardiomyocytes were left to sediment by gravity, thus greatly reducing the presence of other contaminating cell types. Calcium was restore to 1 mM in a step-wise fashion in three gradual steps and subsequently cardiomyocytes were centrifuged, resuspended in culture medium (IMDM 5%, 1% Pen/Strep, 0.1 ng/ml FGFb, 1 ng/ml TGF-β3) and seeded in laminin-coated tissue-culture plates. Cells were kept in culture for 1 week.

[0109] Differentiation of Human ES Cells to Immature Cardiomyocytes.

[0110] Human ES cells grown on matrigel dots (BD biosciences) were carefully dissociated using dispase and were plated on low attachment plates in EB media (IMDM, 20% FBS, 2.25 nM L-Glutamine and non-essential aminoacids). After 6 days of suspension in culture, the EBs were seeded on gelatin-coated plates in EB media. Spontaneously beating EBs were manually picked and used for further analysis. For directed differentiation, human ES cells grown in mTeSR on matrigel coated plates were treated with 12 μM GSK3β inhibitor CHIR 99021 (Stemgent) in cardiomyocyte differentiation base media (RPMI 1640 supplemented with 125 μg/ml human holo-transferrin (Sigma-Aldrich)) for 24 hours, followed by 24 hour of rest in the base media. On day 3, the cells were treated with 5 μM WNT inhibitor, IWP4 (Stemgent) for 48 hours, followed by treatment with Cardiac differentiation base media supplemented with 20 μg/ml human Insulin (SAFC) until colonies started beating.

[0111] Lentiviral Constructs.

[0112] Anti-miR constructs, miRZip-99/100 and miRZip-let7 (SBI), were used according to the manufacturer instructions. As respective controls, the anti-miRs were removed from the parent vector by digesting with BamHI and EcoRI, end filled and re-ligated. Lentiviruses were packaged by transfecting in 293T cells followed by spinfection in the respective mouse or human ES derived cardiomyocytes.

[0113] Luciferase Constructs and microRNA Binding Validation.

[0114] 3′ UTR of human and zebrafish FNTB and SMARCA5 were amplified with the indicated primers using genomic DNA as a template and were cloned into PGL3 vector (Promega) at the XhoI site downstream of luciferase gene. COS7 cells (seeded at 3×10⁴ cells per well of a 12 well plate and grown for 24 hours) were transfected with 50 ng each of indicated luciferase reporter vectors, pRL TK (Renilla luciferase control vector, Promega) either in the presence or absence of 20 nM or 40 nM of double stranded DNA oligonucleotide mimics of miR-99 or miR-100 (Dharmacon) using Lipofectamine (Invitrogen) following manufacturer's protocol. 12-16 hours post-transfection, cells were lysed using passive lysis buffer (Promega). Luminescent signals arising from the cell lysates obtained 12 hours post transfection of COS7 cells with appropriate luciferase constructs were measured using the Dual Luciferase assay system (Promega) in a Synergy H1 hybrid reader (BioTek). The relative luminescence intensity of each sample was calculated after normalization with corresponding Renilla luciferase activity, and were represented as % values compared to the corresponding sample without the miR mimic.

[0115] Confocal Microscopy.

[0116] Samples were imaged using a Zeiss L710 confocal microscope. For every sample, at least two different fields were examined at two different magnifications (using a 20× objective and a 63× oil-immersion objective). Z-stacks were obtained for further analysis and 3D reconstruction. For intensity comparison purposes, images were taken with the same settings (pinhole size, laser intensity, etc).

[0117] Organotypic Heart Slice Culture.

[0118] Mice ventricles were washed in cold Modified Tyrode's Solution, embedded in 4% low melting point agarose and immediately cut into 300 μm slices using a vibratome (Leica). Heart slices were then maintained in complete IMDM 5%, 1% Pent/Strep in 12-well plates at the medium-air interface using 0.4 μm membrane transwells (Corning) at 37 C in a 5% CO₂ incubator. For experimental hypoxia-like conditions, slices were kept in a hypoxia chamber incubator for 4 hours at 37 C, 5% O₂. Lentiviral transduction was performed by immersion of the slices in virus-containing medium for 24 h.

[0119] Morpholino and microRNA Injections in Zebrafish Embryos.

[0120] Morpholinos (Gene Tools) were dissolved in water at a 2 mM stock concentration and diluted to a 2 ng/nl working concentration in PBS/phenol red solution. Embryo injections were performed by injecting ˜1 nl morpholino solution at the 1-cell stage using a FemtoJet (Eppendorf). For microRNA mimic injection, a miR-99/100 equimolar mixture at 2 ng/nl in PBS was employed. Morphants were evaluated at 24, 48 and 72 h in a StereoLumar stereoscope (Zeiss).

[0121] In Vivo microRNA Delivery.

[0122] MicroRNA siRNA mimics without chemical modifications were purchased from Life Technologies, dissolved in nuclease-free water and complexed to jetPEI (10 N/P ratio) for in vivo, intra-cardiac administration. 0.2 μg siRNA was injected per animal every 2 days. To determine the efficiency of the delivery, a control Cy5-labeled siRNA directed against GFP was used in cmlc2:GFP animals. MicroRNA inhibitors against the miR-99/100 family were purchased from Exiqon and used at 0.2 μg siRNA per animal every 2 days.

[0123] Tipifarnib Injections.

[0124] Tipifarnib was dissolved in DMSO at 10 mg/ml and 2 μl were administered by intraperitoneal injection (final concentration 0.02 mg/animal) every 2 days for 14 days. Control animals were administered DMSO.

[0125] BrdU Labeling.

[0126] Fish were anaesthetized in 0.4% Tricaine, and 10 μl of a 10 mg/ml solution of BrdU (in PBS) was injected into the abdominal cavity once every 2 days for 14 days. At that point, hearts were removed and fixed overnight in 4% paraformaldehyde at 4° C., washed in PBS, equilibrated in 30% sucrose in PBS and frozen for cryosectioning.

[0127] Histology and Histomorphometry.

[0128] Masson's trichrome staining was performed in 10 μm tissue slices by immersion in Bouin's fixative followed by sequential incubation in Weigert's hematoxylin, Acid Fuchsin, phosphotungstic/phosphomolybdic acid, Aniline Blue and acetic acid. After washes, slices were mounted for bright field observation. Histomorphometric measurements were performed with Fiji. Injured areas were quantified in four independent different slices per animal (four animals were used per condition) and normalized to whole tissue area.

[0129] Statistical Analysis.

[0130] Results are expressed as mean±SEM. Statistical significance was determined by Student's t-test. Results are representative of at least 3 independent experiments except when otherwise indicated.

TABLE S1
miR-99/100 predicted targets

| | | SEQ | | | Total | | |
|---|---|---|---|---|---|---|---|
| Target | Representative | ID | | Representative | context + | Aggregate | Publication |
| gene | transcript | NO: | Gene name | miRNA | score | PCT | (s) |
| FGFR3 | NM_000142 | 1 | fibroblast growth | hsa-miR-99a | −0.47 | <0.1 | 2005, |
| | | | factor receptor 3 | | | | 2007, |
| | | | | | | | 2009 |
| IGF1R | NM_000875 | 2 | insulin-like growth | hsa-miR-100 | −0.26 | <0.1 | 2007, |
| | | | factor 1 receptor | | | | 2009 |
| PPP3CA | NM_000944 | 3 | protein phosphatase | hsa-miR-99a | −0.26 | <0.1 | 2009 |
| | | | 3, catalytic subunit, | | | | |
| | | | alpha isozyme | | | | |
| ZNF197 | NM_001024855 | 4 | zinc finger protein | hsa-miR-100 | −0.65 | <0.1 | |
| | | | 197 | | | | |
| TTC39A | NM_001080494 | 5 | tetratricopeptide | hsa-miR-99a | −0.55 | <0.1 | 2007, |
| | | | repeat domain 39A | | | | 2009 |
| NXF1 | NM_001081491 | 6 | nuclear RNA export | hsa-miR-100 | −0.2 | 0.11 | 2009 |
| | | | factor 1 | | | | |
| SMARCA4 | NM_001128844 | 7 | SWI/SNF related, | hsa-miR-100 | −0.26 | 0.11 | |
| | | | matrix associated, | | | | |
| | | | actin dependent | | | | |
| | | | regulator of | | | | |
| | | | chromatin, subfamily | | | | |
| | | | a, member 4 | | | | |
| LRRC8B | NM_001134476 | 8 | leucine rich repeat | hsa-miR-99a | −0.29 | <0.1 | |
| | | | containing 8 family, | | | | |
| | | | member B | | | | |
| EIF2C2 | NM_001164623 | 9 | eukaryotic translation | hsa-miR-100 | −0.4 | <0.1 | 2005, |
| | | | initiation factor 2C, 2 | | | | 2007, |
| | | | | | | | 2009 |
| TMEM135 | NM_001168724 | 10 | transmembrane | hsa-miR-100 | −0.28 | 0.11 | |
| | | | protein 135 | | | | |
| CLDN11 | NM_001185056 | 11 | claudin 11 | hsa-miR-100 | −0.29 | <0.1 | 2009 |
| BMPR2 | NM_001204 | 12 | bone morphogenetic | hsa-miR-100 | −0.28 | 0.11 | 2005, |
| | | | protein receptor, type | | | | 2007, |
| | | | II (serine/threonine | | | | 2009 |
| | | | kinase) | | | | |
| INSM1 | NM_002196 | 13 | insulinoma- | hsa-miR-99a | −0.25 | <0.1 | 2005, |
| | | | associated 1 | | | | 2007 |
| PPP1CB | NM_002709 | 14 | protein phosphatase | hsa-miR-100 | −0.31 | 0.11 | 2009 |
| | | | 1, catalytic subunit, | | | | |
| | | | beta isozyme | | | | |
| FZD5 | NM_003468 | 15 | frizzled family | hsa-miR-100 | −0.3 | <0.1 | 2007, |
| | | | receptor 5 | | | | 2009 |
| SMARCA5 | NM_003601 | 16 | SWI/SNF related, | hsa-miR-100 | −0.45 | <0.1 | 2005, |
| | | | matrix associated, | | | | 2007, |
| | | | actin dependent | | | | 2009 |
| | | | regulator of | | | | |
| | | | chromatin, subfamily | | | | |
| | | | a, member 5 | | | | |
| PPFIA3 | NM_003660 | 17 | protein tyrosine | hsa-miR-100 | −0.3 | 0.11 | 2005, |
| | | | phosphatase, receptor | | | | 2007, |
| | | | type, f polypeptide | | | | 2009 |
| | | | (PTPRF), interacting | | | | |
| | | | protein (liprin), alpha 3 | | | | |
| MTOR | NM_004958 | 18 | mechanistic target of | hsa-miR-100 | −0.38 | <0.1 | 2005, |
| | | | rapamycin | | | | 2007, |
| | | | (serine/threonine | | | | 2009 |
| | | | kinase) | | | | |
| ST5 | NM_005418 | 19 | suppression of | hsa-miR-100 | −0.33 | <0.1 | |
| | | | tumorigenicity 5 | | | | |
| HOXA1 | NM_005522 | 20 | homeobox A1 | hsa-miR-99a | −0.33 | <0.1 | 2005, |
| | | | | | | | 2007, |
| | | | | | | | 2009 |
| HS3ST3B1 | NM_006041 | 21 | heparan sulfate | hsa-miR-99a | −0.59 | <0.1 | 2005, |
| | | | (glucosamine) 3-O- | | | | 2007, |
| | | | sulfotransferase 3B1 | | | | 2009 |
| HS3ST2 | NM_006043 | 22 | heparan sulfate | hsa-miR-100 | −0.6 | <0.1 | 2005, |
| | | | (glucosamine) 3-O- | | | | 2007, |
| | | | sulfotransferase 2 | | | | 2009 |
| ICMT | NM_012405 | 23 | isoprenylcysteine | hsa-miR-99a | −0.15 | <0.1 | 2005, |
| | | | carboxyl | | | | 2007, |
| | | | methyltransferase | | | | 2009 |
| BAZ2A | NM_013449 | 24 | bromodomain | hsa-miR-100 | −0.46 | <0.1 | 2005, |
| | | | adjacent to zinc | | | | 2007, |
| | | | finger domain, 2A | | | | 2009 |
| ZZEF1 | NM_015113 | 25 | zinc finger, ZZ-type | hsa-miR-100 | −0.42 | <0.1 | 2005, |
| | | | with EF-hand | | | | 2007, |
| | | | domain 1 | | | | 2009 |
| NIPBL | NM_015384 | 26 | Nipped-B homolog | hsa-miR-99a | −0.3 | 0.11 | |
| | | | (Drosophila) | | | | |
| PI15 | NM_015886 | 27 | peptidase inhibitor | hsa-miR-99a | −0.19 | 0.11 | 2009 |
| | | | 15 | | | | |
| ZBTB7A | NM_015898 | 28 | zinc finger and BTB | hsa-miR-100 | −0.16 | 0.11 | 2007, |
| | | | domain containing | | | | 2009 |
| | | | 7A | | | | |
| PPPDE1 | NM_016076 | 29 | PPPDE peptidase | hsa-miR-99a | −0.26 | 0.11 | 2009 |
| | | | domain containing 1 | | | | |
| EPDR1 | NM_017549 | 30 | ependymin related | hsa-miR-100 | −0.69 | <0.1 | 2009 |
| | | | protein 1 (zebrafish) | | | | |
| RAVER2 | NM_018211 | 31 | ribonucleoprotein, | hsa-miR-99a | −0.44 | <0.1 | 2007, |
| | | | PTB-binding 2 | | | | 2009 |
| CYP26B1 | NM_019885 | 32 | cytochrome P450, | hsa-miR-100 | −0.14 | <0.1 | 2005, |
| | | | family 26, subfamily | | | | 2007, |
| | | | B, polypeptide 1 | | | | 2009 |
| TAOK1 | NM_020791 | 33 | TAO kinase 1 | hsa-miR-100 | −0.21 | <0.1 | |
| MBNL1 | NM_021038 | 34 | muscleblind-like | hsa-miR-99a | −0.2 | <0.1 | 2005, |
| | | | (Drosophila) | | | | 2007, |
| | | | | | | | 2009 |
| MTMR3 | NM_021090 | 35 | myotubularin related | hsa-miR-99a | −0.18 | <0.1 | 2005, |
| | | | protein 3 | | | | 2007, |
| | | | | | | | 2009 |
| ADCY1 | NM_021116 | 36 | adenylate cyclase 1 | hsa-miR-99a | −0.4 | <0.1 | 2005, |
| | | | (brain) | | | | 2007, |
| | | | | | | | 2009 |
| RRAGD | NM_021244 | 37 | Ras-related GTP | hsa-miR-100 | −0.35 | <0.1 | |
| | | | binding D | | | | |
| TRIB2 | NM_021643 | 38 | tribbles homolog 2 | hsa-miR-100 | −0.31 | <0.1 | 2005, |
| | | | (Drosophila) | | | | 2007, |
| | | | | | | | 2009 |
| CEP85 | NM_022778 | 39 | centrosomal protein | hsa-miR-99a | −0.29 | 0.11 | 2007, |
| | | | 85 kDa | | | | 2009 |
| RMND5A | NM_022780 | 40 | required for meiotic | hsa-miR-99a | −0.15 | 0.11 | |
| | | | nuclear division 5 | | | | |
| | | | homolog A (S. cerevisiae) | | | | |
| THAP2 | NM_031435 | 41 | THAP domain | hsa-miR-100 | −0.64 | 0.11 | 2007, |
| | | | containing, apoptosis | | | | 2009 |
| | | | associated protein 2 | | | | |
| FZD8 | NM_031866 | 42 | frizzled family | hsa-miR-100 | −0.34 | <0.1 | 2005, |
| | | | receptor 8 | | | | 2007, |
| | | | | | | | 2009 |
| KBTBD8 | NM_032505 | 43 | kelch repeat and | hsa-miR-100 | −0.6 | <0.1 | 2007, |
| | | | BTB (POZ) domain | | | | 2009 |
| | | | containing 8 | | | | |
| SLC44A1 | NM_080546 | 44 | solute carrier family | hsa-miR-100 | −0.31 | <0.1 | 2007, |
| | | | 44, member 1 | | | | 2009 |
| ZNRF2 | NM_147128 | 45 | zinc and ring finger 2 | hsa-miR-100 | −0.24 | 0.11 | |
| ST6GALNAC4 | NM_175039 | 46 | ST6 (alpha-N-acetyl- | hsa-miR-99a | −0.56 | <0.1 | |
| | | | neuraminyl-2,3-beta- | | | | |
| | | | galactosyl-1,3)-N- | | | | |
| | | | acetylgalactosaminide | | | | |
| | | | alpha-2,6- | | | | |
| | | | sialyltransferase 4 | | | | |
| GRHL1 | NM_198182 | 47 | grainyhead-like 1 | hsa-miR-99a | −0.3 | 0.11 | 2009 |
| | | | (Drosophila) | | | | |

TABLE S2
Let-7a/c predicted targets.

| | | SEQ | | | Total | | |
|---|---|---|---|---|---|---|---|
| Target | Representative | ID | | Representative | context + | Aggregate | Publication |
| gene | transcript | NO: | Gene name | miRNA | score | PCT | (s) |
| ADRB2 | NM_000024 | 48 | adrenergic, beta-2-, | hsa-miR- | −0.47 | 0.63 | 2005, |
| | | | receptor, surface | 4458 | | | 2007, |
| | | | | | | | 2009 |
| ADRB3 | NM_000025 | 49 | adrenergic, beta-3-, | hsa-miR- | −0.28 | 0.98 | 2005, |
| | | | receptor | 4458 | | | 2007, |
| | | | | | | | 2009 |
| FAS | NM_000043 | 50 | Fas (TNF receptor | hsa-miR-98 | −0.32 | 0.85 | 2009 |
| | | | superfamily, member | | | | |
| | | | 6) | | | | |
| ATP7B | NM_000053 | 51 | ATPase, Cu++ | hsa-miR- | −0.09 | 0.93 | 2009 |
| | | | transporting, beta | 4458 | | | |
| | | | polypeptide | | | | |
| CAPN3 | NM_000070 | 52 | calpain 3, (p94) | hsa-miR- | −0.15 | 0.92 | 2009 |
| | | | | 4458 | | | |
| CLCN5 | NM_000084 | 53 | chloride channel 5 | hsa-let-7c | −0.4 | >0.99 | 2007, |
| | | | | | | | 2009 |
| COL1A1 | NM_000088 | 54 | collagen, type I, alpha 1 | hsa-miR- | −0.18 | 0.89 | 2005, |
| | | | | 4500 | | | 2007, |
| | | | | | | | 2009 |
| COL1A2 | NM_000089 | 55 | collagen, type I, alpha 2 | hsa-miR- | −0.41 | 0.95 | 2005, |
| | | | | 4500 | | | 2007, |
| | | | | | | | 2009 |
| COL3A1 | NM_000090 | 56 | collagen, type III, | hsa-miR- | −0.37 | 0.92 | 2005, |
| | | | alpha 1 | 4458 | | | 2007, |
| | | | | | | | 2009 |
| CYP19A1 | NM_000103 | 57 | cytochrome P450, | hsa-let-7f | −0.22 | 0.9 | 2005, |
| | | | family 19, subfamily | | | | 2007, |
| | | | A, polypeptide 1 | | | | 2009 |
| DMD | NM_000109 | 58 | dystrophin | hsa-let-7d | −0.29 | 0.84 | 2005, |
| | | | | | | | 2007, |
| | | | | | | | 2009 |
| ERCC6 | NM_000124 | 59 | excision repair cross- | hsa-let-7d | −0.46 | 0.95 | 2005, |
| | | | complementing | | | | 2007, |
| | | | rodent repair | | | | 2009 |
| | | | deficiency, | | | | |
| | | | complementation | | | | |
| | | | group 6 | | | | |
| GALC | NM_000153 | 60 | galactosylceramidase | hsa-miR- | −0.27 | 0.93 | 2009 |
| | | | | 4458 | | | |
| GHR | NM_000163 | 61 | growth hormone | hsa-miR-98 | −0.16 | 0.87 | 2005, |
| | | | receptor | | | | 2007, |
| | | | | | | | 2009 |
| HK2 | NM_000189 | 62 | hexokinase 2 | hsa-miR- | −0.06 | 0.89 | 2005, |
| | | | | 4500 | | | 2007, |
| | | | | | | | 2009 |
| TBX5 | NM_000192 | 63 | T-box 5 | hsa-miR- | −0.16 | 0.94 | 2005, |
| | | | | 4500 | | | 2007, |
| | | | | | | | 2009 |
| INSR | NM_000208 | 64 | insulin receptor | hsa-let-7i | −0.11 | 0.99 | 2007, |
| | | | | | | | 2009 |
| ITGB3 | NM_000212 | 65 | integrin, beta 3 | hsa-miR- | −0.21 | >0.99 | 2005, |
| | | | (platelet glycoprotein | 4458 | | | 2007, |
| | | | IIIa, antigen CD61) | | | | 2009 |
| RB1 | NM_000321 | 66 | retinoblastoma 1 | hsa-miR- | −0.1 | 0.83 | 2005, |
| | | | | 4500 | | | 2007, |
| | | | | | | | 2009 |
| SCN5A | NM_000335 | 67 | sodium channel, | hsa-miR- | −0.04 | 0.95 | 2005, |
| | | | voltage-gated, type V, | 4458 | | | 2007, |
| | | | alpha subunit | | | | 2009 |
| SGCD | NM_000337 | 68 | sarcoglycan, delta | hsa-miR- | >−0.02 | 0.7 | 2005, |
| | | | (35 kDa dystrophin- | 4458 | 2007, | | |
| | | | associated | | | | 2009 |
| | | | glycoprotein) | | | | |
| TSC1 | NM_000368 | 69 | tuberous sclerosis 1 | hsa-miR- | −0.22 | 0.95 | 2005, |
| | | | | 4458 | | | 2007, |
| | | | | | | | 2009 |
| CDKN1A | NM_000389 | 70 | cyclin-dependent | hsa-let-7i | −0.24 | 0.76 | 2009 |
| | | | kinase inhibitor 1A | | | | |
| | | | (p21, Cip1) | | | | |
| TPP1 | NM_000391 | 71 | tripeptidyl peptidase I | hsa-miR- | −0.24 | 0.97 | 2009 |
| | | | | 4458 | | | |
| COL5A2 | NM_000393 | 72 | collagen, type V, | hsa-miR- | −0.16 | 0.95 | 2005, |
| | | | alpha 2 | 4458 | | | 2007, |
| | | | | | | | 2009 |
| GALE | NM_000403 | 73 | UDP-galactose-4- | hsa-miR- | −0.28 | 0.91 | 2005, |
| | | | epimerase | 4458 | | | 2007, |
| | | | | | | | 2009 |
| LOR | NM_000427 | 74 | loricrin | hsa-let-7g | −0.27 | 0.88 | 2009 |
| RAG1 | NM_000448 | 75 | recombination | hsa-let-7a | −0.17 | 0.76 | 2009 |
| | | | activating gene 1 | | | | |
| AMT | NM_000481 | 76 | aminomethyltransferase | hsa-let-7a | −0.29 | 0.82 | 2009 |
| COL4A5 | NM_000495 | 77 | collagen, type IV, | hsa-miR- | −0.14 | 0.91 | 2005, |
| | | | alpha 5 | 4500 | | | 2007, |
| | | | | | | | 2009 |
| KCNJ11 | NM_000525 | 78 | potassium inwardly- | hsa-let-7d | −0.44 | 0.78 | 2009 |
| | | | rectifying channel, | | | | |
| | | | subfamily J, member | | | | |
| | | | 11 | | | | |
| TP53 | NM_000546 | 79 | tumor protein p53 | hsa-let-7d | −0.28 | 0.93 | 2009 |
| DCX | NM_000555 | 80 | doublecortin | hsa-let-7d | −0.05 | 0.87 | 2005, |
| | | | | | | | 2007 |
| IL6R | NM_000565 | 81 | interleukin 6 receptor | hsa-miR- | −0.16 | 0.94 | |
| | | | | 4500 | | | |
| IL10 | NM_000572 | 82 | interleukin 10 | hsa-let-7e | −0.14 | 0.94 | 2005, |
| | | | | | | | 2007, |
| | | | | | | | 2009 |
| IL6 | NM_000600 | 83 | interleukin 6 | hsa-miR- | −0.15 | 0.73 | 2007 |
| | | | (interferon, beta 2) | 4500 | | | |
| IGF1 | NM_000618 | 84 | insulin-like growth | hsa-let-7f | −0.1 | 0.97 | 2009 |
| | | | factor 1 | | | | |
| | | | (somatomedin C) | | | | |
| NOS1 | NM_000620 | 85 | nitric oxide synthase | hsa-miR- | −0.11 | 0.95 | |
| | | | 1 (neuronal) | 4458 | | | |
| FASLG | NM_000639 | 86 | Fas ligand (TNF | hsa-miR- | −0.26 | 0.98 | 2005, |
| | | | superfamily, member | 4458 | | | 2007, |
| | | | 6) | | | | 2009 |
| ADRB1 | NM_000684 | 87 | adrenergic, beta-1-, | hsa-miR- | −0.25 | 0.98 | 2007, |
| | | | receptor | 4500 | | | 2009 |
| CACNA1D | NM_000720 | 88 | calcium channel, | hsa-let-7b | −0.07 | 0.88 | 2005, |
| | | | voltage-dependent, L | | | | 2007, |
| | | | type, alpha 1D | | | | 2009 |
| | | | subunit | | | | |
| CACNA1E | NM_000721 | 89 | calcium channel, | hsa-miR- | −0.01 | 0.93 | 2005, |
| | | | voltage-dependent, R | 4500 | | | 2007, |
| | | | type, alpha 1E subunit | | | | 2009 |
| GABRA6 | NM_000811 | 90 | gamma-aminobutyric | hsa-let-7d | −0.16 | 0.84 | 2009 |
| | | | acid (GABA) A | | | | |
| | | | receptor, alpha 6 | | | | |
| HTR1E | NM_000865 | 91 | 5-hydroxytryptamine | hsa-let-7d | −0.27 | 0.89 | 2009 |
| | | | (serotonin) receptor | | | | |
| | | | 1E | | | | |
| HTR4 | NM_000870 | 92 | 5-hydroxytryptamine | hsa-let-7a | −0.12 | 0.94 | 2005, |
| | | | (serotonin) receptor 4 | | | | 2007, |
| | | | | | | | 2009 |
| IGF1R | NM_000875 | 93 | insulin-like growth | hsa-let-7b | −0.42 | >0.99 | 2007, |
| | | | factor 1 receptor | | | | 2009 |
| OPRM1 | NM_000914 | 94 | opioid receptor, mu 1 | hsa-miR- | −0.2 | 0.92 | 2005, |
| | | | | 4500 | | | 2007, |
| | | | | | | | 2009 |
| PTAFR | NM_000952 | 95 | platelet-activating | hsa-miR- | −0.69 | 0.94 | |
| | | | factor receptor | 4500 | | | |
| NKIRAS2 | NM_001001349 | 96 | NFKB inhibitor | hsa-miR- | −0.09 | 0.88 | 2005, |
| | | | interacting Ras-like 2 | 4458 | | | 2007, |
| | | | | | | | 2009 |
| ATP2B4 | NM_001001396 | 97 | ATPase, Ca++ | hsa-let-7f | −0.05 | 0.93 | 2005, |
| | | | transporting, plasma | | | | 2007, |
| | | | membrane 4 | | | | 2009 |
| RORC | NM_001001523 | 98 | RAR-related orphan | hsa-miR- | −0.12 | 0.93 | 2005, |
| | | | receptor C | 4458 | | | 2007, |
| | | | | | | | 2009 |
| GDF6 | NM_001001557 | 99 | growth differentiation | hsa-miR- | −0.5 | 0.98 | 2005, |
| | | | factor 6 | 4500 | | | 2007, |
| | | | | | | | 2009 |
| MTUS1 | NM_001001924 | 100 | microtubule | hsa-let-7d | −0.14 | 0.71 | 2009 |
| | | | associated tumor | | | | |
| | | | suppressor 1 | | | | |
| PPARA | NM_001001928 | 101 | peroxisome | hsa-miR- | −0.04 | 0.97 | 2007, |
| | | | proliferator-activated | 4458 | | | 2009 |
| | | | receptor alpha | | | | |
| GOLGA7 | NM_001002296 | 102 | golgin A7 | hsa-miR- | −0.15 | 0.7 | 2005, |
| | | | | 4500 | | | 2007, |
| | | | | | | | 2009 |
| WNK3 | NM_001002838 | 103 | WNK lysine deficient | hsa-miR- | −0.09 | 0.91 | |
| | | | protein kinase 3 | 4458 | | | |
| CACNA1I | NM_001003406 | 104 | calcium channel, | hsa-miR- | −0.1 | 0.92 | 2009 |
| | | | voltage-dependent, T | 4458 | | | |
| | | | type, alpha 1I subunit | | | | |
| SMAD2 | NM_001003652 | 105 | SMAD family | hsa-miR- | −0.09 | 0.9 | 2007, |
| | | | member 2 | 4458 | | | 2009 |
| C18orf1 | NM_001003674 | 106 | chromosome 18 open | hsa-miR- | −0.01 | 0.76 | |
| | | | reading frame 1 | 4500 | | | |
| KLHL31 | NM_001003760 | 107 | kelch-like 31 | hsa-let-7d | −0.34 | 0.93 | 2009 |
| | | | (Drosophila) | | | | |
| MGLL | NM_001003794 | 108 | monoglyceride lipase | hsa-miR- | >−0.03 | 0.99 | 2005, |
| | | | | 4458 | | | 2007, |
| | | | | | | | 2009 |
| DLGAP1 | NM_001003809 | 109 | discs, large | hsa-miR- | −0.03 | 0.81 | |
| | | | (Drosophila) | 4500 | | | |
| | | | homolog-associated | | | | |
| | | | protein 1 | | | | |
| CD200 | NM_001004196 | 110 | CD200 molecule | hsa-miR-98 | −0.12 | 0.75 | |
| ZNF740 | NM_001004304 | 111 | zinc finger protein | hsa-let-7d | >−0.02 | 0.94 | 2007, |
| | | | 740 | | | | 2009 |
| LIN28B | NM_001004317 | 112 | lin-28 homolog B (C. elegans) | hsa-let-7d | −0.98 | >0.99 | 2007, |
| | | | | | | | 2009 |
| PLEKHG7 | NM_001004330 | 113 | pleckstrin homology | hsa-miR- | −0.34 | 0.94 | 2009 |
| | | | domain containing, | 4458 | | | |
| | | | family G (with | | | | |
| | | | RhoGef domain) | | | | |
| | | | member 7 | | | | |
| TRIM67 | NM_001004342 | 114 | tripartite motif | hsa-let-7f | −0.08 | >0.99 | 2007, |
| | | | containing 67 | | | | 2009 |
| NRARP | NM_001004354 | 115 | NOTCH-regulated | hsa-miR- | −0.2 | 0.67 | 2005, |
| | | | ankyrin repeat protein | 4458 | | | 2007, |
| | | | | | | | 2009 |
| ITGA11 | NM_001004439 | 116 | integrin, alpha 11 | hsa-miR- | −0.07 | 0.77 | |
| | | | | 4458 | | | |
| YPEL2 | NM_001005404 | 117 | yippee-like 2 | hsa-miR- | −0.15 | 0.96 | 2009 |
| | | | (Drosophila) | 4500 | | | |
| PLCXD3 | NM_001005473 | 118 | phosphatidylinositol- | hsa-miR- | −0.19 | 0.8 | 2005, |
| | | | specific | 4458 | | | 2007 |
| | | | phospholipase C, X | | | | |
| | | | domain containing 3 | | | | |
| CPM | NM_001005502 | 119 | carboxypeptidase M | hsa-miR- | −0.27 | 0.95 | 2005, |
| | | | | 4458 | | | 2007, |
| | | | | | | | 2009 |
| EDA | NM_001005609 | 120 | ectodysplasin A | hsa-miR- | −0.06 | 0.92 | 2005, |
| | | | | 4458 | | | 2007, |
| | | | | | | | 2009 |
| ZNF473 | NM_001006656 | 121 | zinc finger protein | hsa-let-7d | −0.31 | 0.98 | 2009 |
| | | | 473 | | | | |
| NTRK3 | NM_001007156 | 122 | neurotrophic tyrosine | hsa-let-7f | −0.16 | 0.82 | 2009 |
| | | | kinase, receptor, type 3 | | | | |
| IGF2BP2 | NM_001007225 | 123 | insulin-like growth | hsa-let-7b | −0.4 | >0.99 | 2007, |
| | | | factor 2 mRNA | | | | 2009 |
| | | | binding protein 2 | | | | |
| BRWD1 | NM_001007246 | 124 | bromodomain and | hsa-let-7d | −0.5 | 0.73 | |
| | | | WD repeat domain | | | | |
| | | | containing 1 | | | | |
| PRDM2 | NM_001007257 | 125 | PR domain containing | hsa-let-7g | −0.35 | 0.87 | |
| | | | 2, with ZNF domain | | | | |
| GEMIN7 | NM_001007269 | 126 | gem (nuclear | hsa-miR- | −0.37 | <0.1 | 2009 |
| | | | organelle) associated | 4500 | | | |
| | | | protein 7 | | | | |
| IRGQ | NM_001007561 | 127 | immunity-related | hsa-let-7g | −0.11 | 0.85 | |
| | | | GTPase family, Q | | | | |
| BCAP29 | NM_001008405 | 128 | B-cell receptor- | hsa-miR- | −0.16 | 0.94 | 2007, |
| | | | associated protein 29 | 4500 | | | 2009 |
| STEAP3 | NM_001008410 | 129 | STEAP family | hsa-miR- | −0.28 | 0.98 | 2009 |
| | | | member 3 | 4458 | | | |
| KIAA2022 | NM_001008537 | 130 | KIAA2022 | hsa-let-7g | −0.12 | 0.92 | 2009 |
| USP20 | NM_001008563 | 131 | ubiquitin specific | hsa-miR- | −0.06 | 0.84 | |
| | | | peptidase 20 | 4500 | | | |
| FNIP1 | NM_001008738 | 132 | folliculin interacting | hsa-miR-98 | −0.22 | 0.98 | 2007, |
| | | | protein 1 | | | | 2009 |
| ACSL6 | NM_001009185 | 133 | acyl-CoA synthetase | hsa-let-7d | −0.39 | 0.98 | 2005, |
| | | | long-chain family | | | | 2007, |
| | | | member 6 | | | | 2009 |
| MFAP3L | NM_001009554 | 134 | microfibrillar- | hsa-miR- | −0.09 | 0.93 | 2009 |
| | | | associated protein 3- | 4500 | | | |
| | | | like | | | | |
| MEIS3 | NM_001009813 | 135 | Meis homeobox 3 | hsa-miR- | −0.26 | 0.92 | 2005, |
| | | | | 4458 | | | 2007, |
| | | | | | | | 2009 |
| KIAA0930 | NM_001009880 | 136 | KIAA0930 | hsa-let-7d | −0.06 | >0.99 | 2007, |
| | | | | | | | 2009 |
| C20orf194 | NM_001009984 | 137 | chromosome 20 open | hsa-miR- | −0.18 | >0.99 | 2009 |
| | | | reading frame 194 | 4500 | | | |
| ARHGAP28 | NM_001010000 | 138 | Rho GTPase | hsa-let-7a | −0.35 | 0.95 | 2005, |
| | | | activating protein 28 | | | | 2007, |
| | | | | | | | 2009 |
| PM20D2 | NM_001010853 | 139 | peptidase M20 | hsa-let-7a | −0.19 | 0.78 | |
| | | | domain containing 2 | | | | |
| ACER2 | NM_001010887 | 140 | alkaline ceramidase 2 | hsa-miR- | −0.15 | 0.94 | 2007, |
| | | | | 4458 | | | 2009 |
| SLC5A9 | NM_001011547 | 141 | solute carrier family 5 | hsa-miR- | −0.5 | 0.79 | 2009 |
| | | | (sodium/glucose | 4458 | | | |
| | | | cotransporter), | | | | |
| | | | member 9 | | | | |
| NAA30 | NM_001011713 | 142 | N(alpha)- | hsa-miR- | −0.16 | 0.94 | 2007, |
| | | | acetyltransferase 30, | 4500 | | | 2009 |
| | | | NatC catalytic subunit | | | | |
| NHLRC3 | NM_001012754 | 143 | NHL repeat | hsa-let-7a | −0.27 | 0.95 | 2007, |
| | | | containing 3 | | | | 2009 |
| SNX30 | NM_001012994 | 144 | sorting nexin family | hsa-let-7d | −0.15 | 0.95 | 2009 |
| | | | member 30 | | | | |
| FIGNL2 | NM_001013690 | 145 | fidgetin-like 2 | hsa-miR- | −1.07 | >0.99 | 2009 |
| | | | | 4458 | | | |
| C8orf58 | NM_001013842 | 146 | chromosome 8 open | hsa-let-7d | −0.42 | 0.97 | 2009 |
| | | | reading frame 58 | | | | |
| DCUN1D2 | NM_001014283 | 147 | DCN1, defective in | hsa-let-7b | −0.13 | 0.94 | 2007, |
| | | | cullin neddylation 1, | | | | 2009 |
| | | | domain containing 2 | | | | |
| | | | (S. cerevisiae) | | | | |
| KATNAL1 | NM_001014380 | 148 | katanin p60 subunit | hsa-miR- | −0.28 | 0.94 | 2009 |
| | | | A-like 1 | 4458 | | | |
| USP21 | NM_001014443 | 149 | ubiquitin specific | hsa-miR- | −0.12 | 0.92 | 2005, |
| | | | peptidase 21 | 4458 | | | 2007, |
| | | | | | | | 2009 |
| DDX19B | NM_001014449 | 150 | DEAD (Asp-Glu-Ala- | hsa-miR- | −0.47 | 0.97 | 2007, |
| | | | As) box polypeptide | 4500 | | | 2009 |
| | | | 19B | | | | |
| RTKN | NM_001015055 | 151 | rhotekin | hsa-miR-98 | −0.14 | 0.76 | |
| GOPC | NM_001017408 | 152 | golgi-associated PDZ | hsa-miR- | −0.1 | 0.87 | 2009 |
| | | | and coiled-coil motif | 4500 | | | |
| | | | containing | | | | |
| CALN1 | NM_001017440 | 153 | calneuron 1 | hsa-miR- | −0.15 | 0.92 | 2009 |
| | | | | 4458 | | | |
| C14orf28 | NM_001017923 | 154 | chromosome 14 open | hsa-let-7g | −1.25 | >0.99 | 2007, |
| | | | reading frame 28 | | | | 2009 |
| OPA3 | NM_001017989 | 155 | optic atrophy 3 | hsa-miR- | −0.42 | 0.71 | |
| | | | (autosomal recessive, | 4458 | | | |
| | | | with chorea and | | | | |
| | | | spastic paraplegia) | | | | |
| DKK3 | NM_001018057 | 156 | dickkopf homolog 3 | hsa-let-7d | −0.1 | 0.93 | 2007, |
| | | | (Xenopus laevis) | | | | 2009 |
| SERF2 | NM_001018108 | 157 | small EDRK-rich | hsa-let-7d | −0.55 | 0.85 | |
| | | | factor 2 | | | | |
| IQCB1 | NM_001023570 | 158 | IQ motif containing | hsa-miR- | −0.3 | 0.88 | 2009 |
| | | | B1 | 4500 | | | |
| SBK1 | NM_001024401 | 159 | SH3-binding domain | hsa-let-7b | −0.1 | 0.94 | 2007, |
| | | | kinase 1 | | | | 2009 |
| CD276 | NM_001024736 | 160 | CD276 molecule | hsa-miR- | −0.06 | 0.71 | |
| | | | | 4458 | | | |
| BCL7A | NM_001024808 | 161 | B-cell | hsa-miR- | −0.06 | 0.9 | 2005, |
| | | | CLL/lymphoma 7A | 4500 | | | 2007, |
| | | | | | | | 2009 |
| KCTD21 | NM_001029859 | 162 | potassium channel | hsa-miR-98 | −0.54 | 0.98 | 2007, |
| | | | tetramerisation | | | | 2009 |
| | | | domain containing 21 | | | | |
| SLC10A7 | NM_001029998 | 163 | solute carrier family | hsa-miR-98 | −0.25 | 0.94 | |
| | | | 10 (sodium/bile acid | | | | |
| | | | cotransporter family), | | | | |
| | | | member 7 | | | | |
| CTNS | NM_001031681 | 164 | cystinosin, lysosomal | hsa-let-7d | −0.12 | 0.93 | 2005, |
| | | | cystine transporter | | | | 2007, |
| | | | | | | | 2009 |
| RBFOX2 | NM_001031695 | 165 | RNA binding protein, | hsa-miR-98 | −0.19 | 0.94 | 2005, |
| | | | fox-1 homolog (C. elegans) 2 | | | | 2007, |
| | | | | | | | 2009 |
| PLD3 | NM_001031696 | 166 | phospholipase D | hsa-miR- | −0.13 | 0.9 | 2005, |
| | | | family, member 3 | 4458 | | | 2007, |
| | | | | | | | 2009 |
| ERGIC1 | NM_001031711 | 167 | endoplasmic | hsa-let-7d | −0.21 | 0.93 | |
| | | | reticulum-golgi | | | | |
| | | | intermediate | | | | |
| | | | compartment | | | | |
| | | | (ERGIC) 1 | | | | |
| TMPO | NM_001032283 | 168 | thymopoietin | hsa-miR- | −0.1 | 0.83 | |
| | | | | 4500 | | | |
| STK24 | NM_001032296 | 169 | serine/threonine | hsa-miR- | −0.11 | 0.93 | 2009 |
| | | | kinase 24 | 4458 | | | |
| MYCL1 | NM_001033081 | 170 | v-myc | hsa-let-7a | −0.09 | 0.88 | 2007, |
| | | | myelocytomatosis | | | | 2009 |
| | | | viral oncogene | | | | |
| | | | homolog 1, lung | | | | |
| | | | carcinoma derived | | | | |
| | | | (avian) | | | | |
| SRGAP3 | NM_001033117 | 171 | SLIT-ROBO Rho | hsa-miR- | −0.13 | 0.94 | 2005, |
| | | | GTPase activating | 4500 | | | 2007, |
| | | | protein 3 | | | | 2009 |
| WIPI2 | NM_001033518 | 172 | WD repeat domain, | hsa-let-7e | −0.34 | 0.92 | 2009 |
| | | | phosphoinositide | | | | |
| | | | interacting 2 | | | | |
| RRM2 | NM_001034 | 173 | ribonucleotide | hsa-miR- | −0.36 | 0.95 | 2007, |
| | | | reductase M2 | 4500 | | | 2009 |
| ARL5A | NM_001037174 | 174 | ADP-ribosylation | hsa-let-7g | −0.13 | 0.94 | 2007, |
| | | | factor-like 5A | | | | 2009 |
| CDC42SE1 | NM_001038707 | 175 | CDC42 small effector 1 | hsa-miR- | −0.22 | 0.71 | 2009 |
| | | | | 4500 | | | |
| TRIM71 | NM_001039111 | 176 | tripartite motif | hsa-miR- | −0.89 | >0.99 | 2007, |
| | | | containing 71 | 4458 | | | 2009 |
| TRIOBP | NM_001039141 | 177 | TRIO and F-actin | hsa-miR- | −0.12 | 0.86 | 2009 |
| | | | binding protein | 4458 | | | |
| GK5 | NM_001039547 | 178 | glycerol kinase 5 | hsa-let-7d | −0.16 | 0.85 | |
| | | | (putative) | | | | |
| KREMEN1 | NM_001039570 | 179 | kringle containing | hsa-miR- | −0.17 | 0.97 | 2007, |
| | | | transmembrane | 4458 | | | 2009 |
| | | | protein 1 | | | | |
| SEC14L1 | NM_001039573 | 180 | SEC14-like 1 (S. cerevisiae) | hsa-miR- | −0.18 | 0.92 | 2005, |
| | | | | 4500 | | | 2007, |
| | | | | | | | 2009 |
| KCNC4 | NM_001039574 | 181 | potassium voltage- | hsa-miR- | −0.1 | 0.84 | 2009 |
| | | | gated channel, Shaw- | 4500 | | | |
| | | | related subfamily, | | | | |
| | | | member 4 | | | | |
| TMPPE | NM_001039770 | 182 | transmembrane | hsa-miR- | −0.17 | 0.84 | 2009 |
| | | | protein with | 4458 | | | |
| | | | metallophosphoesterase | | | | |
| | | | domain | | | | |
| CHIC1 | NM_001039840 | 183 | cysteine-rich | hsa-miR- | >−0.04 | >0.99 | 2009 |
| | | | hydrophobic domain 1 | 4458 | | | |
| MLLT4 | NM_001040000 | 184 | myeloid/lymphoid or | hsa-miR- | −0.16 | 0.74 | 2007, |
| | | | mixed-lineage | 4458 | | | 2009 |
| | | | leukemia (trithorax | | | | |
| | | | homolog, | | | | |
| | | | Drosophila); | | | | |
| | | | translocated to, 4 | | | | |
| PQLC2 | NM_001040125 | 185 | PQ loop repeat | hsa-miR- | −0.3 | 0.95 | 2009 |
| | | | containing 2 | 4458 | | | |
| PEG10 | NM_001040152 | 186 | paternally expressed | hsa-miR- | −0.02 | 0.71 | 2009 |
| | | | 10 | 4458 | | | |
| MTMR12 | NM_001040446 | 187 | myotubularin related | hsa-miR- | −0.06 | 0.9 | 2009 |
| | | | protein 12 | 4458 | | | |
| PTPRD | NM_001040712 | 188 | protein tyrosine | hsa-miR- | −0.22 | 0.96 | 2007, |
| | | | phosphatase, receptor | 4500 | | | 2009 |
| | | | type, D | | | | |
| KIAA0895L | NM_001040715 | 189 | KIAA0895-like | hsa-let-7i | −0.14 | 0.93 | 2007, |
| | | | | | | | 2009 |
| USP44 | NM_001042403 | 190 | ubiquitin specific | hsa-miR- | −0.14 | 0.93 | 2009 |
| | | | peptidase 44 | 4458 | | | |
| RUFY2 | NM_001042417 | 191 | RUN and FYVE | hsa-miR-98 | −0.27 | 0.82 | |
| | | | domain containing 2 | | | | |
| C6orf204 | NM_001042475 | 192 | chromosome 6 open | hsa-miR- | −0.13 | 0.94 | |
| | | | reading frame 204 | 4458 | | | |
| DLGAP4 | NM_001042486 | 193 | discs, large | hsa-let-7d | −0.31 | 0.97 | 2009 |
| | | | (Drosophila) | | | | |
| | | | homolog-associated | | | | |
| | | | protein 4 | | | | |
| C2orf88 | NM_001042519 | 194 | chromosome 2 open | hsa-miR- | −0.17 | 0.89 | 2009 |
| | | | reading frame 88 | 4500 | | | |
| ATPAF1 | NM_001042546 | 195 | ATP synthase | hsa-let-7d | −0.43 | 0.92 | 2009 |
| | | | mitochondrial F1 | | | | |
| | | | complex assembly | | | | |
| | | | factor 1 | | | | |
| FRS2 | NM_001042555 | 196 | fibroblast growth | hsa-let-7i | −0.04 | 0.86 | 2007, |
| | | | factor receptor | | | | 2009 |
| | | | substrate 2 | | | | |
| EIF4G2 | NM_001042559 | 197 | eukaryotic translation | hsa-let-7d | −0.27 | 0.92 | 2005, |
| | | | initiation factor 4 | | | | 2007, |
| | | | gamma, 2 | | | | 2009 |
| DPH3 | NM_001047434 | 198 | DPH3, KTI11 | hsa-let-7i | −0.4 | 0.98 | |
| | | | homolog (S. cerevisiae) | | | | |
| UHRF1 | NM_001048201 | 199 | ubiquitin-like with | hsa-let-7d | −0.17 | 0.94 | 2009 |
| | | | PHD and ring finger | | | | |
| | | | domains 1 | | | | |
| TNFRSF1B | NM_001066 | 200 | tumor necrosis factor | hsa-miR- | −0.09 | 0.99 | 2005, |
| | | | receptor superfamily, | 4458 | | | 2007, |
| | | | member 1B | | | | 2009 |
| CDC14B | NM_001077181 | 201 | CDC14 cell division | hsa-miR- | −0.08 | 0.88 | 2009 |
| | | | cycle 14 homolog B | 4500 | | | |
| | | | (S. cerevisiae) | | | | |
| ATG9A | NM_001077198 | 202 | ATG9 autophagy | hsa-let-7d | −0.03 | 0.74 | |
| | | | related 9 homolog A | | | | |
| | | | (S. cerevisiae) | | | | |
| SREK1 | NM_001077199 | 203 | splicing regulatory | hsa-miR- | −0.09 | 0.92 | 2005, |
| | | | glutamine/lysine-rich | 4458 | | | 2007, |
| | | | protein 1 | | | | 2009 |
| IKZF2 | NM_001079526 | 204 | IKAROS family zinc | hsa-let-7g | −0.13 | 0.98 | 2007, |
| | | | finger 2 (Helios) | | | | 2009 |
| CPEB1 | NM_001079533 | 205 | cytoplasmic | hsa-miR- | −0.44 | 0.91 | 2007, |
| | | | polyadenylation | 4500 | | | 2009 |
| | | | element binding | | | | |
| | | | protein 1 | | | | |
| FNDC3A | NM_001079673 | 206 | fibronectin type III | hsa-let-7d | −0.39 | 0.97 | 2005, |
| | | | domain containing 3A | | | | 2007, |
| | | | | | | | 2009 |
| GYG2 | NM_001079855 | 207 | glycogenin 2 | hsa-let-7a | −0.22 | 0.88 | 2009 |
| VAV3 | NM_001079874 | 208 | vav 3 guanine | hsa-miR- | −0.11 | 0.92 | 2005, |
| | | | nucleotide exchange | 4500 | | | 2007, |
| | | | factor | | | | 2009 |
| DMP1 | NM_001079911 | 209 | dentin matrix acidic | hsa-miR- | −0.21 | 0.94 | 2005, |
| | | | phosphoprotein 1 | 4500 | | | 2007, |
| | | | | | | | 2009 |
| LDB3 | NM_001080114 | 210 | LIM domain binding 3 | hsa-miR- | −0.09 | 0.84 | 2009 |
| | | | | 4458 | | | |
| GJC1 | NM_001080383 | 211 | gap junction protein, | hsa-miR- | −0.42 | 0.95 | 2009 |
| | | | gamma 1, 45 kDa | 4500 | | | |
| KIAA1147 | NM_001080392 | 212 | KIAA1147 | hsa-miR- | −0.15 | 0.86 | 2007, |
| | | | | 4458 | | | 2009 |
| SLC45A4 | NM_001080431 | 213 | solute carrier family | hsa-let-7d | −0.08 | 0.91 | 2003, |
| | | | 45, member 4 | | | | 2007, |
| | | | | | | | 2009 |
| DNA2 | NM_001080449 | 214 | DNA replication | hsa-miR- | −0.53 | 0.6 | 2009 |
| | | | helicase 2 homolog | 4458 | | | |
| | | | (yeast) | | | | |
| MYO5B | NM_001080467 | 215 | myosin VB | hsa-let-7g | −0.04 | 0.78 | 2009 |
| ZNF697 | NM_001080470 | 216 | zinc finger protein | hsa-miR- | −0.14 | 0.93 | 2007, |
| | | | 697 | 4458 | | | 2009 |
| ZNF275 | NM_001080485 | 217 | zinc finger protein | hsa-miR- | −0.11 | 0.99 | 2007, |
| | | | 275 | 4458 | | | 2009 |
| MGA | NM_001080541 | 218 | MAX gene associated | hsa-miR- | −0.12 | 0.91 | 2007, |
| | | | | 4500 | | | 2009 |
| THOC2 | NM_001081550 | 219 | THO complex 2 | hsa-miR- | −0.17 | 0.85 | 2007, |
| | | | | 4458 | | | 2009 |
| CPSF4 | NM_001081559 | 220 | cleavage and | hsa-miR- | −0.12 | 0.77 | 2005, |
| | | | polyadenylation | 4458 | | | 2007, |
| | | | specific factor 4, | | | | 2009 |
| | | | 30 kDa | | | | |
| C11orf57 | NM_001082969 | 221 | chromosome 11 open | hsa-let-7f | −0.25 | 0.89 | 2007, |
| | | | reading frame 57 | | | | 2009 |
| E2F5 | NM_001083588 | 222 | E2F transcription | hsa-miR- | −0.3 | 0.86 | 2009 |
| | | | factor 5, p130-binding | 4500 | | | |
| ANKRD12 | NM_001083625 | 223 | ankyrin repeat | hsa-miR- | >−0.02 | 0.77 | |
| | | | domain 12 | 4458 | | | |
| FOXN3 | NM_001085471 | 224 | forkhead box N3 | hsa-miR- | >−0.01 | 0.82 | |
| | | | | 4458 | | | |
| MEX3A | NM_001093725 | 225 | mex-3 homolog A (C. elegans) | hsa-miR-98 | −0.15 | 0.92 | 2009 |
| HIC1 | NM_001098202 | 226 | hypermethylated in | hsa-miR- | −0.05 | 0.84 | 2009 |
| | | | cancer 1 | 4458 | | | |
| MGAT3 | NM_001098270 | 227 | mannosyl (beta-1,4-)- | hsa-miR- | >−0.02 | 0.66 | |
| | | | glycoprotein beta-1,4- | 4458 | | | |
| | | | N- | | | | |
| | | | acetylglucosaminyltransferase | | | | |
| SLC4A4 | NM_001098484 | 228 | solute carrier family | hsa-miR- | −0.16 | 0.95 | 2005, |
| | | | 4, sodium bicarbonate | 4458 | | | 2007, |
| | | | cotransporter, | | | | 2009 |
| | | | member 4 | | | | |
| FAM104A | NM_001098832 | 229 | family with sequence | hsa-miR- | −0.21 | 0.92 | 2007, |
| | | | similarity 104, | 4458 | | | 2009 |
| | | | member A | | | | |
| ATXN7L3 | NM_001098833 | 230 | ataxin 7-like 3 | hsa-miR- | −0.06 | 0.74 | |
| | | | | 4500 | | | |
| BTBD9 | NM_001099272 | 231 | BTB (POZ) domain | hsa-let-7a | −0.16 | 0.95 | 2009 |
| | | | containing 9 | | | | |
| NIPAL4 | NM_001099287 | 232 | NIPA-like domain | hsa-miR- | −0.17 | 0.93 | 2009 |
| | | | containing 4 | 4458 | | | |
| SH3RF3 | NM_001099289 | 233 | SH3 domain | hsa-miR- | −0.08 | 0.92 | 2009 |
| | | | containing ring finger 3 | 4458 | | | |
| GXYLT1 | NM_001099650 | 234 | glucoside | hsa-miR- | −0.37 | 0.99 | 2009 |
| | | | xylosyltransferase 1 | 4500 | | | |
| PTAR1 | NM_001099666 | 235 | protein | hsa-miR- | −0.15 | 0.98 | 2009 |
| | | | prenyltransferase | 4500 | | | |
| | | | alpha subunit repeat | | | | |
| | | | containing 1 | | | | |
| FBXL19 | NM_001099784 | 236 | F-box and leucine- | hsa-miR- | −0.1 | 0.7 | 2009 |
| | | | rich repeat protein 19 | 4458 | | | |
| ACTA1 | NM_001100 | 237 | actin, alpha 1, skeletal | hsa-let-7c | −0.21 | 0.72 | 2005, |
| | | | muscle | | | | 2007 |
| PHACTR2 | NM_001100164 | 238 | phosphatase and actin | hsa-miR- | −0.15 | 0.94 | 2009 |
| | | | regulator 2 | 4500 | | | |
| MOBKL3 | NM_001100819 | 239 | MOB1, Mps One | hsa-let-7a | −0.12 | 0.93 | 2005, |
| | | | Binder kinase | | | | 2007, |
| | | | activator-like 3 | | | | 2009 |
| | | | (yeast) | | | | |
| PACS2 | NM_001100913 | 240 | phosphofurin acidic | hsa-miR- | −0.14 | 0.79 | 2009 |
| | | | cluster sorting protein 2 | 4458 | | | |
| IGLON5 | NM_001101372 | 241 | IgLON family | hsa-let-7d | −0.04 | 0.94 | 2009 |
| | | | member 5 | | | | |
| SAMD12 | NM_001101676 | 242 | sterile alpha motif | hsa-miR- | −0.05 | 0.94 | 2009 |
| | | | domain containing 12 | 4500 | | | |
| DTX2 | NM_001102594 | 243 | deltex homolog 2 | hsa-let-7d | −0.46 | >0.99 | 2005, |
| | | | (Drosophila) | | | | 2007, |
| | | | | | | | 2009 |
| FAM118A | NM_001104595 | 244 | family with sequence | hsa-miR- | −0.28 | 0.98 | 2007, |
| | | | similarity 118, | 4500 | | | 2009 |
| | | | member A | | | | |
| FAM123C | NM_001105193 | 245 | family with sequence | hsa-miR- | −0.25 | 0.87 | 2009 |
| | | | similarity 123C | 4500 | | | |
| PCDH19 | NM_001105243 | 246 | protocadherin 19 | hsa-miR- | −0.12 | 0.95 | 2007, |
| | | | | 4500 | | | 2009 |
| ZFYVE16 | NM_001105251 | 247 | zinc finger, FYVE | hsa-miR- | −0.16 | 0.71 | 2009 |
| | | | domain containing 16 | 4500 | | | |
| SWT1 | NM_001105518 | 248 | SWT1 RNA | hsa-let-7b | −0.21 | 0.85 | 2007, |
| | | | endoribonuclease | | | | 2009 |
| | | | homolog (S. cerevisiae) | | | | |
| CAP1 | NM_001105530 | 249 | CAP, adenylate | hsa-miR- | −0.14 | 0.85 | 2005, |
| | | | cyclase-associated | 4500 | | | 2007, |
| | | | protein 1 (yeast) | | | | 2009 |
| FAM135A | NM_001105531 | 250 | family with sequence | hsa-let-7f | −0.19 | 0.85 | 2005, |
| | | | similarity 135, | | | | 2007, |
| | | | member A | | | | 2009 |
| ZBTB10 | NM_001105539 | 251 | zinc finger and BTB | hsa-miR- | −0.06 | 0.72 | 2005, |
| | | | domain containing 10 | 4500 | | | 2007 |
| NEFM | NM_001105541 | 252 | neurofilament, | hsa-let-7f | −0.16 | 0.86 | 2007, |
| | | | medium polypeptide | | | | 2009 |
| FBXO45 | NM_001105573 | 253 | F-box protein 45 | hsa-miR- | −0.06 | 0.89 | 2009 |
| | | | | 4458 | | | |
| ACVR2B | NM_001106 | 254 | activin A receptor, | hsa-miR- | −0.03 | >0.99 | 2007, |
| | | | type IIB | 4500 | | | 2009 |
| C12orf51 | NM_001109662 | 255 | chromosome 12 open | hsa-miR- | −0.09 | 0.92 | 2009 |
| | | | reading frame 51 | 4458 | | | |
| GSG1L | NM_001109763 | 256 | GSG1-like | hsa-miR- | −0.08 | 0.73 | |
| | | | | 4458 | | | |
| ACVR1C | NM_001111031 | 257 | activin A receptor, | hsa-miR- | −0.48 | 0.99 | 2005, |
| | | | type IC | 4458 | | | 2007, |
| | | | | | | | 2009 |
| C3orf63 | NM_001112736 | 258 | chromosome 3 open | hsa-miR- | −0.02 | 0.91 | 2009 |
| | | | reading frame 63 | 4458 | | | |
| HIPK2 | NM_001113239 | 259 | homeodomain | hsa-let-7d | −0.03 | 0.94 | 2009 |
| | | | interacting protein | | | | |
| | | | kinase 2 | | | | |
| AMOT | NM_001113490 | 260 | angiomotin | hsa-miR- | −0.12 | 0.76 | |
| | | | | 4458 | | | |
| ARHGEF7 | NM_001113513 | 261 | Rho guanine | hsa-let-7a | −0.14 | 0.94 | |
| | | | nucleotide exchange | | | | |
| | | | factor (GEF) 7 | | | | |
| CTSC | NM_001114173 | 262 | cathepsin C | hsa-miR- | −0.15 | 0.89 | 2009 |
| | | | | 4458 | | | |
| ADCY9 | NM_001116 | 263 | adenylate cyclase 9 | hsa-miR- | −0.03 | 0.91 | 2005, |
| | | | | 4458 | | | 2007, |
| | | | | | | | 2009 |
| NAPEPLD | NM_001122838 | 264 | N-acyl | hsa-miR- | −0.05 | 0.94 | 2007, |
| | | | phosphatidylethanolamine | 4458 | | | 2009 |
| | | | phospholipase D | | | | |
| CASK | NM_001126054 | 265 | calcium/calmodulin- | hsa-let-7d | −0.04 | 0.91 | |
| | | | dependent serine | | | | |
| | | | protein kinase | | | | |
| | | | (MAGUK family) | | | | |
| ELF4 | NM_001127197 | 266 | E74-like factor 4 (ets | hsa-let-7a | −0.17 | 0.94 | 2007, |
| | | | domain transcription | | | | 2009 |
| | | | factor) | | | | |
| TET2 | NM_001127208 | 267 | tet oncogene family | hsa-miR- | −0.16 | 0.96 | |
| | | | member 2 | 4458 | | | |
| CBX5 | NM_001127321 | 268 | chromobox homolog 5 | hsa-miR- | −0.17 | >0.99 | |
| | | | | 4458 | | | |
| CRY2 | NM_001127457 | 269 | cryptochrome 2 | hsa-miR- | −0.12 | 0.93 | 2005, |
| | | | (photolyase-like) | 4458 | | | 2007, |
| | | | | | | | 2009 |
| STXBP5 | NM_001127715 | 270 | syntaxin binding | hsa-let-7d | −0.15 | 0.8 | 2009 |
| | | | protein 5 (tomosyn) | | | | |
| SULF1 | NM_001128204 | 271 | sulfatase 1 | hsa-miR- | −0.1 | 0.85 | 2009 |
| | | | | 4500 | | | |
| SMARCAD1 | NM_001128429 | 272 | SWI/SNF-related, | hsa-let-7f | −0.57 | 0.95 | 2005, |
| | | | matrix-associated | | | | 2007, |
| | | | actin-dependent | | | | 2009 |
| | | | regulator of | | | | |
| | | | chromatin, subfamily | | | | |
| | | | a, containing | | | | |
| | | | DEAD/H box 1 | | | | |
| RASGRP1 | NM_001128602 | 273 | RAS guanyl releasing | hsa-miR- | −0.34 | 0.97 | 2005, |
| | | | protein 1 (calcium | 4458 | | | 2007, |
| | | | and DAG-regulated) | | | | 2009 |
| PAK1 | NM_001128620 | 274 | p21 protein | hsa-miR- | −0.18 | 0.78 | 2005, |
| | | | (Cdc42/Rac)- | 4500 | | | 2007, |
| | | | activated kinase 1 | | | | 2009 |
| SPIRE1 | NM_001128626 | 275 | spire homolog 1 | hsa-let-7a | −0.04 | 0.92 | 2009 |
| | | | (Drosophila) | | | | |
| CALU | NM_001130674 | 276 | calumenin | hsa-miR- | −0.19 | 0.93 | 2005, |
| | | | | 4458 | | | 2007, |
| | | | | | | | 2009 |
| STYX | NM_001130701 | 277 | serine/threonine/tyrosine | hsa-miR- | −0.09 | 0.93 | |
| | | | interacting protein | 4500 | | | |
| GAS7 | NM_001130831 | 278 | growth arrest-specific 7 | hsa-miR- | −0.28 | 0.98 | 2005, |
| | | | | 4500 | | | 2007, |
| | | | | | | | 2009 |
| RTCD1 | NM_001130841 | 279 | RNA terminal | hsa-miR- | −0.2 | 0.88 | |
| | | | phosphate cyclase | 4458 | | | |
| | | | domain 1 | | | | |
| TGFBR1 | NM_001130916 | 280 | transforming growth | hsa-let-7f | −0.52 | >0.99 | 2005, |
| | | | factor, beta receptor 1 | | | | 2007, |
| | | | | | | | 2009 |
| TTLL6 | NM_001130918 | 281 | tubulin tyrosine | hsa-miR- | −0.26 | 0.76 | |
| | | | ligase-like family, | 4458 | | | |
| | | | member 6 | | | | |
| TMEM194A | NM_001130963 | 282 | transmembrane | hsa-let-7a | −0.07 | 0.94 | 2009 |
| | | | protein 194A | | | | |
| MEF2C | NM_001131005 | 283 | myocyte enhancer | hsa-miR- | −0.24 | 0.87 | |
| | | | factor 2C | 4458 | | | |
| SAP30L | NM_001131062 | 284 | SAP30-like | hsa-miR- | >−0.02 | 0.92 | |
| | | | | 4458 | | | |
| CCNJ | NM_001134375 | 285 | cyclin J | hsa-miR- | −0.44 | 0.94 | 2005, |
| | | | | 4458 | | | 2007, |
| | | | | | | | 2009 |
| CYB561D1 | NM_001134400 | 286 | cytochrome b-561 | hsa-let-7d | −0.33 | 0.91 | |
| | | | domain containing 1 | | | | |
| CDV3 | NM_001134422 | 287 | CDV3 homolog | hsa-miR- | −0.13 | 0.98 | 2007, |
| | | | (mouse) | 4500 | | | 2009 |
| LRRC8B | NM_001134476 | 288 | leucine rich repeat | hsa-miR- | −0.07 | 0.88 | |
| | | | containing 8 family, | 4500 | | | |
| | | | member B | | | | |
| PBX3 | NM_001134778 | 289 | pre-B-cell leukemia | hsa-miR-98 | −0.32 | 0.99 | 2005, |
| | | | homeobox 3 | | | | 2007, |
| | | | | | | | 2009 |
| FNDC3B | NM_001135095 | 290 | fibronectin type III | hsa-miR- | −0.16 | 0.98 | 2005, |
| | | | domain containing 3B | 4500 | | | 2007, |
| | | | | | | | 2009 |
| TMPRSS2 | NM_001135099 | 291 | transmembrane | hsa-let-7b | −0.32 | 0.98 | 2007, |
| | | | protease, serine 2 | | | | 2009 |
| HDHD1 | NM_001135565 | 292 | haloacid | hsa-miR- | −0.28 | 0.62 | 2005, |
| | | | dehalogenase-like | 4500 | | | 2007, |
| | | | hydrolase domain | | | | 2009 |
| | | | containing 1 | | | | |
| LOC221710 | NM_001135575 | 293 | hypothetical protein | hsa-miR- | −0.01 | 0.78 | |
| | | | LOC221710 | 4458 | | | |
| SPATA2 | NM_001135773 | 294 | spermatogenesis | hsa-let-7a | −0.07 | 0.94 | 2005, |
| | | | associated 2 | | | | 2007, |
| | | | | | | | 2009 |
| C9orf7 | NM_001135775 | 295 | chromosome 9 open | hsa-miR- | −0.12 | 0.92 | 2005, |
| | | | reading frame 7 | 4500 | | | 2007, |
| | | | | | | | 2009 |
| SYT1 | NM_001135805 | 296 | synaptotagmin I | hsa-miR- | −0.16 | 0.87 | 2005, |
| | | | | 4458 | | | 2007, |
| | | | | | | | 2009 |
| TMEM2 | NM_001135820 | 297 | transmembrane | hsa-let-7g | −0.41 | 0.98 | 2005, |
| | | | protein 2 | | | | 2007, |
| | | | | | | | 2009 |
| PIK3IP1 | NM_001135911 | 298 | phosphoinositide-3- | hsa-let-7a | −0.19 | 0.85 | 2005, |
| | | | kinase interacting | | | | 2007, |
| | | | protein 1 | | | | 2009 |
| TTC39C | NM_001135993 | 299 | tetratricopeptide | hsa-miR- | −0.06 | 0.86 | |
| | | | repeat domain 39C | 4500 | | | |
| ABL2 | NM_001136000 | 300 | v-abl Abelson murine | hsa-let-7f | −0.23 | >0.99 | 2009 |
| | | | leukemia viral | | | | |
| | | | oncogene homolog 2 | | | | |
| MICAL3 | NM_001136004 | 301 | microtubule | hsa-let-7g | −0.22 | 0.83 | |
| | | | associated | | | | |
| | | | monoxygenase, | | | | |
| | | | calponin and LIM | | | | |
| | | | domain containing 3 | | | | |
| LMLN | NM_001136049 | 302 | leishmanolysin-like | hsa-miR- | −0.13 | 0.9 | |
| | | | (metallopeptidase M8 | 4500 | | | |
| | | | family) | | | | |
| LRIG3 | NM_001136051 | 303 | leucine-rich repeats | hsa-miR- | −0.49 | 0.96 | 2005, |
| | | | and immunoglobulin- | 4458 | | | 2007, |
| | | | like domains 3 | | | | 2009 |
| ZNF879 | NM_001136116 | 304 | zinc finger protein | hsa-miR- | −0.34 | 0.95 | |
| | | | 879 | 4458 | | | |
| ATXN7L3B | NM_001136262 | 305 | ataxin 7-like 3B | hsa-miR- | >−0.01 | 0.91 | |
| | | | | 4458 | | | |
| VASH2 | NM_001136474 | 306 | vasohibin 2 | hsa-let-7d | −0.13 | 0.93 | 2007, |
| | | | | | | | 2009 |
| BTF3L4 | NM_001136497 | 307 | basic transcription | hsa-miR- | −0.12 | 0.9 | 2009 |
| | | | factor 3-like 4 | 4458 | | | |
| SYT2 | NM_001136504 | 308 | synaptotagmin II | hsa-miR- | −0.16 | 0.94 | 2009 |
| | | | | 4500 | | | |
| ATXN1L | NM_001137675 | 309 | ataxin 1-like | hsa-miR- | >−0.02 | 0.93 | |
| | | | | 4458 | | | |
| NIPA1 | NM_001142275 | 310 | non imprinted in | hsa-miR- | −0.2 | 0.99 | 2007, |
| | | | Prader- | 4458 | | | 2009 |
| | | | Willi/Angelman | | | | |
| | | | syndrome 1 | | | | |
| RBFOX1 | NM_001142333 | 311 | RNA binding protein, | hsa-let-7f | −0.18 | 0.86 | 2005, |
| | | | fox-1 homolog (C. elegans) 1 | | | | 2007, |
| | | | | | | | 2009 |
| GNAL | NM_001142339 | 312 | guanine nucleotide | hsa-miR- | −0.13 | 0.95 | 2005, |
| | | | binding protein (G | 4500 | | | 2007, |
| | | | protein), alpha | | | | 2009 |
| | | | activating activity | | | | |
| | | | polypeptide, olfactory | | | | |
| | | | type | | | | |
| SCN4B | NM_001142348 | 313 | sodium channel, | hsa-miR-98 | −0.08 | 0.93 | 2009 |
| | | | voltage-gated, type | | | | |
| | | | IV, beta | | | | |
| CTIF | NM_001142397 | 314 | CBP80/20-dependent | hsa-let-7a | −0.1 | 0.77 | |
| | | | translation initiation | | | | |
| | | | factor | | | | |
| RPUSD3 | NM_001142547 | 315 | RNA pseudouridylate | hsa-miR- | −0.42 | 0.89 | 2007, |
| | | | synthase domain | 4500 | | | 2009 |
| | | | containing 3 | | | | |
| BBX | NM_001142568 | 316 | bobby sox homolog | hsa-let-7d | −0.11 | 0.81 | |
| | | | (Drosophila) | | | | |
| CLP1 | NM_001142597 | 317 | CLP1, cleavage and | hsa-miR- | −0.32 | 0.68 | 2007 |
| | | | polyadenylation | 4458 | | | |
| | | | factor I subunit, | | | | |
| | | | homolog (S. cerevisiae) | | | | |
| TMOD2 | NM_001142885 | 318 | tropomodulin 2 | hsa-miR- | −0.12 | 0.98 | |
| | | | (neuronal) | 4458 | | | |
| PLEKHG6 | NM_001144856 | 319 | pleckstrin homology | hsa-miR- | −0.37 | 0.98 | 2007, |
| | | | domain containing, | 4458 | | | 2009 |
| | | | family G (with | | | | |
| | | | RhoGef domain) | | | | |
| | | | member 6 | | | | |
| LIPT2 | NM_001144869 | 320 | lipoyl(octanoyl) | hsa-miR- | −0.43 | 0.87 | |
| | | | transferase 2 | 4458 | | | |
| | | | (putative) | | | | |
| SLC30A7 | NM_001144884 | 321 | solute carrier family | hsa-let-7d | −0.07 | 0.9 | 2009 |
| | | | 30 (zinc transporter), | | | | |
| | | | member 7 | | | | |
| NEDD4L | NM_001144964 | 322 | neural precursor cell | hsa-miR- | −0.06 | 0.94 | |
| | | | expressed, | 4500 | | | |
| | | | developmentally | | | | |
| | | | down-regulated 4-like | | | | |
| PALM3 | NM_001145028 | 323 | paralemmin 3 | hsa-miR- | −0.12 | 0.91 | |
| | | | | 4458 | | | |
| LRRC10B | NM_001145077 | 324 | leucine rich repeat | hsa-let-7a | −0.07 | 0.62 | |
| | | | containing 10B | | | | |
| GRID2IP | NM_001145118 | 325 | glutamate receptor, | hsa-miR- | −0.26 | 0.94 | |
| | | | ionotropic, delta 2 | 4458 | | | |
| | | | (Grid2) interacting | | | | |
| | | | protein | | | | |
| CDK6 | NM_001145306 | 326 | cyclin-dependent | hsa-miR- | −0.08 | 0.85 | |
| | | | kinase 6 | 4458 | | | |
| ZNF566 | NM_001145343 | 327 | zinc finger protein | hsa-let-7f | −0.25 | 0.93 | 2009 |
| | | | 566 | | | | |
| ZNF652 | NM_001145365 | 328 | zinc finger protein | hsa-miR- | −0.15 | >0.99 | |
| | | | 652 | 4458 | | | |
| POTEM | NM_001145442 | 329 | POTE ankyrin | hsa-miR- | −0.22 | <0.1 | |
| | | | domain family, | 4500 | | | |
| | | | member M | | | | |
| ZNF200 | NM_001145446 | 330 | zinc finger protein | hsa-let-7d | −0.37 | >0.99 | 2009 |
| | | | 200 | | | | |
| SOX6 | NM_001145811 | 331 | SRY (sex determining | hsa-let-7d | −0.16 | 0.72 | |
| | | | region Y)-box 6 | | | | |
| SLCO5A1 | NM_001146008 | 332 | solute carrier organic | hsa-miR- | −0.08 | 0.81 | 2005, |
| | | | anion transporter | 4500 | | | 2007, |
| | | | family, member 5A1 | | | | 2009 |
| NEK3 | NM_001146099 | 333 | NIMA (never in | hsa-miR- | −0.35 | 0.91 | 2009 |
| | | | mitosis gene a)- | 4500 | | | |
| | | | related kinase 3 | | | | |
| SLC6A15 | NM_001146335 | 334 | solute carrier family 6 | hsa-miR- | −0.15 | 0.94 | |
| | | | (neutral amino acid | 4500 | | | |
| | | | transporter), member | | | | |
| | | | 15 | | | | |
| SLC25A4 | NM_001151 | 335 | solute carrier family | hsa-miR- | −0.15 | 0.94 | 2005, |
| | | | 25 (mitochondrial | 4500 | | | 2007 |
| | | | carrier; adenine | | | | |
| | | | nucleotide | | | | |
| | | | translocator), member 4 | | | | |
| KLF8 | NM_001159296 | 336 | Kruppel-like factor 8 | hsa-miR- | −0.11 | 0.81 | |
| | | | | 4458 | | | |
| BEGAIN | NM_001159531 | 337 | brain-enriched | hsa-miR- | −0.36 | 0.99 | 2005, |
| | | | guanylate kinase- | 4458 | | | 2007, |
| | | | associated homolog | | | | 2009 |
| | | | (rat) | | | | |
| BEND4 | NM_001159547 | 338 | BEN domain | hsa-miR-98 | −0.24 | >0.99 | 2009 |
| | | | containing 4 | | | | |
| SYNCRIP | NM_001159673 | 339 | synaptotagmin | hsa-miR- | −0.29 | 0.96 | |
| | | | binding, cytoplasmic | 4458 | | | |
| | | | RNA interacting | | | | |
| | | | protein | | | | |
| BZW2 | NM_001159767 | 340 | basic leucine zipper | hsa-let-7a | −0.24 | 0.81 | 2007, |
| | | | and W2 domains 2 | | | | 2009 |
| CANT1 | NM_001159772 | 341 | calcium activated | hsa-miR- | −0.19 | 0.89 | 2009 |
| | | | nucleotidase 1 | 4458 | | | |
| ZNF583 | NM_001159860 | 342 | zinc finger protein | hsa-let-7f | −0.44 | 0.98 | 2007, |
| | | | 583 | | | | 2009 |
| RNF170 | NM_001160223 | 343 | ring finger protein | hsa-let-7d | −0.41 | 0.98 | |
| | | | 170 | | | | |
| PANX2 | NM_001160300 | 344 | pannexin 2 | hsa-miR- | −0.1 | 0.92 | 2005, |
| | | | | 4458 | | | 2007, |
| | | | | | | | 2009 |
| TMC7 | NM_001160364 | 345 | transmembrane | hsa-let-7d | −0.12 | 0.92 | 2005, |
| | | | channel-like 7 | | | | 2007, |
| | | | | | | | 2009 |
| IGF2BP1 | NM_001160423 | 346 | insulin-like growth | hsa-miR- | −0.4 | >0.99 | 2007, |
| | | | factor 2 mRNA | 4500 | | | 2009 |
| | | | binding protein 1 | | | | |
| SYNC | NM_001161708 | 347 | syncoilin, | hsa-miR- | −0.48 | <0.1 | |
| | | | intermediate filament | 4500 | | | |
| | | | protein | | | | |
| SULF2 | NM_001161841 | 348 | sulfatase 2 | hsa-miR- | −0.12 | 0.91 | |
| | | | | 4458 | | | |
| APBA1 | NM_001163 | 349 | amyloid beta (A4) | hsa-let-7a | −0.11 | 0.94 | |
| | | | precursor protein- | | | | |
| | | | binding, family A, | | | | |
| | | | member 1 | | | | |
| CECR6 | NM_001163079 | 350 | cat eye syndrome | hsa-let-7d | −0.14 | 0.95 | 2005, |
| | | | chromosome region, | | | | 2007, |
| | | | candidate 6 | | | | 2009 |
| PCYT1B | NM_001163264 | 351 | phosphate | hsa-miR- | >−0.02 | 0.91 | 2007, |
| | | | cytidylyltransferase 1, | 4458 | | | 2009 |
| | | | choline, beta | | | | |
| CPA4 | NM_001163446 | 352 | carboxypeptidase A4 | hsa-miR- | −0.37 | 0.93 | 2005, |
| | | | | 4458 | | | 2007, |
| | | | | | | | 2009 |
| GTF2I | NM_001163636 | 353 | general transcription | hsa-miR- | −0.2 | 0.85 | 2007, |
| | | | factor IIi | 4458 | | | 2009 |
| DLC1 | NM_001164271 | 354 | deleted in liver cancer 1 | hsa-miR- | −0.22 | >0.99 | 2005, |
| | | | | 4458 | | | 2007, |
| | | | | | | | 2009 |
| SLC37A4 | NM_001164277 | 355 | solute carrier family | hsa-let-7d | −0.11 | 0.7 | |
| | | | 37 (glucose-6- | | | | |
| | | | phosphate | | | | |
| | | | transporter), member 4 | | | | |
| ANKRD33B | NM_001164440 | 356 | ankyrin repeat | hsa-miR- | >−0.03 | 0.25 | |
| | | | domain 33B | 4458 | | | |
| C16orf52 | NM_001164579 | 357 | chromosome 16 open | hsa-miR- | −0.09 | 0.83 | |
| | | | reading frame 52 | 4458 | | | |
| KIAA1549 | NM_001164665 | 358 | KIAA1549 | hsa-miR- | >−0.02 | 0.94 | 2009 |
| | | | | 4458 | | | |
| PITPNM3 | NM_001165966 | 359 | PITPNM family | hsa-miR- | >−0.02 | 0.94 | |
| | | | member 3 | 4458 | | | |
| EPB41 | NM_001166005 | 360 | erythrocyte | hsa-let-7a | −0.06 | 0.76 | 2009 |
| | | | membrane protein | | | | |
| | | | band 4.1 | | | | |
| | | | (elliptocytosis 1, RH- | | | | |
| | | | linked) | | | | |
| CEP120 | NM_001166226 | 361 | centrosomal protein | hsa-miR- | −0.22 | 0.92 | 2007, |
| | | | 120 kDa | 4458 | | | 2009 |
| GRIK2 | NM_001166247 | 362 | glutamate receptor, | hsa-miR- | −0.12 | 0.86 | 2005, |
| | | | ionotropic, kainate 2 | 4500 | | | 2007, |
| | | | | | | | 2009 |
| SPATA13 | NM_001166271 | 363 | spermatogenesis | hsa-miR- | >−0.02 | 0.64 | |
| | | | associated 13 | 4458 | | | |
| TRAPPC1 | NM_001166621 | 364 | trafficking protein | hsa-miR- | N/A | 0.12 | 2005, |
| | | | particle complex 1 | 4458 | | | 2007, |
| | | | | | | | 2009 |
| TMED5 | NM_001167830 | 365 | transmembrane | hsa-miR- | −0.11 | 0.95 | 2005, |
| | | | emp24 protein | 4500 | | | 2007, |
| | | | transport domain | | | | 2009 |
| | | | containing 5 | | | | |
| SBNO1 | NM_001167856 | 366 | strawberry notch | hsa-miR- | −0.17 | 0.95 | |
| | | | homolog 1 | 4458 | | | |
| | | | (Drosophila) | | | | |
| TIMM17B | NM_001167947 | 367 | translocase of inner | hsa-miR- | −0.16 | 0.93 | 2005, |
| | | | mitochondrial | 4458 | | | 2007, |
| | | | membrane 17 | | | | 2009 |
| | | | homolog B (yeast) | | | | |
| GPR156 | NM_001168271 | 368 | G protein-coupled | hsa-miR- | −0.21 | 0.95 | |
| | | | receptor 156 | 4458 | | | |
| EDN1 | NM_001168319 | 369 | endothelin 1 | hsa-miR- | −0.31 | 0.86 | 2009 |
| | | | | 4500 | | | |
| TXLNG | NM_001168683 | 370 | taxilin gamma | hsa-miR- | −0.32 | 0.95 | |
| | | | | 4500 | | | |
| TMEM135 | NM_001168724 | 371 | transmembrane | hsa-let-7a | −0.11 | 0.93 | |
| | | | protein 135 | | | | |
| AFF2 | NM_001169122 | 372 | AF4/FMR2 family, | hsa-miR- | −0.22 | 0.92 | 2009 |
| | | | member 2 | 4458 | | | |
| GPR137 | NM_001170726 | 373 | G protein-coupled | hsa-let-7b | −0.16 | 0.67 | 2003, |
| | | | receptor 137 | | | | 2007, |
| | | | | | | | 2009 |
| LCOR | NM_001170765 | 374 | ligand dependent | hsa-miR- | −0.14 | 0.96 | 2007, |
| | | | nuclear receptor | 4500 | | | 2009 |
| | | | corepressor | | | | |
| IGSF1 | NM_001170963 | 375 | immunoglobulin | hsa-let-7f | −0.38 | 0.93 | 2009 |
| | | | superfamily, member 1 | | | | |
| STRBP | NM_001171137 | 376 | spermatid perinuclear | hsa-miR- | −0.2 | 0.89 | 2005, |
| | | | RNA binding protein | 4458 | | | 2007, |
| | | | | | | | 2009 |
| C3orf52 | NM_001171747 | 377 | chromosome 3 open | hsa-miR- | −0.23 | 0.85 | 2009 |
| | | | reading frame 52 | 4458 | | | |
| CSRNP3 | NM_001172173 | 378 | cysteine-serine-rich | hsa-let-7c | −0.05 | 0.87 | |
| | | | nuclear protein 3 | | | | |
| OLR1 | NM_001172632 | 379 | oxidized low density | hsa-miR- | −0.12 | 0.88 | 2005, |
| | | | lipoprotein (lectin- | 4458 | | | 2007, |
| | | | like) receptor 1 | | | | 2009 |
| RAB40C | NM_001172663 | 380 | RAB40C, member | hsa-let-7a | −0.1 | 0.91 | 2005, |
| | | | RAS oncogene family | | | | 2007, |
| | | | | | | | 2009 |
| ZNF347 | NM_001172674 | 381 | zinc finger protein | hsa-miR- | −0.41 | <0.1 | |
| | | | 347 | 4458 | | | |
| ZNF641 | NM_001172681 | 382 | zinc finger protein | hsa-miR- | −0.2 | 0.93 | |
| | | | 641 | 4458 | | | |
| PPARGC1B | NM_001172698 | 383 | peroxisome | hsa-miR- | −0.31 | >0.99 | 2005, |
| | | | proliferator-activated | 4500 | | | 2007, |
| | | | receptor gamma, | | | | 2009 |
| | | | coactivator 1 beta | | | | |
| PPP1R16B | NM_001172735 | 384 | protein phosphatase 1, | hsa-miR- | −0.07 | 0.94 | 2005, |
| | | | regulatory (inhibitor) | 4458 | | | 2007, |
| | | | subunit 16B | | | | 2009 |
| FOXP2 | NM_001172766 | 385 | forkhead box P2 | hsa-miR- | −0.33 | >0.99 | |
| | | | | 4500 | | | |
| CRBN | NM_001173482 | 386 | cereblon | hsa-miR- | −0.2 | 0.74 | |
| | | | | 4458 | | | |
| LMX1A | NM_001174069 | 387 | LIM homeobox | hsa-miR-98 | −0.16 | 0.92 | 2007, |
| | | | transcription factor 1, | | | | 2009 |
| | | | alpha | | | | |
| POLL | NM_001174084 | 388 | polymerase (DNA | hsa-miR- | −0.31 | <0.1 | 2009 |
| | | | directed), lambda | 4458 | | | |
| NCOA3 | NM_001174087 | 389 | nuclear receptor | hsa-miR- | −0.1 | 0.84 | 2005, |
| | | | coactivator 3 | 4458 | | | 2007 |
| TRPM6 | NM_001177310 | 390 | transient receptor | hsa-miR- | −0.2 | 0.98 | 2005, |
| | | | potential cation | 4458 | | | 2007, |
| | | | channel, subfamily | | | | 2009 |
| | | | M, member 6 | | | | |
| CPEB2 | NM_001177381 | 391 | cytoplasmic | hsa-let-7b | −0.21 | 0.98 | 2005, |
| | | | polyadenylation | | | | 2007, |
| | | | element binding | | | | 2009 |
| | | | protein 2 | | | | |
| HDX | NM_001177478 | 392 | highly divergent | hsa-let-7g | −0.38 | 0.97 | |
| | | | homeobox | | | | |
| PPP2R2A | NM_001177591 | 393 | protein phosphatase 2, | hsa-miR- | −0.19 | 0.94 | |
| | | | regulatory subunit B, | 4458 | | | |
| | | | alpha | | | | |
| STX3 | NM_001178040 | 394 | syntaxin 3 | hsa-let-7g | −0.41 | 0.98 | 2007, |
| | | | | | | | 2009 |
| PARP8 | NM_001178055 | 395 | poly (ADP-ribose) | hsa-miR- | −0.23 | 0.98 | |
| | | | polymerase family, | 4458 | | | |
| | | | member 8 | | | | |
| BCAT1 | NM_001178091 | 396 | branched chain | hsa-miR- | −0.1 | 0.95 | 2009 |
| | | | amino-acid | 4500 | | | |
| | | | transaminase 1, | | | | |
| | | | cytosolic | | | | |
| CPEB3 | NM_001178137 | 397 | cytoplasmic | hsa-miR- | −0.15 | 0.96 | 2005, |
| | | | polyadenylation | 4458 | | | 2007, |
| | | | element binding | | | | 2009 |
| | | | protein 3 | | | | |
| SLAMF6 | NM_001184714 | 398 | SLAM family | hsa-miR- | −0.22 | 0.88 | 2007, |
| | | | member 6 | 4458 | | | 2009 |
| PEX11B | NM_001184795 | 399 | peroxisomal | hsa-miR- | −0.34 | 0.51 | 2009 |
| | | | biogenesis factor 11 | 4458 | | | |
| | | | beta | | | | |
| PHF8 | NM_001184896 | 400 | PHD finger protein 8 | hsa-miR- | >−0.02 | 0.92 | 2005, |
| | | | | 4458 | | | 2007, |
| | | | | | | | 2009 |
| CLDN12 | NM_001185072 | 401 | claudin 12 | hsa-miR- | −0.34 | 0.98 | 2005, |
| | | | | 4458 | | | 2007, |
| | | | | | | | 2009 |
| BACH1 | NM_001186 | 402 | BTB and CNC | hsa-let-7c | −0.31 | >0.99 | 2005, |
| | | | homology 1, basic | | | | 2007, |
| | | | leucine zipper | | | | 2009 |
| | | | transcription factor 1 | | | | |
| ATG16L1 | NM_001190266 | 403 | ATG16 autophagy | hsa-miR- | −0.09 | 0.92 | 2007, |
| | | | related 16-like 1 (S. cerevisiae) | 4458 | | | 2009 |
| NCOR1 | NM_001190440 | 404 | nuclear receptor | hsa-miR- | −0.05 | 0.92 | |
| | | | corepressor 1 | 4458 | | | |
| COL11A1 | NM_001190709 | 405 | collagen, type XI, | hsa-miR- | −0.1 | 0.77 | |
| | | | alpha 1 | 4458 | | | |
| YAF2 | NM_001190977 | 406 | YY1 associated factor 2 | hsa-let-7a | −0.05 | 0.94 | 2009 |
| BCL2L1 | NM_001191 | 407 | BCL2-like 1 | hsa-miR- | −0.2 | 0.9 | 2005, |
| | | | | 4458 | | | 2007, |
| | | | | | | | 2009 |
| IKBKE | NM_001193321 | 408 | inhibitor of kappa | hsa-let-7b | −0.13 | 0.94 | 2005, |
| | | | light polypeptide gene | | | | 2007, |
| | | | enhancer in B-cells, | | | | 2009 |
| | | | kinase epsilon | | | | |
| SECISBP2L | NM_001193489 | 409 | SECIS binding | hsa-miR- | −0.08 | 0.81 | |
| | | | protein 2-like | 4458 | | | |
| SLC1A4 | NM_001193493 | 410 | solute carrier family 1 | hsa-let-7d | −0.05 | 0.98 | 2009 |
| | | | (glutamate/neutral | | | | |
| | | | amino acid | | | | |
| | | | transporter), member 4 | | | | |
| SLC30A6 | NM_001193513 | 411 | solute carrier family | hsa-miR- | −0.31 | 0.92 | |
| | | | 30 (zinc transporter), | 4458 | | | |
| | | | member 6 | | | | |
| POGZ | NM_001194937 | 412 | pogo transposable | hsa-miR- | −0.16 | 0.88 | 2005, |
| | | | element with ZNF | 4458 | | | 2007, |
| | | | domain | | | | 2009 |
| PTPRU | NM_001195001 | 413 | protein tyrosine | hsa-let-7a | −0.14 | 0.92 | 2009 |
| | | | phosphatase, receptor | | | | |
| | | | type, U | | | | |
| ANKRD28 | NM_001195098 | 414 | ankyrin repeat | hsa-miR- | −0.2 | 0.84 | 2009 |
| | | | domain 28 | 4458 | | | |
| PTP4A2 | NM_001195100 | 415 | protein tyrosine | hsa-let-7b | −0.07 | 0.75 | |
| | | | phosphatase type | | | | |
| | | | IVA, member 2 | | | | |
| LOC100507421 | NM_001195278 | 416 | transmembrane | hsa-miR- | −0.06 | 0.85 | |
| | | | protein 178-like | 4458 | | | |
| DICER1 | NM_001195573 | 417 | dicer 1, ribonuclease | hsa-miR- | −0.05 | >0.99 | 2009 |
| | | | type III | 4458 | | | |
| MLLT10 | NM_001195626 | 418 | myeloid/lymphoid or | hsa-let-7i | −0.15 | 0.86 | 2005, |
| | | | mixed-lineage | | | | 2007, |
| | | | leukemia (trithorax | | | | 2009 |
| | | | homolog, | | | | |
| | | | Drosophila); | | | | |
| | | | translocated to, 10 | | | | |
| TGFBR3 | NM_001195683 | 419 | transforming growth | hsa-let-7g | −0.39 | 0.98 | |
| | | | factor, beta receptor | | | | |
| | | | III | | | | |
| PLD5 | NM_001195811 | 420 | phospholipase D | hsa-miR-98 | −0.18 | 0.86 | |
| | | | family, member 5 | | | | |
| PLEKHA8 | NM_001197026 | 421 | pleckstrin homology | hsa-let-7a | −0.32 | 0.99 | |
| | | | domain containing, | | | | |
| | | | family A | | | | |
| | | | (phosphoinositide | | | | |
| | | | binding specific) | | | | |
| | | | member 8 | | | | |
| DPYSL3 | NM_001197294 | 422 | dihydropyrimidinase- | hsa-miR- | −0.03 | 0.84 | 2009 |
| | | | like 3 | 4500 | | | |
| GABPA | NM_001197297 | 423 | GA binding protein | hsa-miR- | −0.09 | 0.92 | 2007, |
| | | | transcription factor, | 4500 | | | 2009 |
| | | | alpha subunit 60 kDa | | | | |
| PRDM1 | NM_001198 | 424 | PR domain containing | hsa-let-7a | −0.05 | 0.74 | 2005, |
| | | | 1, with ZNF domain | | | | 2007, |
| | | | | | | | 2009 |
| RUNX1T1 | NM_001198625 | 425 | runt-related | hsa-miR- | −0.05 | 0.91 | |
| | | | transcription factor 1; | 4458 | | | |
| | | | translocated to, 1 | | | | |
| | | | (cyclin D-related) | | | | |
| POU2F1 | NM_001198783 | 426 | POU class 2 | hsa-miR- | −0.02 | >0.99 | |
| | | | homeobox 1 | 4458 | | | |
| A1CF | NM_001198818 | 427 | APOBEC1 | hsa-miR- | −0.11 | <0.1 | |
| | | | complementation | 4500 | | | |
| | | | factor | | | | |
| ABCC10 | NM_001198934 | 428 | ATP-binding cassette, | hsa-miR- | −0.16 | 0.82 | 2005, |
| | | | sub-family C | 4458 | | | 2007 |
| | | | (CFTR/MRP), | | | | |
| | | | member 10 | | | | |
| SMAP2 | NM_001198978 | 429 | small ArfGAP2 | hsa-miR- | −0.21 | 0.82 | 2007, |
| | | | | 4458 | | | 2009 |
| AMMECR1L | NM_001199140 | 430 | AMME chromosomal | hsa-let-7d | −0.11 | <0.1 | 2007, |
| | | | region gene 1-like | | | | 2009 |
| TOR1AIP2 | NM_001199260 | 431 | torsin A interacting | hsa-miR- | >−0.03 | 0.98 | |
| | | | protein 2 | 4458 | | | |
| UCHL5 | NM_001199261 | 432 | ubiquitin carboxyl- | hsa-let-7f | −0.04 | <0.1 | |
| | | | terminal hydrolase L5 | | | | |
| PHOSPHO2- | NM_001199290 | 433 | PHOSPHO2- | hsa-let-7f | −0.2 | 0.95 | |
| KLHL23 | | | KLHL23 readthrough | | | | |
| CNOT2 | NM_001199302 | 434 | CCR4-NOT | hsa-let-7d | −0.14 | 0.86 | 2007, |
| | | | transcription | | | | 2009 |
| | | | complex, subunit 2 | | | | |
| MUTED | NM_001199322 | 435 | muted homolog | hsa-let-7c | −0.1 | 0.82 | 2009 |
| | | | (mouse) | | | | |
| CPD | NM_001199775 | 436 | carboxypeptidase D | hsa-let-7d | −0.18 | 0.95 | 2005, |
| | | | | | | | 2007, |
| | | | | | | | 2009 |
| POC1B- | NM_001199781 | 437 | POC1B-GALNT4 | hsa-let-7a | −0.1 | 0.84 | |
| GALNT4 | | | readthrough | | | | |
| EGR3 | NM_001199880 | 438 | early growth response 3 | hsa-miR- | >−0.03 | 0.67 | 2005, |
| | | | | 4458 | | | 2007, |
| | | | | | | | 2009 |
| DNAL1 | NM_001201366 | 439 | dynein, axonemal, | hsa-miR- | −0.03 | 0.94 | 2009 |
| | | | light chain 1 | 4458 | | | |
| RNF7 | NM_001201370 | 440 | ring finger protein 7 | hsa-miR- | −0.18 | 0.94 | 2005, |
| | | | | 4458 | | | 2007, |
| | | | | | | | 2009 |
| TRMT1L | NM_001202423 | 441 | TRM1 tRNA | hsa-miR- | −0.16 | 0.65 | |
| | | | methyltransferase 1- | 4458 | | | |
| | | | like | | | | |
| HSPE1- | NM_001202485 | 442 | HSPE1-MOBKL3 | hsa-let-7a | −0.12 | 0.93 | |
| MOBKL3 | | | readthrough | | | | |
| UBE2G2 | NM_001202489 | 443 | ubiquitin-conjugating | hsa-miR- | −0.14 | 0.94 | 2009 |
| | | | enzyme E2G 2 | 4458 | | | |
| MXD1 | NM_001202513 | 444 | MAX dimerization | hsa-miR- | −0.23 | 0.94 | 2007, |
| | | | protein 1 | 4458 | | | 2009 |
| CUX1 | NM_001202543 | 445 | cut-like homeobox 1 | hsa-miR- | −0.05 | 0.77 | |
| | | | | 4458 | | | |
| SEMA4G | NM_001203244 | 446 | sema domain, | hsa-let-7a | −0.22 | 0.9 | 2005, |
| | | | immunoglobulin | | | | 2007, |
| | | | domain (Ig), | | | | 2009 |
| | | | transmembrane | | | | |
| | | | domain (TM) and | | | | |
| | | | short cytoplasmic | | | | |
| | | | domain, (semaphorin) | | | | |
| | | | 4G | | | | |
| EZH2 | NM_001203247 | 447 | enhancer of zeste | hsa-miR- | N/A | 0.86 | 2005, |
| | | | homolog 2 | 4458 | | | 2007, |
| | | | (Drosophila) | | | | 2009 |
| PPT2 | NM_001204103 | 448 | palmitoyl-protein | hsa-miR- | −0.29 | <0.1 | |
| | | | thioesterase 2 | 4458 | | | |
| MDM4 | NM_001204171 | 449 | Mdm4 p53 binding | hsa-let-7a | −0.27 | >0.99 | |
| | | | protein homolog | | | | |
| | | | (mouse) | | | | |
| RGS6 | NM_001204416 | 450 | regulator of G-protein | hsa-miR- | −0.22 | 0.95 | 2009 |
| | | | signaling 6 | 4458 | | | |
| NPEPL1 | NM_001204872 | 451 | aminopeptidase-like 1 | hsa-let-7f | −0.15 | 0.94 | 2005, |
| | | | | | | | 2007, |
| | | | | | | | 2009 |
| PBX1 | NM_001204961 | 452 | pre-B-cell leukemia | hsa-let-7g | −0.28 | 0.94 | |
| | | | homeobox 1 | | | | |
| KLF9 | NM_001206 | 453 | Kruppel-like factor 9 | hsa-miR- | −0.18 | 0.92 | 2005, |
| | | | | 4500 | | | 2007, |
| | | | | | | | 2009 |
| CD86 | NM_001206924 | 454 | CD86 molecule | hsa-miR- | −0.2 | 0.6 | 2009 |
| | | | | 4500 | | | |
| POU2F2 | NM_001207025 | 455 | POU class 2 | hsa-miR- | −0.14 | 0.89 | 2007, |
| | | | homeobox 2 | 4458 | | | 2009 |
| CLASP2 | NM_001207044 | 456 | cytoplasmic linker | hsa-let-7g | −0.14 | 0.94 | 2005, |
| | | | associated protein 2 | | | | 2007, |
| | | | | | | | 2009 |
| BZW1 | NM_001207067 | 457 | basic leucine zipper | hsa-let-7f | −0.48 | 0.99 | 2005, |
| | | | and W2 domains 1 | | | | 2007, |
| | | | | | | | 2009 |
| MEIS2 | NM_001220482 | 458 | Meis homeobox 2 | hsa-miR- | −0.18 | 0.86 | 2005, |
| | | | | 4458 | | | 2007, |
| | | | | | | | 2009 |
| CCNT2 | NM_001241 | 459 | cyclin T2 | hsa-miR- | −0.1 | 0.76 | |
| | | | | 4458 | | | |
| ATAD2B | NM_001242338 | 460 | ATPase family, AAA | hsa-miR- | >−0.03 | 0.66 | 2009 |
| | | | domain containing 2B | 4458 | | | |
| FAM59A | NM_001242409 | 461 | family with sequence | hsa-let-7f | −0.17 | 0.94 | |
| | | | similarity 59, member A | | | | |
| FBXO32 | NM_001242463 | 462 | F-box protein 32 | hsa-let-7b | −0.26 | 0.95 | |
| MAP4K4 | NM_001242559 | 463 | mitogen-activated | hsa-miR- | −0.2 | 0.99 | 2005, |
| | | | protein kinase kinase | 4458 | | | 2007, |
| | | | kinase kinase 4 | | | | 2009 |
| NXT2 | NM_001242617 | 464 | nuclear transport | hsa-let-7g | −0.21 | 0.86 | 2005, |
| | | | factor 2-like export | | | | 2007, |
| | | | factor 2 | | | | 2009 |
| GFOD1 | NM_001242628 | 465 | glucose-fructose | hsa-miR- | −0.29 | <0.1 | |
| | | | oxidoreductase | 4458 | | | |
| | | | domain containing 1 | | | | |
| ARHGEF38 | NM_001242729 | 466 | Rho guanine | hsa-miR- | −0.53 | 0.94 | |
| | | | nucleotide exchange | 4500 | | | |
| | | | factor (GEF) 38 | | | | |
| ZNF322A | NM_001242797 | 467 | zinc finger protein | hsa-let-7a | −0.47 | 0.96 | 2009 |
| | | | 322A | | | | |
| CHD4 | NM_001273 | 468 | chromodomain | hsa-miR- | −0.17 | 0.83 | 2005, |
| | | | helicase DNA binding | 4500 | | | 2007, |
| | | | protein 4 | | | | 2009 |
| CHUK | NM_001278 | 469 | conserved helix-loop- | hsa-miR- | −0.27 | 0.74 | |
| | | | helix ubiquitous | 4500 | | | |
| | | | kinase | | | | |
| AP1S1 | NM_001283 | 470 | adaptor-related | hsa-miR- | −0.27 | 0.88 | 2005, |
| | | | protein complex 1, | 4458 | | | 2007, |
| | | | sigma 1 subunit | | | | 2009 |
| DUSP4 | NM_001394 | 471 | dual specificity | hsa-miR- | −0.17 | 0.94 | 2007, |
| | | | phosphatase 4 | 4500 | | | 2009 |
| DUSP9 | NM_001395 | 472 | dual specificity | hsa-miR- | −0.07 | 0.93 | 2005, |
| | | | phosphatase 9 | 4500 | | | 2007, |
| | | | | | | | 2009 |
| DYRK1A | NM_001396 | 473 | dual-specificity | hsa-miR- | −0.15 | 0.84 | 2005, |
| | | | tyrosine-(Y)- | 4500 | | | 2007, |
| | | | phosphorylation | | | | 2009 |
| | | | regulated kinase 1A | | | | |
| GATM | NM_001482 | 474 | glycine | hsa-let-7a | −0.44 | 0.96 | 2009 |
| | | | amidinotransferase | | | | |
| | | | (L-arginine:glycine | | | | |
| | | | amidinotransferase) | | | | |
| ACVR2A | NM_001616 | 475 | activin A receptor, | hsa-let-7a | −0.24 | 0.98 | 2007, |
| | | | type IIA | | | | 2009 |
| AKT2 | NM_001626 | 476 | v-akt marine | hsa-let-7i | −0.15 | 0.88 | 2009 |
| | | | thymoma viral | | | | |
| | | | oncogene homolog 2 | | | | |
| ARL4D | NM_001661 | 477 | ADP-ribosylation | hsa-miR- | −0.19 | 0.94 | 2009 |
| | | | factor-like 4D | 4500 | | | |
| POLR3D | NM_001722 | 478 | polymerase (RNA) III | hsa-miR- | −0.28 | 0.91 | 2007, |
| | | | (DNA directed) | 4500 | | | 2009 |
| | | | polypeptide D, 44 kDa | | | | |
| CCND2 | NM_001759 | 479 | cyclin D2 | hsa-miR- | −0.14 | >0.99 | 2005, |
| | | | | 4458 | | | 2007, |
| | | | | | | | 2009 |
| CCNF | NM_001761 | 480 | cyclin F | hsa-let-7d | −0.4 | 0.92 | 2009 |
| CDC25A | NM_001789 | 481 | cell division cycle 25 | hsa-miR- | −0.42 | 0.9 | 2005, |
| | | | homolog A (S. pombe) | 4458 | | | 2007, |
| | | | | | | | 2009 |
| CCR7 | NM_001838 | 482 | chemokine (C-C | hsa-let-7f | −0.36 | 0.96 | 2005, |
| | | | motif) receptor 7 | | | | 2007, |
| | | | | | | | 2009 |
| COL4A1 | NM_001845 | 483 | collagen, type IV, | hsa-miR- | −0.15 | 0.92 | 2005, |
| | | | alpha 1 | 4458 | | | 2007, |
| | | | | | | | 2009 |
| COL4A2 | NM_001846 | 484 | collagen, type IV, | hsa-miR-98 | −0.17 | 0.94 | 2005, |
| | | | alpha 2 | | | | 2007, |
| | | | | | | | 2009 |
| COL4A6 | NM_001847 | 485 | collagen, type IV, | hsa-miR- | −0.34 | <0.1 | 2009 |
| | | | alpha 6 | 4458 | | | |
| COL9A3 | NM_001853 | 486 | collagen, type IX, | hsa-let-7a | −0.11 | 0.86 | 2009 |
| | | | alpha 3 | | | | |
| COL15A1 | NM_001855 | 487 | collagen, type XV, | hsa-miR- | −0.18 | 0.93 | 2005, |
| | | | alpha 1 | 4500 | | | 2007, |
| | | | | | | | 2009 |
| SLC31A1 | NM_001859 | 488 | solute carrier family | hsa-miR- | −0.12 | 0.94 | 2009 |
| | | | 31 (copper | 4458 | | | |
| | | | transporters), member 1 | | | | |
| SLC31A2 | NM_001860 | 489 | solute carrier family | hsa-let-7a | −0.17 | 0.71 | 2005, |
| | | | 31 (copper | | | | 2007 |
| | | | transporters), member 2 | | | | |
| MASP1 | NM_001879 | 490 | mannan-binding | hsa-let-7a | −0.34 | 0.94 | 2007, |
| | | | lectin serine peptidase | | | | 2009 |
| | | | 1 (C4/C2 activating | | | | |
| | | | component of Ra- | | | | |
| | | | reactive factor) | | | | |
| CTPS | NM_001905 | 491 | CTP synthase | hsa-miR- | −0.19 | 0.79 | |
| | | | | 4458 | | | |
| DLST | NM_001933 | 492 | dihydrolipoamide S- | hsa-miR- | −0.17 | 0.95 | 2005, |
| | | | succinyltransferase | 4500 | | | 2007, |
| | | | (E2 component of 2- | | | | 2009 |
| | | | oxo-glutarate | | | | |
| | | | complex) | | | | |
| DSG3 | NM_001944 | 493 | desmoglein 3 | hsa-miR- | −0.16 | <0.1 | |
| | | | | 4500 | | | |
| HBEGF | NM_001945 | 494 | heparin-binding EGF- | hsa-miR- | −0.17 | 0.73 | |
| | | | like growth factor | 4500 | | | |
| DUSP7 | NM_001947 | 495 | dual specificity | hsa-let-7b | −0.07 | 0.94 | |
| | | | phosphatase 7 | | | | |
| ELK4 | NM_001973 | 496 | ELK4, ETS-domain | hsa-miR- | −0.14 | 0.94 | |
| | | | protein (SRF | 4458 | | | |
| | | | accessory protein 1) | | | | |
| EZH1 | NM_001991 | 497 | enhancer of zeste | hsa-let-7a | −0.14 | 0.88 | 2009 |
| | | | homolog 1 | | | | |
| | | | (Drosophila) | | | | |
| GLRX | NM_002064 | 498 | glutaredoxin | hsa-let-7d | −0.23 | 0.78 | 2009 |
| | | | (thioltransferase) | | | | |
| GNS | NM_002076 | 499 | glucosamine (N- | hsa-miR- | >−0.01 | 0.88 | 2005, |
| | | | acetyl)-6-sulfatase | 4458 | | | 2007, |
| | | | | | | | 2009 |
| HLF | NM_002126 | 500 | hepatic leukemia | hsa-miR- | −0.06 | 0.87 | 2007, |
| | | | factor | 4500 | | | 2009 |
| HMGA1 | NM_002131 | 501 | high mobility group | hsa-let-7i | −0.25 | 0.94 | 2005, |
| | | | AT-hook 1 | | | | 2007, |
| | | | | | | | 2009 |
| IDH2 | NM_002168 | 502 | isocitrate | hsa-let-7d | −0.12 | 0.83 | 2005, |
| | | | dehydrogenase 2 | | | | 2007 |
| | | | (NADP+), | | | | |
| | | | mitochondrial | | | | |
| IL13 | NM_002188 | 503 | interleukin 13 | hsa-miR- | −0.32 | 0.98 | 2005, |
| | | | | 4500 | | | 2007, |
| | | | | | | | 2009 |
| ITGB8 | NM_002214 | 504 | integrin, beta 8 | hsa-let-7i | −0.1 | 0.94 | 2007, |
| | | | | | | | 2009 |
| KCNA6 | NM_002235 | 505 | potassium voltage- | hsa-miR- | >−0.03 | 0.44 | 2009 |
| | | | gated channel, shaker- | 4458 | | | |
| | | | related subfamily, | | | | |
| | | | member 6 | | | | |
| KPNA1 | NM_002264 | 506 | karyopherin alpha 1 | hsa-miR- | −0.15 | 0.93 | 2007, |
| | | | (importin alpha 5) | 4458 | | | 2009 |
| KPNA4 | NM_002268 | 507 | karyopherin alpha 4 | hsa-miR- | −0.08 | 0.97 | 2005, |
| | | | (importin alpha 3) | 4458 | | | 2007 |
| LBR | NM_002296 | 508 | lamin B receptor | hsa-miR- | −0.21 | 0.98 | 2009 |
| | | | | 4458 | | | |
| LY75 | NM_002349 | 509 | lymphocyte antigen | hsa-let-7d | −0.17 | 0.8 | 2009 |
| | | | 75 | | | | |
| MAP3K3 | NM_002401 | 510 | mitogen-activated | hsa-miR- | −0.06 | 0.95 | 2005, |
| | | | protein kinase kinase | 4458 | | | 2007, |
| | | | kinase 3 | | | | 2009 |
| MSR1 | NM_002445 | 511 | macrophage | hsa-let-7a | −0.37 | 0.98 | |
| | | | scavenger receptor 1 | | | | |
| NGF | NM_002506 | 512 | nerve growth factor | hsa-miR- | −0.34 | 0.93 | 2009 |
| | | | (beta polypeptide) | 4458 | | | |
| NOVA1 | NM_002515 | 513 | neuro-oncological | hsa-let-7d | −0.11 | 0.92 | 2005, |
| | | | ventral antigen 1 | | | | 2007, |
| | | | | | | | 2009 |
| NRAS | NM_002524 | 514 | neuroblastoma RAS | hsa-miR- | −0.35 | >0.99 | 2005, |
| | | | viral (v-ras) oncogene | 4500 | | | 2007, |
| | | | homolog | | | | 2009 |
| P2RX1 | NM_002558 | 515 | purinergic receptor | hsa-miR- | −0.12 | 0.9 | 2009 |
| | | | P2X, ligand-gated ion | 4458 | | | |
| | | | channel, 1 | | | | |
| PAPPA | NM_002581 | 516 | pregnancy-associated | hsa-miR-98 | −0.2 | >0.99 | 2005, |
| | | | plasma protein A, | | | | 2007, |
| | | | pappalysin 1 | | | | 2009 |
| PBX2 | NM_002586 | 517 | pre-B-cell leukemia | hsa-miR- | −0.22 | >0.99 | 2005, |
| | | | homeobox 2 | 4500 | | | 2007, |
| | | | | | | | 2009 |
| PDGFB | NM_002608 | 518 | platelet-derived | hsa-miR- | −0.11 | 0.88 | 2005, |
| | | | growth factor beta | 4458 | | | 2007, |
| | | | polypeptide | | | | 2009 |
| PIGA | NM_002641 | 519 | phosphatidylinositol | hsa-miR- | −0.29 | 0.94 | 2005, |
| | | | glycan anchor | 4500 | | | 2007, |
| | | | biosynthesis, class A | | | | 2009 |
| PLAGL2 | NM_002657 | 520 | pleiomorphic | hsa-miR- | −0.12 | 0.91 | 2005, |
| | | | adenoma gene-like 2 | 4500 | | | 2007, |
| | | | | | | | 2009 |
| MAPK6 | NM_002748 | 521 | mitogen-activated | hsa-let-7b | −0.38 | 0.94 | 2005, |
| | | | protein kinase 6 | | | | 2007, |
| | | | | | | | 2009 |
| MAPK11 | NM_002751 | 522 | mitogen-activated | hsa-miR- | −0.11 | 0.79 | 2009 |
| | | | protein kinase 11 | 4458 | | | |
| MAPK9 | NM_002752 | 523 | mitogen-activated | hsa-miR- | −0.05 | 0.77 | |
| | | | protein kinase 9 | 4458 | | | |
| PTPRO | NM_002848 | 524 | protein tyrosine | hsa-let-7d | −0.14 | 0.88 | 2009 |
| | | | phosphatase, receptor | | | | |
| | | | type, O | | | | |
| RALB | NM_002881 | 525 | v-ral simian leukemia | hsa-miR- | −0.17 | 0.94 | 2009 |
| | | | viral oncogene | 4458 | | | |
| | | | homolog B (ras | | | | |
| | | | related; GTP binding | | | | |
| | | | protein) | | | | |
| RBMS1 | NM_002897 | 526 | RNA binding motif, | hsa-let-7d | −0.25 | 0.96 | |
| | | | single stranded | | | | |
| | | | interacting protein 1 | | | | |
| RBMS2 | NM_002898 | 527 | RNA binding motif, | hsa-let-7a | −0.1 | 0.98 | |
| | | | single stranded | | | | |
| | | | interacting protein 2 | | | | |
| RCN1 | NM_002901 | 528 | reticulocalbin 1, EF- | hsa-let-7d | −0.17 | 0.85 | 2009 |
| | | | hand calcium binding | | | | |
| | | | domain | | | | |
| RDX | NM_002906 | 529 | radixin | hsa-let-7a | −0.25 | 0.75 | 2005, |
| | | | | | | | 2007, |
| | | | | | | | 2009 |
| RGS16 | NM_002928 | 530 | regulator of G-protein | hsa-miR- | −0.31 | 0.98 | 2005, |
| | | | signaling 16 | 4500 | | | 2007, |
| | | | | | | | 2009 |
| S100A8 | NM_002964 | 531 | S100 calcium binding | hsa-miR- | −0.18 | 0.69 | |
| | | | protein A8 | 4500 | | | |
| CCL3 | NM_002983 | 532 | chemokine (C-C | hsa-miR- | −0.23 | 0.87 | 2009 |
| | | | motif) ligand 3 | 4458 | | | |
| ST3GAL1 | NM_003033 | 533 | ST3 beta-galactoside | hsa-miR- | >−0.01 | 0.89 | |
| | | | alpha-2,3- | 4458 | | | |
| | | | sialyltransferase 1 | | | | |
| ST8SIA1 | NM_003034 | 534 | ST8 alpha-N-acetyl- | hsa-let-7f | −0.29 | 0.94 | 2009 |
| | | | neuraminide alpha- | | | | |
| | | | 2,8-sialyltransferase 1 | | | | |
| SLC6A1 | NM_003042 | 535 | solute carrier family 6 | hsa-miR- | −0.19 | 0.95 | 2005, |
| | | | (neurotransmitter | 4458 | | | 2007, |
| | | | transporter, GABA), | | | | 2009 |
| | | | member 1 | | | | |
| SMARCC1 | NM_003074 | 536 | SWI/SNF related, | hsa-let-7g | −0.13 | 0.91 | 2005, |
| | | | matrix associated, | | | | 2007, |
| | | | actin dependent | | | | 2009 |
| | | | regulator of | | | | |
| | | | chromatin, subfamily | | | | |
| | | | c, member 1 | | | | |
| SNX1 | NM_003099 | 537 | sorting nexin 1 | hsa-miR- | −0.2 | <0.1 | 2009 |
| | | | | 4458 | | | |
| STRN | NM_003162 | 538 | striatin, calmodulin | hsa-miR- | −0.14 | 0.95 | |
| | | | binding protein | 4458 | | | |
| TEAD3 | NM_003214 | 539 | TEA domain family | hsa-miR- | −0.08 | 0.91 | 2007, |
| | | | member 3 | 4458 | | | 2009 |
| THBS1 | NM_003246 | 540 | thrombospondin 1 | hsa-let-7c | −0.16 | 0.86 | 2009 |
| THRSP | NM_003251 | 541 | thyroid hormone | hsa-let-7d | −0.62 | 0.74 | 2009 |
| | | | responsive | | | | |
| VSNL1 | NM_003385 | 542 | visinin-like 1 | hsa-miR- | −0.11 | 0.79 | 2005, |
| | | | | 4458 | | | 2007, |
| | | | | | | | 2009 |
| ZNF202 | NM_003455 | 543 | zinc finger protein | hsa-let-7d | −0.36 | <0.1 | |
| | | | 202 | | | | |
| BSN | NM_003458 | 544 | bassoon (presynaptic | hsa-let-7a | −0.09 | 0.94 | 2009 |
| | | | cytomatrix protein) | | | | |
| MLL2 | NM_003482 | 545 | myeloid/lymphoid or | hsa-miR- | −0.26 | 0.98 | 2007, |
| | | | mixed-lineage | 4458 | | | 2009 |
| | | | leukemia 2 | | | | |
| HMGA2 | NM_003483 | 546 | high mobility group | hsa-miR- | −1.04 | >0.99 | 2005, |
| | | | AT-hook 2 | 4458 | | | 2007, |
| | | | | | | | 2009 |
| SNN | NM_003498 | 547 | stannin | hsa-miR- | −0.15 | 0.87 | 2005, |
| | | | | 4458 | | | 2007, |
| | | | | | | | 2009 |
| EEA1 | NM_003566 | 548 | early endosome | hsa-miR- | −0.21 | 0.94 | 2007, |
| | | | antigen 1 | 4458 | | | 2009 |
| ZNF282 | NM_003575 | 549 | zinc finger protein | hsa-miR- | >−0.02 | 0.94 | 2009 |
| | | | 282 | 4458 | | | |
| DYRK2 | NM_003583 | 550 | dual-specificity | hsa-miR- | −0.12 | 0.87 | 2009 |
| | | | tyrosine-(Y)- | 4500 | | | |
| | | | phosphorylation | | | | |
| | | | regulated kinase 2 | | | | |
| SLC4A7 | NM_003615 | 551 | solute carrier family | hsa-let-7g | −0.02 | 0.81 | 2005, |
| | | | 4, sodium bicarbonate | | | | 2007 |
| | | | cotransporter, | | | | |
| | | | member 7 | | | | |
| MAP4K3 | NM_003618 | 552 | mitogen-activated | hsa-miR-98 | −0.46 | 0.96 | 2005, |
| | | | protein kinase kinase | | | | 2007, |
| | | | kinase kinase 3 | | | | 2009 |
| NDST2 | NM_003635 | 553 | N-deacetylase/N- | hsa-miR- | −0.32 | 0.96 | 2005, |
| | | | sulfotransferase | 4458 | | | 2007, |
| | | | (heparan | | | | 2009 |
| | | | glucosaminyl) 2 | | | | |
| IKBKAP | NM_003640 | 554 | inhibitor of kappa | hsa-miR- | −0.27 | 0.93 | 2005, |
| | | | light polypeptide gene | 4458 | | | 2007, |
| | | | enhancer in B-cells, | | | | 2009 |
| | | | kinase complex- | | | | |
| | | | associated protein | | | | |
| CHRD | NM_003741 | 555 | chordin | hsa-miR- | −0.15 | 0.87 | 2005, |
| | | | | 4458 | | | 2007 |
| NCOA1 | NM_003743 | 556 | nuclear receptor | hsa-let-7d | −0.07 | 0.7 | 2005, |
| | | | coactivator 1 | | | | 2007 |
| IRS2 | NM_003749 | 557 | insulin receptor | hsa-miR- | −0.28 | 0.98 | 2005, |
| | | | substrate 2 | 4458 | | | 2007, |
| | | | | | | | 2009 |
| GALNT4 | NM_003774 | 558 | UDP-N-acetyl-alpha- | hsa-let-7a | −0.1 | 0.84 | 2009 |
| | | | D- | | | | |
| | | | galactosamine:polypeptide | | | | |
| | | | N- | | | | |
| | | | acetylgalactosaminyltransferase 4 | | | | |
| | | | (GalNAc-T4) | | | | |
| RNMT | NM_003799 | 559 | RNA (guanine-7-) | hsa-miR- | −0.31 | <0.1 | |
| | | | methyltransferase | 4458 | | | |
| TNFSF9 | NM_003811 | 560 | tumor necrosis factor | hsa-let-7d | −0.35 | 0.98 | 2009 |
| | | | (ligand) superfamily, | | | | |
| | | | member 9 | | | | |
| SNAP23 | NM_003825 | 561 | synaptosomal- | hsa-miR- | −0.26 | 0.93 | 2005, |
| | | | associated protein, | 4500 | | | 2007, |
| | | | 23 kDa | | | | 2009 |
| RIOK3 | NM_003831 | 562 | RIO kinase 3 (yeast) | hsa-miR- | −0.26 | 0.94 | 2005, |
| | | | | 4500 | | | 2007, |
| | | | | | | | 2009 |
| SUCLG2 | NM_003848 | 563 | succinate-CoA ligase, | hsa-let-7a | −0.14 | 0.89 | 2009 |
| | | | GDP-forming, beta | | | | |
| | | | subunit | | | | |
| EIF2S2 | NM_003908 | 564 | eukaryotic translation | hsa-miR- | −0.22 | 0.92 | 2009 |
| | | | initiation factor 2, | 4458 | | | |
| | | | subunit 2 beta, 38 kDa | | | | |
| MBD2 | NM_003927 | 565 | methyl-CpG binding | hsa-let-7f | −0.29 | >0.99 | |
| | | | domain protein 2 | | | | |
| WASL | NM_003941 | 566 | Wiskott-Aldrich | hsa-let-7d | −0.17 | 0.87 | 2009 |
| | | | syndrome-like | | | | |
| RNF8 | NM_003958 | 567 | ring finger protein 8 | hsa-miR- | −0.1 | 0.68 | |
| | | | | 4500 | | | |
| OSMR | NM_003999 | 568 | oncostatin M receptor | hsa-miR- | −0.27 | 0.94 | 2005, |
| | | | | 4458 | | | 2007, |
| | | | | | | | 2009 |
| E2F2 | NM_004091 | 569 | E2F transcription | hsa-let-7d | −0.28 | 0.94 | 2009 |
| | | | factor 2 | | | | |
| FGF11 | NM_004112 | 570 | fibroblast growth | hsa-miR-98 | −0.26 | 0.93 | 2005, |
| | | | factor 11 | | | | 2007, |
| | | | | | | | 2009 |
| TARBP2 | NM_004178 | 571 | TAR (HIV-1) RNA | hsa-miR- | −0.2 | 0.93 | 2009 |
| | | | binding protein 2 | 4458 | | | |
| SEMA3F | NM_004186 | 572 | sema domain, | hsa-miR- | −0.16 | 0.72 | 2005, |
| | | | immunoglobulin | 4458 | | | 2007 |
| | | | domain (Ig), short | | | | |
| | | | basic domain, | | | | |
| | | | secreted, | | | | |
| | | | (semaphorin) 3F | | | | |
| SYT7 | NM_004200 | 573 | synaptotagmin VII | hsa-miR-98 | −0.25 | 0.98 | 2007, |
| | | | | | | | 2009 |
| AURKB | NM_004217 | 574 | aurora kinase B | hsa-miR- | −0.26 | 0.78 | |
| | | | | 4458 | | | |
| CYTH3 | NM_004227 | 575 | cytohesin 3 | hsa-miR- | −0.02 | 0.9 | 2005, |
| | | | | 4458 | | | 2007, |
| | | | | | | | 2009 |
| SEMA4F | NM_004263 | 576 | sema domain, | hsa-miR- | −0.4 | 0.97 | 2009 |
| | | | immunoglobulin | 4500 | | | |
| | | | domain (Ig), | | | | |
| | | | transmembrane | | | | |
| | | | domain (TM) and | | | | |
| | | | short cytoplasmic | | | | |
| | | | domain, (semaphorin) | | | | |
| | | | 4F | | | | |
| CHST3 | NM_004273 | 577 | carbohydrate | hsa-miR- | −0.11 | 0.99 | 2009 |
| | | | (chondroitin 6) | 4458 | | | |
| | | | sulfotransferase 3 | | | | |
| AKAP6 | NM_004274 | 578 | A kinase (PRKA) | hsa-let-7c | −0.28 | 0.95 | 2005, |
| | | | anchor protein 6 | | | | 2007, |
| | | | | | | | 2009 |
| SLC25A27 | NM_004277 | 579 | solute carrier family | hsa-miR- | −0.29 | 0.95 | 2005, |
| | | | 25, member 27 | 4458 | | | 2007, |
| | | | | | | | 2009 |
| ACVR1B | NM_004302 | 580 | activin A receptor, | hsa-let-7g | −0.12 | 0.95 | 2005, |
| | | | type IB | | | | 2007, |
| | | | | | | | 2009 |
| CASP3 | NM_004346 | 581 | caspase 3, apoptosis- | hsa-let-7b | −0.4 | 0.99 | 2005, |
| | | | related cysteine | | | | 2007, |
| | | | peptidase | | | | 2009 |
| CDC34 | NM_004359 | 582 | cell division cycle 34 | hsa-miR- | −0.47 | >0.99 | 2005, |
| | | | homolog (S. cerevisiae) | 4500 | | | 2007, |
| | | | | | | | 2009 |
| DUSP1 | NM_004417 | 583 | dual specificity | hsa-miR- | −0.18 | 0.87 | 2005, |
| | | | phosphatase 1 | 4500 | | | 2007, |
| | | | | | | | 2009 |
| DVL3 | NM_004423 | 584 | dishevelled, dsh | hsa-let-7f | −0.41 | 0.89 | 2009 |
| | | | homolog 3 | | | | |
| | | | (Drosophila) | | | | |
| EPHA4 | NM_004438 | 585 | EPH receptor A4 | hsa-miR- | −0.18 | 0.87 | 2005, |
| | | | | 4500 | | | 2007, |
| | | | | | | | 2009 |
| FGF5 | NM_004464 | 586 | fibroblast growth | hsa-miR- | −0.11 | 0.93 | 2009 |
| | | | factor 5 | 4458 | | | |
| GALNT2 | NM_004481 | 587 | UDP-N-acetyl-alpha- | hsa-miR- | −0.18 | 0.94 | 2005, |
| | | | D- | 4500 | | | 2007, |
| | | | galactosamine:polypeptide | | | | 2009 |
| | | | N- | | | | |
| | | | acetylgalactosaminyltransferase 2 | | | | |
| | | | (GalNAc-T2) | | | | |
| USP6 | NM_004505 | 588 | ubiquitin specific | hsa-let-7a | −0.18 | 0.92 | 2005, |
| | | | peptidase 6 (Tre-2 | | | | 2007, |
| | | | oncogene) | | | | 2009 |
| NAP1L1 | NM_004537 | 589 | nucleosome assembly | hsa-let-7d | −0.41 | >0.99 | 2005, |
| | | | protein 1-like 1 | | | | 2007, |
| | | | | | | | 2009 |
| NRTN | NM_004558 | 590 | neurturin | hsa-miR- | N/A | 0.85 | 2007, |
| | | | | 4458 | | | 2009 |
| RPS6KA3 | NM_004586 | 591 | ribosomal protein S6 | hsa-miR-98 | −0.1 | 0.94 | 2005, |
| | | | kinase, 90 kDa, | | | | 2007, |
| | | | polypeptide 3 | | | | 2009 |
| COIL | NM_004645 | 592 | coilin | hsa-miR- | −0.5 | 0.96 | 2005, |
| | | | | 4500 | | | 2007, |
| | | | | | | | 2009 |
| KCNQ4 | NM_004700 | 593 | potassium voltage- | hsa-let-7d | −0.18 | 0.94 | |
| | | | gated channel, KQT- | | | | |
| | | | like subfamily, | | | | |
| | | | member 4 | | | | |
| NUMBL | NM_004756 | 594 | numb homolog | hsa-miR- | −0.04 | 0.94 | 2005, |
| | | | (Drosophila)-like | 4500 | | | 2007, |
| | | | | | | | 2009 |
| NDST3 | NM_004784 | 595 | N-deacetylase/N- | hsa-let-7d | −0.18 | 0.83 | |
| | | | sulfotransferase | | | | |
| | | | (heparan | | | | |
| | | | glucosaminyl) 3 | | | | |
| POLR2D | NM_004805 | 596 | polymerase (RNA) II | hsa-let-7b | −0.42 | <0.1 | 2009 |
| | | | (DNA directed) | | | | |
| | | | polypeptide D | | | | |
| HAND1 | NM_004821 | 597 | heart and neural crest | hsa-let-7a | −0.44 | 0.98 | 2005, |
| | | | derivatives expressed 1 | | | | 2007, |
| | | | | | | | 2009 |
| NTN1 | NM_004822 | 598 | netrin 1 | hsa-miR- | −0.26 | 0.84 | 2009 |
| | | | | 4500 | | | |
| ONECUT2 | NM_004852 | 599 | one cut homeobox 2 | hsa-miR- | −0.13 | >0.99 | 2007, |
| | | | | 4500 | | | 2009 |
| AKAP5 | NM_004857 | 600 | A kinase (PRKA) | hsa-miR- | >−0.03 | 0.72 | 2009 |
| | | | anchor protein 5 | 4458 | | | |
| IGDCC3 | NM_004884 | 601 | immunoglobulin | hsa-miR- | −0.72 | >0.99 | 2003, |
| | | | superfamily, DCC | 4500 | | | 2007, |
| | | | subclass, member 3 | | | | 2009 |
| SEC24C | NM_004922 | 602 | SEC24 family, | hsa-miR-98 | −0.1 | 0.82 | 2005, |
| | | | member C (S. cerevisiae) | | | | 2007, |
| | | | | | | | 2009 |
| DAPK1 | NM_004938 | 603 | death-associated | hsa-let-7g | −0.18 | 0.93 | 2009 |
| | | | protein kinase 1 | | | | |
| DOCK3 | NM_004947 | 604 | dedicator of | hsa-miR- | −0.07 | 0.9 | 2005, |
| | | | cytokinesis 3 | 4458 | | | 2007, |
| | | | | | | | 2009 |
| KCNC1 | NM_004976 | 605 | potassium voltage- | hsa-miR- | −0.1 | 0.91 | 2009 |
| | | | gated channel, Shaw- | 4458 | | | |
| | | | related subfamily, | | | | |
| | | | member 1 | | | | |
| NME4 | NM_005009 | 606 | non-metastatic cells 4, | hsa-let-7d | −0.19 | 0.94 | 2003, |
| | | | protein expressed in | | | | 2005, |
| | | | | | | | 2007, |
| | | | | | | | 2009 |
| QARS | NM_005051 | 607 | glutaminyl-tRNA | hsa-let-7i | −0.37 | 0.2 | 2005, |
| | | | synthetase | | | | 2007, |
| | | | | | | | 2009 |
| SCD | NM_005063 | 608 | stearoyl-CoA | hsa-miR-98 | −0.33 | 0.95 | 2007, |
| | | | desaturase (delta-9- | | | | 2009 |
| | | | desaturase) | | | | |
| SIM2 | NM_005069 | 609 | single-minded | hsa-let-7d | −0.08 | 0.9 | 2009 |
| | | | homolog 2 | | | | |
| | | | (Drosophila) | | | | |
| ADRBK2 | NM_005160 | 610 | adrenergic, beta, | hsa-miR-98 | −0.15 | 0.89 | 2009 |
| | | | receptor kinase 2 | | | | |
| CBFA2T3 | NM_005187 | 611 | core-binding factor, | hsa-miR- | −0.06 | 0.94 | 2005, |
| | | | runt domain, alpha | 4458 | | | 2007, |
| | | | subunit 2; | | | | 2009 |
| | | | translocated to, 3 | | | | |
| CBL | NM_005188 | 612 | Cas-Br-M (murine) | hsa-miR- | −0.07 | 0.96 | 2005, |
| | | | ecotropic retroviral | 4500 | | | 2007, |
| | | | transforming | | | | 2009 |
| | | | sequence | | | | |
| CBX2 | NM_005189 | 613 | chromobox homolog 2 | hsa-miR- | −0.15 | 0.94 | 2007, |
| | | | | 4458 | | | 2009 |
| CEBPD | NM_005195 | 614 | CCAAT/enhancer | hsa-let-7d | −0.09 | 0.86 | 2009 |
| | | | binding protein | | | | |
| | | | (C/EBP), delta | | | | |
| ARID3A | NM_005224 | 615 | AT rich interactive | hsa-miR- | −0.11 | 0.9 | 2007, |
| | | | domain 3A | 4458 | | | 2009 |
| | | | (BRIGHT-like) | | | | |
| EPHA3 | NM_005233 | 616 | EPH receptor A3 | hsa-miR- | −0.14 | 0.93 | 2005, |
| | | | | 4500 | | | 2007 |
| ERCC4 | NM_005236 | 617 | excision repair cross- | hsa-miR- | −0.1 | 0.98 | 2009 |
| | | | complementing | 4500 | | | |
| | | | rodent repair | | | | |
| | | | deficiency, | | | | |
| | | | complementation | | | | |
| | | | group 4 | | | | |
| GNG5 | NM_005274 | 618 | guanine nucleotide | hsa-miR- | −0.28 | 0.81 | 2005, |
| | | | binding protein (G | 4458 | | | 2007, |
| | | | protein), gamma 5 | | | | 2009 |
| HAS2 | NM_005328 | 619 | hyaluronan synthase 2 | hsa-let-7d | −0.12 | 0.87 | 2005, |
| | | | | | | | 2007, |
| | | | | | | | 2009 |
| HDLBP | NM_005336 | 620 | high density | hsa-miR- | −0.21 | 0.98 | 2007, |
| | | | lipoprotein binding | 4458 | | | 2009 |
| | | | protein | | | | |
| MYCN | NM_005378 | 621 | v-myc | hsa-let-7i | −0.34 | 0.95 | 2005, |
| | | | myelocytomatosis | | | | 2007, |
| | | | viral related | | | | 2009 |
| | | | oncogene, | | | | |
| | | | neuroblastoma | | | | |
| | | | derived (avian) | | | | |
| NUP98 | NM_005387 | 622 | nucleoporin 98 kDa | hsa-let-7d | −0.23 | 0.85 | |
| PRKAB2 | NM_005399 | 623 | protein kinase, AMP- | hsa-miR- | >−0.02 | 0.89 | 2009 |
| | | | activated, beta 2 non- | 4458 | | | |
| | | | catalytic subunit | | | | |
| SLC20A1 | NM_005415 | 624 | solute carrier family | hsa-miR- | −0.31 | 0.87 | 2005, |
| | | | 20 (phosphate | 4458 | | | 2007 |
| | | | transporter), member 1 | | | | |
| WNT1 | NM_005430 | 625 | wingless-type MMTV | hsa-let-7d | −0.07 | 0.88 | 2005, |
| | | | integration site | | | | 2007, |
| | | | family, member 1 | | | | 2009 |
| GABBR2 | NM_005458 | 626 | gamma-aminobutyric | hsa-miR- | −0.07 | 0.89 | 2009 |
| | | | acid (GABA) B | 4458 | | | |
| | | | receptor, 2 | | | | |
| MED6 | NM_005466 | 627 | mediator complex | hsa-let-7d | −0.14 | 0.86 | 2005, |
| | | | subunit 6 | | | | 2007, |
| | | | | | | | 2009 |
| SH2B3 | NM_005475 | 628 | SH2B adaptor protein 3 | hsa-miR- | −0.13 | 0.94 | 2007, |
| | | | | 4500 | | | 2009 |
| INPP5A | NM_005539 | 629 | inositol | hsa-let-7d | −0.1 | 0.92 | 2005, |
| | | | polyphosphate-5- | | | | 2007, |
| | | | phosphatase, 40 kDa | | | | 2009 |
| ISLR | NM_005545 | 630 | immunoglobulin | hsa-let-7b | −0.23 | 0.86 | |
| | | | superfamily | | | | |
| | | | containing leucine- | | | | |
| | | | rich repeat | | | | |
| LIMK2 | NM_005569 | 631 | LIM domain kinase 2 | hsa-miR-98 | −0.14 | 0.76 | |
| MDFI | NM_005586 | 632 | MyoD family | hsa-miR- | −0.11 | 0.94 | 2007, |
| | | | inhibitor | 4500 | | | 2009 |
| ZNF354A | NM_005649 | 633 | zinc finger protein | hsa-miR- | −0.27 | 0.93 | 2005, |
| | | | 354A | 4500 | | | 2007, |
| | | | | | | | 2009 |
| SOX13 | NM_005686 | 634 | SRY (sex determining | hsa-let-7g | −0.16 | 0.9 | 2005, |
| | | | region Y)-box 13 | | | | 2007, |
| | | | | | | | 2009 |
| ABCC5 | NM_005688 | 635 | ATP-binding cassette, | hsa-miR- | −0.34 | 0.67 | 2005, |
| | | | sub-family C | 4500 | | | 2007, |
| | | | (CFTR/MRP), | | | | 2009 |
| | | | member 5 | | | | |
| DPP3 | NM_005700 | 636 | dipeptidyl-peptidase 3 | hsa-miR- | −0.35 | 0.91 | 2005, |
| | | | | 4458 | | | 2007, |
| | | | | | | | 2009 |
| GIPC1 | NM_005716 | 637 | GIPC PDZ domain | hsa-miR- | −0.26 | 0.9 | 2007, |
| | | | containing family, | 4458 | | | 2009 |
| | | | member 1 | | | | |
| TSPAN2 | NM_005725 | 638 | tetraspanin 2 | hsa-let-7g | −0.09 | 0.94 | 2009 |
| PLXNC1 | NM_005761 | 639 | plexin C1 | hsa-miR- | −0.33 | 0.33 | |
| | | | | 4458 | | | |
| AASS | NM_005763 | 640 | aminoadipate- | hsa-miR- | −0.16 | <0.1 | |
| | | | semialdehyde | 4458 | | | |
| | | | synthase | | | | |
| FARP1 | NM_005766 | 641 | FERM, RhoGEF | hsa-miR- | −0.16 | 0.93 | 2005, |
| | | | (ARHGEF) and | 4500 | | | 2007, |
| | | | pleckstrin domain | | | | 2009 |
| | | | protein 1 | | | | |
| | | | (chondrocyte-derived) | | | | |
| NME6 | NM_005793 | 642 | non-metastatic cells 6, | hsa-miR- | −0.27 | 0.94 | 2005, |
| | | | protein expressed in | 4458 | | | 2007, |
| | | | (nucleoside- | | | | 2009 |
| | | | diphosphate kinase) | | | | |
| SPEG | NM_005876 | 643 | SPEG complex locus | hsa-let-7d | −0.11 | 0.9 | 2009 |
| DNAJA2 | NM_005880 | 644 | DnaJ (Hsp40) | hsa-miR- | −0.28 | 0.79 | |
| | | | homolog, subfamily | 4458 | | | |
| | | | A, member 2 | | | | |
| APC2 | NM_005883 | 645 | adenomatosis | hsa-miR- | −0.11 | 0.83 | 2009 |
| | | | polyposis coli 2 | 4458 | | | |
| MEF2D | NM_005920 | 646 | myocyte enhancer | hsa-miR- | >−0.04 | 0.94 | 2005, |
| | | | factor 2D | 4458 | | | 2007, |
| | | | | | | | 2009 |
| MAP3K1 | NM_005921 | 647 | mitogen-activated | hsa-miR- | −0.39 | 0.86 | 2009 |
| | | | protein kinase kinase | 4458 | | | |
| | | | kinase 1 | | | | |
| MMP11 | NM_005940 | 648 | matrix | hsa-let-7d | −0.12 | 0.92 | 2007, |
| | | | metallopeptidase 11 | | | | 2009 |
| | | | (stromelysin 3) | | | | |
| ALKBH1 | NM_006020 | 649 | alkB, alkylation repair | hsa-miR- | −0.16 | 0.89 | 2009 |
| | | | homolog 1 (E. coli) | 4500 | | | |
| APBB3 | NM_006051 | 650 | amyloid beta (A4) | hsa-let-7a | −0.41 | 0.98 | 2005, |
| | | | precursor protein- | | | | 2007, |
| | | | binding, family B, | | | | 2009 |
| | | | member 3 | | | | |
| DAGLA | NM_006133 | 651 | diacylglycerol lipase, | hsa-miR- | −0.27 | 0.97 | 2007, |
| | | | alpha | 4458 | | | 2009 |
| PRKAA2 | NM_006252 | 652 | protein kinase, AMP- | hsa-let-7f | −0.17 | 0.93 | 2009 |
| | | | activated, alpha 2 | | | | |
| | | | catalytic subunit | | | | |
| RANBP2 | NM_006267 | 653 | RAN binding protein 2 | hsa-miR- | −0.38 | 0.98 | 2005, |
| | | | | 4458 | | | 2007, |
| | | | | | | | 2009 |
| DPF2 | NM_006268 | 654 | D4, zinc and double | hsa-let-7g | −0.21 | 0.94 | 2005, |
| | | | PHD fingers family 2 | | | | 2007, |
| | | | | | | | 2009 |
| CCL7 | NM_006273 | 655 | chemokine (C-C | hsa-miR- | −0.39 | 0.9 | 2009 |
| | | | motif) ligand 7 | 4458 | | | |
| TNFAIP3 | NM_006290 | 656 | tumor necrosis factor, | hsa-miR- | −0.08 | 0.92 | 2009 |
| | | | alpha-induced protein 3 | 4458 | | | |
| SMC1A | NM_006306 | 657 | structural | hsa-let-7a | −0.46 | >0.99 | 2009 |
| | | | maintenance of | | | | |
| | | | chromosomes 1A | | | | |
| PCGF3 | NM_006315 | 658 | polycomb group ring | hsa-let-7a | −0.11 | 0.98 | 2005, |
| | | | finger 3 | | | | 2007, |
| | | | | | | | 2009 |
| CRTAP | NM_006371 | 659 | cartilage associated | hsa-miR- | −0.11 | 0.94 | 2005, |
| | | | protein | 4500 | | | 2007, |
| | | | | | | | 2009 |
| APPBP2 | NM_006380 | 660 | amyloid beta | hsa-miR- | −0.02 | 0.92 | 2005, |
| | | | precursor protein | 4458 | | | 2007 |
| | | | (cytoplasmic tail) | | | | |
| | | | binding protein 2 | | | | |
| OLFM4 | NM_006418 | 661 | olfactomedin 4 | hsa-miR- | −0.37 | <0.1 | |
| | | | | 4500 | | | |
| ARID3B | NM_006465 | 662 | AT rich interactive | hsa-let-7i | −0.72 | >0.99 | 2005, |
| | | | domain 3B | | | | 2007, |
| | | | (BRIGHT-like) | | | | 2009 |
| IGF2BP3 | NM_006547 | 663 | insulin-like growth | hsa-let-7a | −0.33 | 0.96 | 2007, |
| | | | factor 2 mRNA | | | | 2009 |
| | | | binding protein 3 | | | | |
| CLDN16 | NM_006580 | 664 | claudin 16 | hsa-miR-98 | −0.3 | <0.1 | |
| MAP3K2 | NM_006609 | 665 | mitogen-activated | hsa-let-7a | −0.1 | 0.8 | |
| | | | protein kinase kinase | | | | |
| | | | kinase 2 | | | | |
| ARPP19 | NM_006628 | 666 | cAMP-regulated | hsa-miR-98 | −0.09 | 0.98 | 2005, |
| | | | phosphoprotein, | | | | 2007, |
| | | | 19 kDa | | | | 2009 |
| PGRMC1 | NM_006667 | 667 | progesterone receptor | hsa-miR- | −0.46 | 0.98 | 2005, |
| | | | membrane component 1 | 4458 | | | 2007, |
| | | | | | | | 2009 |
| CYP46A1 | NM_006668 | 668 | cytochrome P450, | hsa-let-7a | −0.17 | 0.89 | 2007, |
| | | | family 46, subfamily | | | | 2009 |
| | | | A, polypeptide 1 | | | | |
| SUB1 | NM_006713 | 669 | SUB1 homolog (S. cerevisiae) | hsa-miR- | −0.36 | 0.84 | |
| | | | | 4500 | | | |
| BTG2 | NM_006763 | 670 | BTG family, member 2 | hsa-miR- | −0.12 | 0.89 | 2005, |
| | | | | 4458 | | | 2007, |
| | | | | | | | 2009 |
| PKIA | NM_006823 | 671 | protein kinase | hsa-miR- | −0.18 | 0.94 | |
| | | | (cAMP-dependent, | 4458 | | | |
| | | | catalytic) inhibitor | | | | |
| | | | alpha | | | | |
| B3GNT1 | NM_006876 | 672 | UDP- | hsa-miR- | −0.34 | 0.93 | 2007, |
| | | | GlcNAc:betaGal beta- | 4500 | | | 2009 |
| | | | 1,3-N- | | | | |
| | | | acetylglucosaminyltransferase 1 | | | | |
| CALM1 | NM_006888 | 673 | calmodulin 1 | hsa-miR- | −0.1 | 0.93 | 2005, |
| | | | (phosphorylase | 4500 | | | 2007, |
| | | | kinase, delta) | | | | 2009 |
| PRRX1 | NM_006902 | 674 | paired related | hsa-miR-98 | −0.05 | 0.95 | 2007, |
| | | | homeobox 1 | | | | 2009 |
| RNF5 | NM_006913 | 675 | ring finger protein 5 | hsa-miR- | −0.26 | 0.64 | 2005, |
| | | | | 4458 | | | 2007, |
| | | | | | | | 2009 |
| ZNF24 | NM_006965 | 676 | zinc finger protein 24 | hsa-miR- | −0.12 | 0.94 | |
| | | | | 4500 | | | |
| ADAMTS1 | NM_006988 | 677 | ADAM | hsa-miR-98 | −0.12 | 0.84 | 2009 |
| | | | metallopeptidase with | | | | |
| | | | thrombospondin type | | | | |
| | | | 1 motif, 1 | | | | |
| ZNF197 | NM_006991 | 678 | zinc finger protein | hsa-let-7a | −0.38 | 0.12 | |
| | | | 197 | | | | |
| SLC35D2 | NM_007001 | 679 | solute carrier family | hsa-let-7d | −0.48 | 0.98 | 2005, |
| | | | 35, member D2 | | | | 2007, |
| | | | | | | | 2009 |
| CNTRL | NM_007018 | 680 | centriolin | hsa-miR- | −0.42 | 0.98 | 2009 |
| | | | | 4458 | | | |
| ADAMTS8 | NM_007037 | 681 | ADAM | hsa-miR- | −0.4 | 0.98 | 2007, |
| | | | metallopeptidase with | 4500 | | | 2009 |
| | | | thrombospondin type | | | | |
| | | | 1 motif, 8 | | | | |
| ADAMTS5 | NM_007038 | 682 | ADAM | hsa-miR- | −0.18 | 0.95 | 2005, |
| | | | metallopeptidase with | 4458 | | | 2007, |
| | | | thrombospondin type | | | | 2009 |
| | | | 1 motif, 5 | | | | |
| UTRN | NM_007124 | 683 | utrophin | hsa-miR- | −0.35 | 0.9 | 2007, |
| | | | | 4458 | | | 2009 |
| ZNF81 | NM_007137 | 684 | zinc finger protein 81 | hsa-miR- | −0.07 | 0.81 | |
| | | | | 4500 | | | |
| TUSC2 | NM_007275 | 685 | tumor suppressor | hsa-miR- | −0.12 | 0.93 | 2005, |
| | | | candidate 2 | 4458 | | | 2007, |
| | | | | | | | 2009 |
| AP4E1 | NM_007347 | 686 | adaptor-related | hsa-miR- | >−0.02 | 0.57 | |
| | | | protein complex 4, | 4458 | | | |
| | | | epsilon 1 subunit | | | | |
| NID2 | NM_007361 | 687 | nidogen 2 | hsa-miR- | −0.16 | 0.92 | 2005, |
| | | | (osteonidogen) | 4500 | | | 2007, |
| | | | | | | | 2009 |
| BRD3 | NM_007371 | 688 | bromodomain | hsa-miR- | −0.11 | 0.94 | 2005, |
| | | | containing 3 | 4500 | | | 2007, |
| | | | | | | | 2009 |
| ICOS | NM_012092 | 689 | inducible T-cell co- | hsa-let-7b | −0.24 | 0.92 | 2009 |
| | | | stimulator | | | | |
| ANGPTL2 | NM_012098 | 690 | angiopoietin-like 2 | hsa-miR- | −0.13 | 0.93 | 2005, |
| | | | | 4458 | | | 2007, |
| | | | | | | | 2009 |
| BACE2 | NM_012105 | 691 | beta-site APP- | hsa-miR- | −0.27 | 0.93 | 2009 |
| | | | cleaving enzyme 2 | 4500 | | | |
| FZD4 | NM_012193 | 692 | frizzled family | hsa-miR- | −0.33 | 0.94 | 2007, |
| | | | receptor 4 | 4500 | | | 2009 |
| EIF2C1 | NM_012199 | 693 | eukaryotic translation | hsa-miR- | −0.16 | 0.93 | 2005, |
| | | | initiation factor 2C, 1 | 4500 | | | 2007, |
| | | | | | | | 2009 |
| B3GAT3 | NM_012200 | 694 | beta-1,3- | hsa-miR- | −0.18 | 0.88 | 2009 |
| | | | glucuronyltransferase 3 | 4458 | | | |
| | | | (glucuronosyltransferase | | | | |
| | | | I) | | | | |
| MGAT4A | NM_012214 | 695 | mannosyl (alpha-1,3-)- | hsa-miR- | −0.29 | 0.95 | 2005, |
| | | | glycoprotein beta- | 4500 | | | 2007, |
| | | | 1,4-N- | | | | 2009 |
| | | | acetylgluco saminyltransferase, | | | | |
| | | | isozyme A | | | | |
| HS2ST1 | NM_012262 | 696 | heparan sulfate 2-O- | hsa-miR-98 | −0.06 | 0.89 | 2009 |
| | | | sulfotransferase 1 | | | | |
| ESPL1 | NM_012291 | 697 | extra spindle pole | hsa-miR-98 | −0.28 | 0.57 | |
| | | | bodies homolog 1 (S. cerevisiae) | | | | |
| PXDN | NM_012293 | 698 | peroxidasin homolog | hsa-miR- | −0.12 | >0.99 | 2007, |
| | | | (Drosophila) | 4500 | | | 2009 |
| GAB2 | NM_012296 | 699 | GRB2-associated | hsa-miR- | −0.15 | 0.6 | 2009 |
| | | | binding protein 2 | 4458 | | | |
| PLA2G15 | NM_012320 | 700 | phospholipase A2, | hsa-miR- | −0.09 | 0.92 | 2005, |
| | | | group XV | 4458 | | | 2007, |
| | | | | | | | 2009 |
| DNAJB9 | NM_012328 | 701 | DnaJ (Hsp40) | hsa-miR- | −0.1 | 0.91 | 2005, |
| | | | homolog, subfamily | 4500 | | | 2007, |
| | | | B, member 9 | | | | 2009 |
| MYCBP | NM_012333 | 702 | c-myc binding protein | hsa-miR- | −0.08 | 0.98 | 2009 |
| | | | | 4458 | | | |
| MYO1F | NM_012335 | 703 | myosin IF | hsa-miR- | −0.22 | 0.93 | 2007, |
| | | | | 4500 | | | 2009 |
| NNT | NM_012343 | 704 | nicotinamide | hsa-miR- | −0.26 | 0.87 | 2009 |
| | | | nucleotide | 4458 | | | |
| | | | transhydrogenase | | | | |
| PLDN | NM_012388 | 705 | pallidin homolog | hsa-miR- | −0.07 | 0.94 | 2005, |
| | | | (mouse) | 4500 | | | 2007, |
| | | | | | | | 2009 |
| CDK14 | NM_012395 | 706 | cyclin-dependent | hsa-miR- | −0.16 | 0.67 | |
| | | | kinase 14 | 4500 | | | |
| ICMT | NM_012405 | 707 | isoprenylcysteine | hsa-miR- | >−0.03 | 0.98 | 2009 |
| | | | carboxyl | 4458 | | | |
| | | | methyltransferase | | | | |
| RAB3GAP2 | NM_012414 | 708 | RAB3 GTPase | hsa-let-7d | −0.18 | 0.94 | |
| | | | activating protein | | | | |
| | | | subunit 2 (non- | | | | |
| | | | catalytic) | | | | |
| PPARGC1A | NM_013261 | 709 | peroxisome | hsa-miR- | −0.11 | 0.83 | 2005, |
| | | | proliferator-activated | 4500 | | | 2007, |
| | | | receptor gamma, | | | | 2009 |
| | | | coactivator 1 alpha | | | | |
| EEF2K | NM_013302 | 710 | eukaryotic elongation | hsa-let-7d | −0.17 | 0.95 | 2007, |
| | | | factor-2 kinase | | | | 2009 |
| SLC30A4 | NM_013309 | 711 | solute carrier family | hsa-let-7a | −0.14 | 0.94 | 2005, |
| | | | 30 (zinc transporter), | | | | 2007, |
| | | | member 4 | | | | 2009 |
| HCFC2 | NM_013320 | 712 | host cell factor C2 | hsa-miR- | −0.04 | 0.91 | |
| | | | | 4500 | | | |
| ATG4B | NM_013325 | 713 | ATG4 autophagy | hsa-let-7a | −0.19 | 0.79 | 2009 |
| | | | related 4 homolog B | | | | |
| | | | (S. cerevisiae) | | | | |
| GPR132 | NM_013345 | 714 | G protein-coupled | hsa-let-7f | −0.21 | <0.1 | |
| | | | receptor 132 | | | | |
| TRHDE | NM_013381 | 715 | thyrotropin-releasing | hsa-let-7d | −0.19 | 0.99 | 2005, |
| | | | hormone degrading | | | | 2007, |
| | | | enzyme | | | | 2009 |
| SLC25A24 | NM_013386 | 716 | solute carrier family | hsa-miR- | −0.24 | 0.94 | 2005, |
| | | | 25 (mitochondrial | 4458 | | | 2007, |
| | | | carrier; phosphate | | | | 2009 |
| | | | carrier), member 24 | | | | |
| WDR37 | NM_014023 | 717 | WD repeat domain 37 | hsa-let-7a | −0.21 | 0.99 | 2005, |
| | | | | | | | 2007, |
| | | | | | | | 2009 |
| PSORS1C2 | NM_014069 | 718 | psoriasis | hsa-let-7d | −0.15 | 0.93 | |
| | | | susceptibility 1 | | | | |
| | | | candidate 2 | | | | |
| SCN11A | NM_014139 | 719 | sodium channel, | hsa-miR- | −0.36 | 0.91 | 2007, |
| | | | voltage-gated, type | 4458 | | | 2009 |
| | | | XI, alpha subunit | | | | |
| HOXC11 | NM_014212 | 720 | homeobox C11 | hsa-miR- | −0.08 | 0.94 | 2005, |
| | | | | 4458 | | | 2007, |
| | | | | | | | 2009 |
| LIMD1 | NM_014240 | 721 | LIM domains | hsa-let-7b | −0.05 | 0.92 | 2005, |
| | | | containing 1 | | | | 2007, |
| | | | | | | | 2009 |
| HABP4 | NM_014282 | 722 | hyaluronan binding | hsa-miR- | −0.18 | 0.94 | 2009 |
| | | | protein 4 | 4458 | | | |
| TGDS | NM_014305 | 723 | TDP-glucose 4,6- | hsa-miR- | −0.24 | 0.95 | 2009 |
| | | | dehydratase | 4500 | | | |
| SMUG1 | NM_014311 | 724 | single-strand- | hsa-let-7d | −0.35 | 0.92 | 2009 |
| | | | selective | | | | |
| | | | monofunctional | | | | |
| | | | uracil-DNA | | | | |
| | | | glycosylase 1 | | | | |
| CACNG4 | NM_014405 | 725 | calcium channel, | hsa-miR- | −0.17 | 0.84 | 2005, |
| | | | voltage-dependent, | 4458 | | | 2007, |
| | | | gamma subunit 4 | | | | 2009 |
| KIAA1274 | NM_014431 | 726 | KIAA1274 | hsa-miR-98 | −0.38 | 0.98 | 2009 |
| ZKSCAN5 | NM_014569 | 727 | zinc finger with | hsa-miR- | −0.1 | 0.77 | |
| | | | KRAB and SCAN | 4458 | | | |
| | | | domains 5 | | | | |
| ERO1L | NM_014584 | 728 | ERO1-like (S. cerevisiae) | hsa-miR- | −0.18 | 0.88 | 2009 |
| | | | | 4500 | | | |
| SOCS7 | NM_014598 | 729 | suppressor of | hsa-miR- | >−0.02 | 0.92 | |
| | | | cytokine signaling 7 | 4458 | | | |
| UBXN4 | NM_014607 | 730 | UBX domain protein 4 | hsa-let-7a | −0.15 | 0.89 | 2005, |
| | | | | | | | 2007, |
| | | | | | | | 2009 |
| RALGPS1 | NM_014636 | 731 | Ral GEF with PH | hsa-miR- | −0.15 | 0.94 | 2005, |
| | | | domain and SH3 | 4500 | | | 2007, |
| | | | binding motif 1 | | | | 2009 |
| TTLL4 | NM_014640 | 732 | tubulin tyrosine | hsa-let-7d | −0.56 | >0.99 | 2003, |
| | | | ligase-like family, | | | | 2005, |
| | | | member 4 | | | | 2007, |
| | | | | | | | 2009 |
| ZNF516 | NM_014643 | 733 | zinc finger protein | hsa-miR- | −0.04 | 0.95 | 2009 |
| | | | 516 | 4500 | | | |
| GREB1 | NM_014668 | 734 | growth regulation by | hsa-miR- | −0.17 | 0.88 | 2009 |
| | | | estrogen in breast | 4500 | | | |
| | | | cancer 1 | | | | |
| ULK2 | NM_014683 | 735 | unc-51-like kinase 2 | hsa-miR-98 | −0.14 | 0.95 | 2005, |
| | | | (C. elegans) | | | | 2007, |
| | | | | | | | 2009 |
| SEC14L5 | NM_014692 | 736 | SEC14-like 5 (S. cerevisiae) | hsa-let-7d | −0.14 | 0.98 | 2009 |
| TBKBP1 | NM_014726 | 737 | TBK1 binding protein 1 | hsa-miR- | −0.36 | 0.97 | 2007, |
| | | | | 4500 | | | 2009 |
| RIMS3 | NM_014747 | 738 | regulating synaptic | hsa-miR- | >−0.01 | 0.92 | 2009 |
| | | | membrane exocytosis 3 | 4458 | | | |
| TSC22D2 | NM_014779 | 739 | TSC22 domain | hsa-miR- | −0.16 | 0.87 | 2005, |
| | | | family, member 2 | 4458 | | | 2007, |
| | | | | | | | 2009 |
| LRIG2 | NM_014813 | 740 | leucine-rich repeats | hsa-let-7d | −0.48 | 0.95 | 2005, |
| | | | and immunoglobulin- | | | | 2007, |
| | | | like domains 2 | | | | 2009 |
| ZBTB39 | NM_014830 | 741 | zinc finger and BTB | hsa-miR- | −0.04 | 0.98 | 2007, |
| | | | domain containing 39 | 4458 | | | 2009 |
| TRANK1 | NM_014831 | 742 | tetratricopeptide | hsa-let-7b | −0.3 | 0.85 | 2009 |
| | | | repeat and ankyrin | | | | |
| | | | repeat containing 1 | | | | |
| TECPR2 | NM_014844 | 743 | tectonin beta- | hsa-let-7d | −0.13 | 0.94 | 2005, |
| | | | propeller repeat | | | | 2007, |
| | | | containing 2 | | | | 2009 |
| ZBTB5 | NM_014872 | 744 | zinc finger and BTB | hsa-let-7f | −0.23 | 0.92 | 2005, |
| | | | domain containing 5 | | | | 2007, |
| | | | | | | | 2009 |
| LPGAT1 | NM_014873 | 745 | lysophosphatidylglycerol | hsa-let-7g | −0.34 | >0.99 | 2005, |
| | | | acyltransferase 1 | | | | 2007, |
| | | | | | | | 2009 |
| HELZ | NM_014877 | 746 | helicase with zinc | hsa-let-7d | −0.28 | 0.9 | |
| | | | finger | | | | |
| RNF44 | NM_014901 | 747 | ring finger protein 44 | hsa-let-7i | −0.14 | 0.94 | 2005, |
| | | | | | | | 2007, |
| | | | | | | | 2009 |
| AAK1 | NM_014911 | 748 | AP2 associated kinase 1 | hsa-miR- | >−0.03 | 0.92 | 2007, |
| | | | | 4458 | | | 2009 |
| DZIP1 | NM_014934 | 749 | DAZ interacting | hsa-miR- | −0.11 | 0.94 | 2005, |
| | | | protein 1 | 4500 | | | 2007, |
| | | | | | | | 2009 |
| MLXIP | NM_014938 | 750 | MLX interacting | hsa-miR- | −0.11 | 0.8 | |
| | | | protein | 4458 | | | |
| BAHD1 | NM_014952 | 751 | bromo adjacent | hsa-miR- | −0.05 | 0.89 | 2005, |
| | | | homology domain | 4458 | | | 2007, |
| | | | containing 1 | | | | 2009 |
| CEP164 | NM_014956 | 752 | centrosomal protein | hsa-miR- | −0.08 | 0.93 | 2005, |
| | | | 164 kDa | 4458 | | | 2007, |
| | | | | | | | 2009 |
| RUFY3 | NM_014961 | 753 | RUN and FYVE | hsa-let-7f | −0.13 | 0.93 | 2007, |
| | | | domain containing 3 | | | | 2009 |
| BTBD3 | NM_014962 | 754 | BTB (POZ) domain | hsa-let-7c | −0.19 | 0.92 | 2005, |
| | | | containing 3 | | | | 2007, |
| | | | | | | | 2009 |
| MON2 | NM_015026 | 755 | MON2 homolog (S. cerevisiae) | hsa-miR- | −0.09 | 0.94 | 2007, |
| | | | | 4458 | | | 2009 |
| NMNAT2 | NM_015039 | 756 | nicotinamide | hsa-miR- | >−0.01 | 0.72 | |
| | | | nucleotide | 4458 | | | |
| | | | adenylyltransferase 2 | | | | |
| RRP1B | NM_015056 | 757 | ribosomal RNA | hsa-miR- | −0.09 | 0.93 | 2007, |
| | | | processing 1 homolog | 4458 | | | 2009 |
| | | | B (S. cerevisiae) | | | | |
| SLC8A2 | NM_015063 | 758 | solute carrier family 8 | hsa-miR- | −0.07 | 0.91 | 2005, |
| | | | (sodium/calcium | 4458 | | | 2007, |
| | | | exchanger), member 2 | | | | 2009 |
| DDN | NM_015086 | 759 | dendrin | hsa-miR- | −0.18 | 0.92 | 2009 |
| | | | | 4500 | | | |
| TAB2 | NM_015093 | 760 | TGF-beta activated | hsa-miR- | −0.16 | 0.83 | 2005, |
| | | | kinase 1/MAP3K7 | 4500 | | | 2007, |
| | | | binding protein 2 | | | | 2009 |
| HIC2 | NM_015094 | 761 | hypermethylated in | hsa-miR- | −0.45 | >0.99 | 2003, |
| | | | cancer 2 | 4458 | | | 2005, |
| | | | | | | | 2007, |
| | | | | | | | 2009 |
| PLXND1 | NM_015103 | 762 | plexin D1 | hsa-miR- | −0.35 | 0.98 | 2007, |
| | | | | 4500 | | | 2009 |
| ZC3H3 | NM_015117 | 763 | zinc finger CCCH- | hsa-let-7d | −0.3 | 0.98 | 2007, |
| | | | type containing 3 | | | | 2009 |
| FRMD4B | NM_015123 | 764 | FERM domain | hsa-miR- | −0.31 | 0.86 | 2009 |
| | | | containing 4B | 4500 | | | |
| DTX4 | NM_015177 | 765 | deltex homolog 4 | hsa-miR- | −0.06 | 0.98 | 2009 |
| | | | (Drosophila) | 4500 | | | |
| OTUD3 | NM_015207 | 766 | OTU domain | hsa-miR- | >−0.01 | 0.82 | 2009 |
| | | | containing 3 | 4458 | | | |
| KHNYN | NM_015299 | 767 | KH and NYN domain | hsa-let-7f | −0.44 | 0.93 | |
| | | | containing | | | | |
| USP24 | NM_015306 | 768 | ubiquitin specific | hsa-miR- | −0.26 | 0.93 | 2009 |
| | | | peptidase 24 | 4458 | | | |
| FAM189A1 | NM_015307 | 769 | family with sequence | hsa-miR- | −0.19 | 0.94 | 2009 |
| | | | similarity 189, | 4458 | | | |
| | | | member A1 | | | | |
| LEPROTL1 | NM_015344 | 770 | leptin receptor | hsa-let-7d | −0.09 | 0.82 | 2005, |
| | | | overlapping | | | | 2007 |
| | | | transcript-like 1 | | | | |
| ZFYVE26 | NM_015346 | 771 | zinc finger, FYVE | hsa-miR- | −0.38 | 0.98 | 2005, |
| | | | domain containing 26 | 4458 | | | 2007, |
| | | | | | | | 2009 |
| PARM1 | NM_015393 | 772 | prostate androgen- | hsa-miR- | −0.24 | 0.97 | 2009 |
| | | | regulated mucin-like | 4458 | | | |
| | | | protein 1 | | | | |
| ARMC8 | NM_015396 | 773 | armadillo repeat | hsa-miR- | −0.1 | 0.87 | |
| | | | containing 8 | 4500 | | | |
| AHCTF1 | NM_015446 | 774 | AT hook containing | hsa-miR- | −0.38 | 0.4 | 2007, |
| | | | transcription factor 1 | 4458 | | | 2009 |
| MYRIP | NM_015460 | 775 | myosin VIIA and Rab | hsa-miR- | −0.11 | 0.85 | 2005, |
| | | | interacting protein | 4458 | | | 2007, |
| | | | | | | | 2009 |
| SLC22A23 | NM_015482 | 776 | solute carrier family | hsa-miR- | −0.27 | 0.98 | |
| | | | 22, member 23 | 4458 | | | |
| PNKD | NM_015488 | 777 | paroxysmal | hsa-miR- | −0.14 | 0.76 | 2007, |
| | | | nonkinesigenic | 4458 | | | 2009 |
| | | | dyskinesia | | | | |
| SEC31B | NM_015490 | 778 | SEC31 homolog B (S. cerevisiae) | hsa-miR- | −0.15 | 0.82 | 2009 |
| | | | | 4458 | | | |
| C15orf39 | NM_015492 | 779 | chromosome 15 open | hsa-let-7a | −0.31 | 0.93 | 2009 |
| | | | reading frame 39 | | | | |
| LRIG1 | NM_015541 | 780 | leucine-rich repeats | hsa-miR- | N/A | 0.95 | 2005, |
| | | | and immunoglobulin- | 4458 | | | 2007, |
| | | | like domains 1 | | | | 2009 |
| OSBPL3 | NM_015550 | 781 | oxysterol binding | hsa-miR- | −0.2 | 0.95 | 2005, |
| | | | protein-like 3 | 4458 | | | 2007, |
| | | | | | | | 2009 |
| LTN1 | NM_015565 | 782 | listerin E3 ubiquitin | hsa-let-7d | −0.22 | 0.93 | 2005, |
| | | | protein ligase 1 | | | | 2007, |
| | | | | | | | 2009 |
| PLA2G3 | NM_015715 | 783 | phospholipase A2, | hsa-let-7a | −0.35 | 0.91 | 2009 |
| | | | group III | | | | |
| DCAF8 | NM_015726 | 784 | DDB1 and CUL4 | hsa-miR- | −0.1 | 0.66 | |
| | | | associated factor 8 | 4500 | | | |
| WARS2 | NM_015836 | 785 | tryptophanyl tRNA | hsa-miR- | −0.3 | <0.1 | 2009 |
| | | | synthetase 2, | 4458 | | | |
| | | | mitochondrial | | | | |
| MBTPS2 | NM_015884 | 786 | membrane-bound | hsa-miR- | −0.06 | 0.86 | |
| | | | transcription factor | 4458 | | | |
| | | | peptidase, site 2 | | | | |
| HOOK1 | NM_015888 | 787 | hook homolog 1 | hsa-miR- | −0.12 | 0.94 | 2007, |
| | | | (Drosophila) | 4458 | | | 2009 |
| TAF9B | NM_015975 | 788 | TAF9B RNA | hsa-let-7a | −0.3 | 0.98 | 2009 |
| | | | polymerase II, TATA | | | | |
| | | | box binding protein | | | | |
| | | | (TBP)-associated | | | | |
| | | | factor, 31 kDa | | | | |
| GOLT1B | NM_016072 | 789 | golgi transport 1B | hsa-miR- | −0.18 | 0.98 | 2005, |
| | | | | 4500 | | | 2007, |
| | | | | | | | 2009 |
| CERCAM | NM_016174 | 790 | cerebral endothelial | hsa-let-7d | −0.15 | 0.93 | 2007, |
| | | | cell adhesion | | | | 2009 |
| | | | molecule | | | | |
| VGLL3 | NM_016206 | 791 | vestigial like 3 | hsa-miR- | −0.11 | 0.94 | 2009 |
| | | | (Drosophila) | 4458 | | | |
| NLK | NM_016231 | 792 | nemo-like kinase | hsa-miR- | −0.14 | 0.87 | 2005, |
| | | | | 4500 | | | 2007, |
| | | | | | | | 2009 |
| SCARA3 | NM_016240 | 793 | scavenger receptor | hsa-miR- | −0.03 | 0.77 | |
| | | | class A, member 3 | 4500 | | | |
| IMPG2 | NM_016247 | 794 | interphotoreceptor | hsa-let-7i | −0.31 | 0.95 | |
| | | | matrix proteoglycan 2 | | | | |
| TOB2 | NM_016272 | 795 | transducer of ERBB2, 2 | hsa-miR- | >−0.02 | 0.94 | 2005, |
| | | | | 4458 | | | 2007, |
| | | | | | | | 2009 |
| PLEKHO1 | NM_016274 | 796 | pleckstrin homology | hsa-miR- | −0.2 | 0.79 | 2007, |
| | | | domain containing, | 4458 | | | 2009 |
| | | | family O member 1 | | | | |
| ANKFY1 | NM_016376 | 797 | ankyrin repeat and | hsa-miR- | >−0.03 | 0.98 | 2005, |
| | | | FYVE domain | 4458 | | | 2007, |
| | | | containing 1 | | | | 2009 |
| LUC7L3 | NM_016424 | 798 | LUC7-like 3 (S. cerevisiae) | hsa-miR- | −0.05 | 0.85 | 2005, |
| | | | | 4500 | | | 2007, |
| | | | | | | | 2009 |
| RAB8B | NM_016530 | 799 | RAB8B, member | hsa-let-7f | −0.07 | 0.92 | 2007 |
| | | | RAS oncogene family | | | | |
| GCNT4 | NM_016591 | 800 | glucosaminyl (N- | hsa-miR- | −0.34 | 0.91 | 2007, |
| | | | acetyl) transferase 4, | 4500 | | | 2009 |
| | | | core 2 | | | | |
| UFM1 | NM_016617 | 801 | ubiquitin-fold | hsa-miR- | −0.36 | 0.63 | 2009 |
| | | | modifier 1 | 4458 | | | |
| ZNF644 | NM_016620 | 802 | zinc finger protein | hsa-miR- | −0.28 | 0.97 | 2005, |
| | | | 644 | 4458 | | | 2007, |
| | | | | | | | 2009 |
| FZD3 | NM_017412 | 803 | frizzled family | hsa-miR-98 | −0.2 | >0.99 | |
| | | | receptor 3 | | | | |
| RBM38 | NM_017495 | 804 | RNA binding motif | hsa-miR- | −0.25 | 0.98 | 2007, |
| | | | protein 38 | 4458 | | | 2009 |
| STAB2 | NM_017564 | 805 | stabilin 2 | hsa-miR- | −0.13 | 0.9 | 2005, |
| | | | | 4500 | | | 2007, |
| | | | | | | | 2009 |
| KIF21B | NM_017596 | 806 | kinesin family | hsa-miR- | >−0.03 | 0.95 | 2007, |
| | | | member 21B | 4458 | | | 2009 |
| EIF2C4 | NM_017629 | 807 | eukaryotic translation | hsa-let-7d | −0.17 | 0.95 | 2005, |
| | | | initiation factor 2C, 4 | | | | 2007, |
| | | | | | | | 2009 |
| BNC2 | NM_017637 | 808 | basonuclin 2 | hsa-let-7g | −0.03 | 0.88 | 2005, |
| | | | | | | | 2007, |
| | | | | | | | 2009 |
| KLHL24 | NM_017644 | 809 | kelch-like 24 | hsa-miR- | >−0.01 | 0.87 | 2007, |
| | | | (Drosophila) | 4458 | | | 2009 |
| GDAP2 | NM_017686 | 810 | ganglioside induced | hsa-let-7d | −0.33 | 0.97 | 2009 |
| | | | differentiation | | | | |
| | | | associated protein 2 | | | | |
| FBXL12 | NM_017703 | 811 | F-box and leucine- | hsa-miR- | −0.32 | 0.92 | 2007, |
| | | | rich repeat protein 12 | 4458 | | | 2009 |
| ANKRD49 | NM_017704 | 812 | ankyrin repeat | hsa-miR- | −0.25 | 0.9 | 2007, |
| | | | domain 49 | 4500 | | | 2009 |
| UHRF1BP1 | NM_017754 | 813 | UHRF1 binding | hsa-miR- | −0.03 | 0.85 | |
| | | | protein 1 | 4500 | | | |
| INO80D | NM_017759 | 814 | INO80 complex | hsa-miR- | −0.12 | 0.91 | 2005, |
| | | | subunit D | 4500 | | | 2007, |
| | | | | | | | 2009 |
| CHD7 | NM_017780 | 815 | chromodomain | hsa-miR- | −0.07 | 0.86 | 2005, |
| | | | helicase DNA binding | 4500 | | | 2007, |
| | | | protein 7 | | | | 2009 |
| SEMA4C | NM_017789 | 816 | sema domain, | hsa-let-7i | −0.32 | 0.98 | 2005, |
| | | | immunoglobulin | | | | 2007, |
| | | | domain (Ig), | | | | 2009 |
| | | | transmembrane | | | | |
| | | | domain (TM) and | | | | |
| | | | short cytoplasmic | | | | |
| | | | domain, (semaphorin) | | | | |
| | | | 4C | | | | |
| CMTM6 | NM_017801 | 817 | CKLF-like MARVEL | hsa-let-7c | −0.16 | <0.1 | |
| | | | transmembrane | | | | |
| | | | domain containing 6 | | | | |
| HIF1AN | NM_017902 | 818 | hypoxia inducible | hsa-miR- | −0.47 | 0.94 | 2009 |
| | | | factor 1, alpha subunit | 4500 | | | |
| | | | inhibitor | | | | |
| STX17 | NM_017919 | 819 | syntaxin 17 | hsa-miR- | −0.16 | 0.97 | 2005, |
| | | | | 4500 | | | 2007, |
| | | | | | | | 2009 |
| USP47 | NM_017944 | 820 | ubiquitin specific | hsa-let-7d | −0.14 | 0.94 | 2007, |
| | | | peptidase 47 | | | | 2009 |
| PDPR | NM_017990 | 821 | pyruvate | hsa-miR- | −0.3 | 0.95 | 2005, |
| | | | dehydrogenase | 4500 | | | 2007, |
| | | | phosphatase | | | | 2009 |
| | | | regulatory subunit | | | | |
| C9orf40 | NM_017998 | 822 | chromosome 9 open | hsa-let-7f | −0.55 | 0.76 | 2009 |
| | | | reading frame 40 | | | | |
| XKR8 | NM_018053 | 823 | XK, Kell blood group | hsa-miR- | −0.49 | 0.98 | 2007, |
| | | | complex subunit- | 4458 | | | 2009 |
| | | | related family, | | | | |
| | | | member 8 | | | | |
| PRPF38B | NM_018061 | 824 | PRP38 pre-mRNA | hsa-miR- | −0.32 | 0.26 | 2007, |
| | | | processing factor 38 | 4458 | | | 2009 |
| | | | (yeast) domain | | | | |
| | | | containing B | | | | |
| IPO9 | NM_018085 | 825 | importin 9 | hsa-miR- | −0.06 | 0.78 | 2009 |
| | | | | 4500 | | | |
| FIGN | NM_018086 | 826 | fidgetin | hsa-let-7d | −0.56 | >0.99 | 2007, |
| | | | | | | | 2009 |
| CDCA8 | NM_018101 | 827 | cell division cycle | hsa-miR- | −0.17 | 0.94 | 2009 |
| | | | associated 8 | 4458 | | | |
| FAM178A | NM_018121 | 828 | family with sequence | hsa-miR-98 | −0.24 | 0.98 | 2003, |
| | | | similarity 178, | | | | 2005, |
| | | | member A | | | | 2007, |
| | | | | | | | 2009 |
| LRRC20 | NM_018205 | 829 | leucine rich repeat | hsa-miR- | −0.04 | 0.87 | 2009 |
| | | | containing 20 | 4458 | | | |
| ETNK2 | NM_018208 | 830 | ethanolamine kinase 2 | hsa-miR- | −0.14 | 0.93 | 2005, |
| | | | | 4458 | | | 2007, |
| | | | | | | | 2009 |
| TMEM143 | NM_018273 | 831 | transmembrane | hsa-miR- | −0.23 | 0.9 | 2009 |
| | | | protein 143 | 4500 | | | |
| BRF2 | NM_018310 | 832 | BRF2, subunit of | hsa-miR- | −0.43 | <0.1 | 2009 |
| | | | RNA polymerase III | 4500 | | | |
| | | | transcription initiation | | | | |
| | | | factor, BRF1-like | | | | |
| DDX19A | NM_018332 | 833 | DEAD (Asp-Glu-Ala- | hsa-miR- | −0.47 | 0.94 | 2007, |
| | | | As) box polypeptide | 4500 | | | 2009 |
| | | | 19A | | | | |
| FGD6 | NM_018351 | 834 | FYVE, RhoGEF and | hsa-miR- | −0.32 | 0.99 | 2009 |
| | | | PH domain | 4458 | | | |
| | | | containing 6 | | | | |
| ACER3 | NM_018367 | 835 | alkaline ceramidase 3 | hsa-let-7d | −0.2 | 0.93 | |
| SYNJ2BP | NM_018373 | 836 | synaptojanin 2 | hsa-miR- | −0.11 | 0.85 | |
| | | | binding protein | 4500 | | | |
| PAG1 | NM_018440 | 837 | phosphoprotein | hsa-miR- | −0.3 | 0.98 | 2009 |
| | | | associated with | 4458 | | | |
| | | | glycosphingolipid | | | | |
| | | | microdomains 1 | | | | |
| ACTR10 | NM_018477 | 838 | actin-related protein | hsa-let-7f | −0.34 | 0.75 | 2009 |
| | | | 10 homolog (S. cerevisiae) | | | | |
| LGR4 | NM_018490 | 839 | leucine-rich repeat | hsa-miR- | −0.2 | 0.92 | 2005, |
| | | | containing G protein- | 4500 | | | 2007, |
| | | | coupled receptor 4 | | | | 2009 |
| YOD1 | NM_018566 | 840 | YOD1 OTU | hsa-miR- | −0.57 | >0.99 | 2007, |
| | | | deubiquinating | 4500 | | | 2009 |
| | | | enzyme 1 homolog | | | | |
| | | | (S. cerevisiae) | | | | |
| SLC16A10 | NM_018593 | 841 | solute carrier family | hsa-miR- | −0.14 | 0.86 | 2009 |
| | | | 16, member 10 | 4500 | | | |
| | | | (aromatic amino acid | | | | |
| | | | transporter) | | | | |
| ETNK1 | NM_018638 | 842 | ethanolamine kinase 1 | hsa-miR- | −0.05 | 0.92 | 2007, |
| | | | | 4500 | | | 2009 |
| B3GAT1 | NM_018644 | 843 | beta-1,3- | hsa-let-7d | −0.02 | 0.9 | 2009 |
| | | | glucuronyltransferase 1 | | | | |
| | | | (glucuronosyltransferase P) | | | | |
| BIN3 | NM_018688 | 844 | bridging integrator 3 | hsa-let-7g | −0.22 | 0.92 | 2005, |
| | | | | | | | 2007, |
| | | | | | | | 2009 |
| YIPF1 | NM_018982 | 845 | Yip1 domain family, | hsa-let-7d | −0.18 | 0.71 | |
| | | | member 1 | | | | |
| SSH1 | NM_018984 | 846 | slingshot homolog 1 | hsa-let-7a | −0.17 | 0.95 | 2005, |
| | | | (Drosophila) | | | | 2007, |
| | | | | | | | 2009 |
| SMCR7L | NM_019008 | 847 | Smith-Magenis | hsa-let-7f | −0.08 | 0.94 | 2007, |
| | | | syndrome | | | | 2009 |
| | | | chromosome region, | | | | |
| | | | candidate 7-like | | | | |
| CCDC93 | NM_019044 | 848 | coiled-coil domain | hsa-miR- | −0.07 | 0.62 | 2009 |
| | | | containing 93 | 4458 | | | |
| CRCT1 | NM_019060 | 849 | cysteine-rich C- | hsa-miR- | −0.28 | 0.92 | 2009 |
| | | | terminal 1 | 4500 | | | |
| CCDC76 | NM_019083 | 850 | coiled-coil domain | hsa-let-7f | −0.38 | 0.72 | |
| | | | containing 76 | | | | |
| UBFD1 | NM_019116 | 851 | ubiquitin family | hsa-miR- | −0.1 | 0.87 | 2007, |
| | | | domain containing 1 | 4458 | | | 2009 |
| TMEM234 | NM_019118 | 852 | transmembrane | hsa-let-7a | −0.37 | 0.92 | 2009 |
| | | | protein 234 | | | | |
| RNF20 | NM_019592 | 853 | ring finger protein 20 | hsa-let-7g | −0.27 | 0.7 | 2005, |
| | | | | | | | 2007 |
| GPCPD1 | NM_019593 | 854 | glycerophosphocholine | hsa-miR- | −0.42 | >0.99 | 2007, |
| | | | phosphodiesterase | 4500 | | | 2009 |
| | | | GDE1 homolog (S. cerevisiae) | | | | |
| ABCB9 | NM_019624 | 855 | ATP-binding cassette, | hsa-miR-98 | −0.3 | 0.95 | 2005, |
| | | | sub-family B | | | | 2007, |
| | | | (MDR/TAP), member 9 | | | | 2009 |
| UGGT1 | NM_020120 | 856 | UDP-glucose | hsa-miR- | −0.22 | 0.98 | 2007, |
| | | | glycoprotein | 4458 | | | 2009 |
| | | | glucosyltransferase 1 | | | | |
| KCMF1 | NM_020122 | 857 | potassium channel | hsa-let-7g | −0.02 | 0.93 | 2009 |
| | | | modulatory factor 1 | | | | |
| C1GALT1 | NM_020156 | 858 | core 1 synthase, | hsa-miR-98 | −0.07 | 0.98 | |
| | | | glycoprotein-N- | | | | |
| | | | acetylgalactosamine | | | | |
| | | | 3-beta- | | | | |
| | | | galactosyltransferase, 1 | | | | |
| SLC12A9 | NM_020246 | 859 | solute carrier family | hsa-miR- | −0.29 | 0.98 | 2009 |
| | | | 12 | 4458 | | | |
| | | | (potassium/chloride | | | | |
| | | | transporters), member 9 | | | | |
| MNT | NM_020310 | 860 | MAX binding protein | hsa-let-7d | −0.02 | 0.93 | 2005, |
| | | | | | | | 2007, |
| | | | | | | | 2009 |
| VANGL2 | NM_020335 | 861 | vang-like 2 (van | hsa-miR- | −0.06 | >0.99 | 2007, |
| | | | gogh, Drosophila) | 4458 | | | 2009 |
| KIAA1244 | NM_020340 | 862 | KIAA1244 | hsa-miR- | >−0.02 | 0.79 | |
| | | | | 4458 | | | |
| ENTPD7 | NM_020354 | 863 | ectonucleoside | hsa-let-7d | −0.17 | 0.94 | |
| | | | triphosphate | | | | |
| | | | diphosphohydrolase 7 | | | | |
| AVEN | NM_020371 | 864 | apoptosis, caspase | hsa-let-7i | −0.22 | 0.59 | |
| | | | activation inhibitor | | | | |
| SCYL3 | NM_020423 | 865 | SCY1-like 3 (S. cerevisiae) | hsa-let-7f | −0.18 | 0.93 | 2005, |
| | | | | | | | 2007, |
| | | | | | | | 2009 |
| ASPHD2 | NM_020437 | 866 | aspartate beta- | hsa-miR- | −0.02 | 0.8 | |
| | | | hydroxylase domain | 4458 | | | |
| | | | containing 2 | | | | |
| GALNT1 | NM_020474 | 867 | UDP-N-acetyl-alpha- | hsa-miR- | −0.47 | >0.99 | 2005, |
| | | | D- | 4500 | | | 2007, |
| | | | galactosamine:polypeptide | | | | 2009 |
| | | | N- | | | | |
| | | | acetylgalactosaminyltransferase 1 | | | | |
| | | | (GalNAc-T1) | | | | |
| MRS2 | NM_020662 | 868 | MRS2 magnesium | hsa-let-7f | −0.48 | 0.91 | 2009 |
| | | | homeostasis factor | | | | |
| | | | homolog (S. cerevisiae) | | | | |
| RAB22A | NM_020673 | 869 | RAB22A, member | hsa-miR- | −0.15 | 0.88 | 2009 |
| | | | RAS oncogene family | 4500 | | | |
| ZNF512B | NM_020713 | 870 | zinc finger protein | hsa-miR- | −0.31 | >0.99 | 2007, |
| | | | 512B | 4458 | | | 2009 |
| PLEKHH1 | NM_020715 | 871 | pleckstrin homology | hsa-miR- | −0.2 | 0.93 | 2007, |
| | | | domain containing, | 4500 | | | 2009 |
| | | | family H (with | | | | |
| | | | MyTH4 domain) | | | | |
| | | | member 1 | | | | |
| NLN | NM_020726 | 872 | neurolysin | hsa-miR- | −0.1 | 0.79 | |
| | | | (metallopeptidase M3 | 4458 | | | |
| | | | family) | | | | |
| INTS2 | NM_020748 | 873 | integrator complex | hsa-let-7a | −0.3 | 0.84 | 2007, |
| | | | subunit 2 | | | | 2009 |
| STARD9 | NM_020759 | 874 | StAR-related lipid | hsa-miR- | −0.7 | 0.79 | |
| | | | transfer (START) | 4458 | | | |
| | | | domain containing 9 | | | | |
| SRGAP1 | NM_020762 | 875 | SLIT-ROBO Rho | hsa-miR- | −0.08 | 0.73 | |
| | | | GTPase activating | 4458 | | | |
| | | | protein 1 | | | | |
| CASKIN1 | NM_020764 | 876 | CASK interacting | hsa-let-7i | −0.1 | 0.89 | 2005, |
| | | | protein 1 | | | | 2007, |
| | | | | | | | 2009 |
| KCTD16 | NM_020768 | 877 | potassium channel | hsa-miR- | −0.19 | 0.87 | 2009 |
| | | | tetramerisation | 4458 | | | |
| | | | domain containing 16 | | | | |
| RGAG1 | NM_020769 | 878 | retrotransposon gag | hsa-let-7f | −0.14 | 0.79 | 2005, |
| | | | domain containing 1 | | | | 2007 |
| MIB1 | NM_020774 | 879 | mindbomb homolog 1 | hsa-let-7f | −0.15 | >0.99 | 2007, |
| | | | (Drosophila) | | | | 2009 |
| ALPK3 | NM_020778 | 880 | alpha-kinase 3 | hsa-miR- | >−0.02 | 0.84 | 2009 |
| | | | | 4458 | | | |
| PDP2 | NM_020786 | 881 | pyruvate | hsa-let-7b | −0.18 | 0.92 | 2009 |
| | | | dehyrogenase | | | | |
| | | | phosphatase catalytic | | | | |
| | | | subunit 2 | | | | |
| TAOK1 | NM_020791 | 882 | TAO kinase 1 | hsa-let-7g | −0.07 | 0.91 | |
| ARHGAP20 | NM_020809 | 883 | Rho GTPase | hsa-let-7a | −0.11 | 0.93 | 2005, |
| | | | activating protein 20 | | | | 2007, |
| | | | | | | | 2009 |
| KIAA1467 | NM_020853 | 884 | KIAA1467 | hsa-miR- | −0.15 | 0.83 | 2009 |
| | | | | 4458 | | | |
| ZSWIM5 | NM_020883 | 885 | zinc finger, SWIM- | hsa-miR- | −0.29 | 0.97 | 2009 |
| | | | type containing 5 | 4458 | | | |
| PLXNA4 | NM_020911 | 886 | plexin A4 | hsa-miR- | −0.15 | >0.99 | 2009 |
| | | | | 4500 | | | |
| SLC7A14 | NM_020949 | 887 | solute carrier family 7 | hsa-let-7d | −0.07 | 0.94 | |
| | | | (orphan transporter), | | | | |
| | | | member 14 | | | | |
| IGDCC4 | NM_020962 | 888 | immunoglobulin | hsa-let-7a | −0.24 | 0.98 | 2005, |
| | | | superfamily, DCC | | | | 2007, |
| | | | subclass, member 4 | | | | 2009 |
| SPTBN4 | NM_020971 | 889 | spectrin, beta, non- | hsa-miR- | −0.07 | 0.87 | 2007, |
| | | | erythrocytic 4 | 4458 | | | 2009 |
| XK | NM_021083 | 890 | X-linked Kx blood | hsa-miR- | −0.29 | 0.93 | 2009 |
| | | | group (McLeod | 4458 | | | |
| | | | syndrome) | | | | |
| MTMR3 | NM_021090 | 891 | myotubularin related | hsa-let-7a | −0.05 | 0.88 | 2009 |
| | | | protein 3 | | | | |
| SLC5A6 | NM_021095 | 892 | solute carrier family 5 | hsa-let-7f | −0.21 | 0.93 | 2007, |
| | | | (sodium-dependent | | | | 2009 |
| | | | vitamin transporter), | | | | |
| | | | member 6 | | | | |
| COL14A1 | NM_021110 | 893 | collagen, type XIV, | hsa-miR- | −0.3 | 0.71 | 2007 |
| | | | alpha 1 | 4500 | | | |
| PMAIP1 | NM_021127 | 894 | phorbol-12-myristate- | hsa-miR- | −0.17 | 0.9 | 2009 |
| | | | 13-acetate-induced | 4500 | | | |
| | | | protein 1 | | | | |
| FAM108C1 | NM_021214 | 895 | family with sequence | hsa-miR-98 | −0.2 | 0.72 | |
| | | | similarity 108, | | | | |
| | | | member C1 | | | | |
| RRAGD | NM_021244 | 896 | Ras-related GTP | hsa-miR- | −0.1 | 0.93 | |
| | | | binding D | 4500 | | | |
| CDH22 | NM_021248 | 897 | cadherin 22, type 2 | hsa-miR- | −0.23 | 0.88 | |
| | | | | 4500 | | | |
| SNX6 | NM_021249 | 898 | sorting nexin 6 | hsa-let-7c | −0.38 | 0.98 | 2009 |
| SENP2 | NM_021627 | 899 | SUMO1/sentrin/SMT | hsa-miR- | −0.17 | 0.8 | 2005, |
| | | | 3 specific peptidase 2 | 4458 | | | 2007, |
| | | | | | | | 2009 |
| TRIB2 | NM_021643 | 900 | tribbles homolog 2 | hsa-miR- | −0.11 | 0.84 | 2005, |
| | | | (Drosophila) | 4458 | | | 2007, |
| | | | | | | | 2009 |
| SPCS3 | NM_021928 | 901 | signal peptidase | hsa-miR- | −0.06 | 0.81 | |
| | | | complex subunit 3 | 4458 | | | |
| | | | homolog (S. cerevisiae) | | | | |
| FKBP10 | NM_021939 | 902 | FK506 binding | hsa-let-7d | −0.08 | 0.65 | |
| | | | protein 10, 65 kDa | | | | |
| TIA1 | NM_022037 | 903 | TIA1 cytotoxic | hsa-let-7f | −0.12 | 0.93 | |
| | | | granule-associated | | | | |
| | | | RNA binding protein | | | | |
| GAN | NM_022041 | 904 | gigaxonin | hsa-miR- | −0.26 | 0.98 | 2005, |
| | | | | 4500 | | | 2007, |
| | | | | | | | 2009 |
| CERS2 | NM_022075 | 905 | ceramide synthase 2 | hsa-let-7c | −0.11 | 0.69 | |
| PRSS22 | NM_022119 | 906 | protease, serine, 22 | hsa-miR-98 | −0.2 | 0.84 | |
| SNX16 | NM_022133 | 907 | sorting nexin 16 | hsa-miR- | −0.23 | 0.94 | 2005, |
| | | | | 4500 | | | 2007, |
| | | | | | | | 2009 |
| XYLT1 | NM_022166 | 908 | xylosyltransferase I | hsa-miR- | >−0.03 | 0.99 | 2007, |
| | | | | 4458 | | | 2009 |
| DNAJC1 | NM_022365 | 909 | DnaJ (Hsp40) | hsa-let-7d | −0.21 | 0.85 | 2005, |
| | | | homolog, subfamily | | | | 2007, |
| | | | C, member 1 | | | | 2009 |
| NSD1 | NM_022455 | 910 | nuclear receptor | hsa-miR- | −0.12 | 0.76 | |
| | | | binding SET domain | 4458 | | | |
| | | | protein 1 | | | | |
| HIF3A | NM_022462 | 911 | hypoxia inducible | hsa-let-7b | −0.35 | >0.99 | 2009 |
| | | | factor 3, alpha subunit | | | | |
| ZMAT3 | NM_022470 | 912 | zinc finger, matrin- | hsa-miR- | >−0.01 | 0.73 | |
| | | | type 3 | 4458 | | | |
| TTC31 | NM_022492 | 913 | tetratricopeptide | hsa-miR- | −0.36 | 0.87 | 2009 |
| | | | repeat domain 31 | 4458 | | | |
| MESDC1 | NM_022566 | 914 | mesoderm | hsa-miR- | −0.15 | 0.8 | 2005, |
| | | | development | 4500 | | | 2007, |
| | | | candidate 1 | | | | 2009 |
| ELOVL4 | NM_022726 | 915 | ELOVL fatty acid | hsa-miR- | −0.16 | 0.94 | 2005, |
| | | | elongase 4 | 4500 | | | 2007, |
| | | | | | | | 2009 |
| FAM160B2 | NM_022749 | 916 | family with sequence | hsa-miR- | −0.06 | 0.92 | 2005, |
| | | | similarity 160, | 4458 | | | 2007, |
| | | | member B2 | | | | 2009 |
| AEN | NM_022767 | 917 | apoptosis enhancing | hsa-miR- | −0.31 | 0.93 | 2009 |
| | | | nuclease | 4458 | | | |
| RNF38 | NM_022781 | 918 | ring finger protein 38 | hsa-let-7g | −0.13 | 0.7 | 2005, |
| | | | | | | | 2007, |
| | | | | | | | 2009 |
| ANKRA2 | NM_023039 | 919 | ankyrin repeat, family | hsa-miR- | −0.19 | 0.84 | |
| | | | A (RFXANK-like), 2 | 4458 | | | |
| ZSWIM4 | NM_023072 | 920 | zinc finger, SWIM- | hsa-miR- | −0.03 | 0.79 | 2007 |
| | | | type containing 4 | 4458 | | | |
| OTUB2 | NM_023112 | 921 | OTU domain, | hsa-miR- | −0.09 | 0.65 | |
| | | | ubiquitin aldehyde | 4458 | | | |
| | | | binding 2 | | | | |
| LRFN4 | NM_024036 | 922 | leucine rich repeat | hsa-miR- | −0.12 | 0.89 | 2007, |
| | | | and fibronectin type | 4458 | | | 2009 |
| | | | III domain containing 4 | | | | |
| GNPTAB | NM_024312 | 923 | N-acetylglucosamine- | hsa-miR- | −0.48 | 0.95 | 2007, |
| | | | 1-phosphate | 4500 | | | 2009 |
| | | | transferase, alpha and | | | | |
| | | | beta subunits | | | | |
| EFHD2 | NM_024329 | 924 | EF-hand domain | hsa-let-7f | −0.19 | 0.97 | 2005, |
| | | | family, member D2 | | | | 2007, |
| | | | | | | | 2009 |
| HOXD1 | NM_024501 | 925 | homeobox D1 | hsa-miR- | −0.25 | 0.93 | 2005, |
| | | | | 4500 | | | 2007, |
| | | | | | | | 2009 |
| ADIPOR2 | NM_024551 | 926 | adiponectin receptor 2 | hsa-let-7f | −0.16 | 0.94 | 2005, |
| | | | | | | | 2007, |
| | | | | | | | 2009 |
| CCNJL | NM_024565 | 927 | cyclin J-like | hsa-let-7f | −0.12 | 0.89 | 2009 |
| SRD5A3 | NM_024592 | 928 | steroid 5 alpha- | hsa-let-7a | −0.4 | 0.84 | |
| | | | reductase 3 | | | | |
| THAP9 | NM_024672 | 929 | THAP domain | hsa-miR- | −0.47 | 0.9 | |
| | | | containing 9 | 4458 | | | |
| LIN28A | NM_024674 | 930 | lin-28 homolog A (C. elegans) | hsa-let-7i | −0.25 | 0.98 | 2005, |
| | | | | | | | 2007, |
| | | | | | | | 2009 |
| KCTD17 | NM_024681 | 931 | potassium channel | hsa-miR- | −0.24 | 0.98 | 2007, |
| | | | tetramerisation | 4458 | | | 2009 |
| | | | domain containing 17 | | | | |
| C15orf29 | NM_024713 | 932 | chromosome 15 open | hsa-miR- | −0.18 | 0.94 | 2005, |
| | | | reading frame 29 | 4458 | | | 2007, |
| | | | | | | | 2009 |
| MOBKL2B | NM_024761 | 933 | MOB1, Mps One | hsa-miR- | >−0.03 | 0.93 | 2009 |
| | | | Binder kinase | 4458 | | | |
| | | | activator-like 2B | | | | |
| | | | (yeast) | | | | |
| ATP8B4 | NM_024837 | 934 | ATPase, class I, type | hsa-let-7a | −0.25 | 0.94 | 2009 |
| | | | 8B, member 4 | | | | |
| EIF2C3 | NM_024852 | 935 | eukaryotic translation | hsa-let-7f | −0.13 | 0.83 | 2005, |
| | | | initiation factor 2C, 3 | | | | 2007, |
| | | | | | | | 2009 |
| L2HGDH | NM_024884 | 936 | L-2-hydroxyglutarate | hsa-let-7a | −0.05 | 0.98 | 2009 |
| | | | dehydrogenase | | | | |
| C7orf58 | NM_024913 | 937 | chromosome 7 open | hsa-let-7g | −0.14 | 0.92 | 2005, |
| | | | reading frame 58 | | | | 2007, |
| | | | | | | | 2009 |
| PHC3 | NM_024947 | 938 | polyhomeotic | hsa-let-7b | −0.05 | 0.84 | 2009 |
| | | | homolog 3 | | | | |
| | | | (Drosophila) | | | | |
| CEP135 | NM_025009 | 939 | centrosomal protein | hsa-let-7b | −0.34 | 0.95 | 2009 |
| | | | 135 kDa | | | | |
| ARHGEF15 | NM_025014 | 940 | Rho guanine | hsa-miR- | −0.23 | 0.94 | 2005, |
| | | | nucleotide exchange | 4500 | | | 2007, |
| | | | factor (GEF) 15 | | | | 2009 |
| VCPIP1 | NM_025054 | 941 | valosin containing | hsa-miR- | >−0.01 | 0.76 | 2005, |
| | | | protein (p97)/p47 | 4458 | | | 2007 |
| | | | complex interacting | | | | |
| | | | protein 1 | | | | |
| FRAS1 | NM_025074 | 942 | Fraser syndrome 1 | hsa-let-7b | −0.42 | 0.95 | 2005, |
| | | | | | | | 2007, |
| | | | | | | | 2009 |
| NYNRIN | NM_025081 | 943 | NYN domain and | hsa-let-7d | −0.32 | >0.99 | 2007, |
| | | | retroviral integrase | | | | 2009 |
| | | | containing | | | | |
| CHD9 | NM_025134 | 944 | chromodomain | hsa-let-7a | −0.07 | 0.74 | 2005, |
| | | | helicase DNA binding | | | | 2007 |
| | | | protein 9 | | | | |
| KIAA1539 | NM_025182 | 945 | KIAA1539 | hsa-miR- | −0.25 | 0.92 | 2005, |
| | | | | 4458 | | | 2007, |
| | | | | | | | 2009 |
| EDEM3 | NM_025191 | 946 | ER degradation | hsa-miR- | −0.21 | 0.98 | 2007, |
| | | | enhancer, | 4500 | | | 2009 |
| | | | mannosidase alpha- | | | | |
| | | | like 3 | | | | |
| TRIB1 | NM_025195 | 947 | tribbles homolog 1 | hsa-miR- | −0.1 | 0.92 | 2005, |
| | | | (Drosophila) | 4500 | | | 2007, |
| | | | | | | | 2009 |
| TRABD | NM_025204 | 948 | TraB domain | hsa-miR- | −0.22 | 0.73 | 2007, |
| | | | containing | 4458 | | | 2009 |
| MED28 | NM_025205 | 949 | mediator complex | hsa-miR- | −0.45 | 0.32 | |
| | | | subunit 28 | 4500 | | | |
| SOST | NM_025237 | 950 | sclerostin | hsa-miR- | −0.04 | 0.87 | 2009 |
| | | | | 4500 | | | |
| LIMD2 | NM_030576 | 951 | LIM domain | hsa-let-7i | −0.38 | 0.95 | 2007, |
| | | | containing 2 | | | | 2009 |
| CPEB4 | NM_030627 | 952 | cytoplasmic | hsa-let-7d | −0.08 | 0.96 | 2005, |
| | | | polyadenylation | | | | 2007, |
| | | | element binding | | | | 2009 |
| | | | protein 4 | | | | |
| DUSP16 | NM_030640 | 953 | dual specificity | hsa-let-7d | −0.19 | 0.97 | 2005, |
| | | | phosphatase 16 | | | | 2007, |
| | | | | | | | 2009 |
| C1orf21 | NM_030806 | 954 | chromosome 1 open | hsa-let-7g | −0.03 | 0.77 | |
| | | | reading frame 21 | | | | |
| LBH | NM_030915 | 955 | limb bud and heart | hsa-let-7g | −0.07 | 0.92 | 2005, |
| | | | development homolog | | | | 2007, |
| | | | (mouse) | | | | 2009 |
| FAM103A1 | NM_031452 | 956 | family with sequence | hsa-miR- | −0.42 | 0.87 | 2009 |
| | | | similarity 103, | 4458 | | | |
| | | | member A1 | | | | |
| SLC25A18 | NM_031481 | 957 | solute carrier family | hsa-miR- | −0.34 | 0.94 | 2005, |
| | | | 25 (mitochondrial | 4458 | | | 2007, |
| | | | carrier), member 18 | | | | 2009 |
| KCTD10 | NM_031954 | 958 | potassium channel | hsa-miR- | >−0.02 | 0.86 | 2009 |
| | | | tetramerisation | 4458 | | | |
| | | | domain containing 10 | | | | |
| STARD3NL | NM_032016 | 959 | STARD3 N-terminal | hsa-miR- | −0.15 | 0.91 | 2005, |
| | | | like | 4458 | | | 2007, |
| | | | | | | | 2009 |
| STK40 | NM_032017 | 960 | serine/threonine | hsa-miR- | −0.25 | 0.95 | 2007, |
| | | | kinase 40 | 4458 | | | 2009 |
| UTP15 | NM_032175 | 961 | UTP15, U3 small | hsa-let-7b | −0.16 | 0.79 | 2009 |
| | | | nucleolar | | | | |
| | | | ribonucleoprotein, | | | | |
| | | | homolog (S. cerevisiae) | | | | |
| LOXL4 | NM_032211 | 962 | lysyl oxidase-like 4 | hsa-let-7a | −0.13 | 0.94 | 2005, |
| | | | | | | | 2007, |
| | | | | | | | 2009 |
| DDI2 | NM_032341 | 963 | DNA-damage | hsa-miR- | −0.46 | 0.98 | 2007, |
| | | | inducible 1 homolog | 4500 | | | 2009 |
| | | | 2 (S. cerevisiae) | | | | |
| MEGF11 | NM_032445 | 964 | multiple EGF-like- | hsa-miR- | −0.05 | 0.88 | 2009 |
| | | | domains 11 | 4500 | | | |
| DOT1L | NM_032482 | 965 | DOT1-like, histone | hsa-miR- | N/A | 0.99 | 2005, |
| | | | H3 methyltransferase | 4458 | | | 2007, |
| | | | (S. cerevisiae) | | | | 2009 |
| C6orf168 | NM_032511 | 966 | chromosome 6 open | hsa-miR- | −0.22 | 0.95 | 2009 |
| | | | reading frame 168 | 4458 | | | |
| PARD6B | NM_032521 | 967 | par-6 partitioning | hsa-let-7a | −0.29 | 0.95 | 2007, |
| | | | defective 6 homolog | | | | 2009 |
| | | | beta (C. elegans) | | | | |
| USP38 | NM_032557 | 968 | ubiquitin specific | hsa-miR- | −0.33 | 0.85 | 2005, |
| | | | peptidase 38 | 4500 | | | 2007, |
| | | | | | | | 2009 |
| USP32 | NM_032582 | 969 | ubiquitin specific | hsa-let-7a | −0.2 | 0.93 | 2005, |
| | | | peptidase 32 | | | | 2007, |
| | | | | | | | 2009 |
| LOXL3 | NM_032603 | 970 | lysyl oxidase-like 3 | hsa-miR- | −0.1 | 0.79 | 2005, |
| | | | | 4458 | | | 2007, |
| | | | | | | | 2009 |
| FOXP1 | NM_032682 | 971 | forkhead box P1 | hsa-let-7g | −0.04 | 0.85 | 2009 |
| SFT2D3 | NM_032740 | 972 | SFT2 domain | hsa-let-7a | −0.34 | <0.1 | 2009 |
| | | | containing 3 | | | | |
| LINGO1 | NM_032808 | 973 | leucine rich repeat | hsa-let-7d | −0.3 | 0.89 | 2009 |
| | | | and Ig domain | | | | |
| | | | containing 1 | | | | |
| ZNF341 | NM_032819 | 974 | zinc finger protein | hsa-let-7a | −0.42 | <0.1 | |
| | | | 341 | | | | |
| PPP1R15B | NM_032833 | 975 | protein phosphatase 1, | hsa-let-7c | −0.44 | >0.99 | 2005, |
| | | | regulatory (inhibitor) | | | | 2007, |
| | | | subunit 15B | | | | 2009 |
| CGNL1 | NM_032866 | 976 | cingulin-like 1 | hsa-miR- | −0.2 | 0.94 | 2005, |
| | | | | 4458 | | | 2007, |
| | | | | | | | 2009 |
| RAB11FIP4 | NM_032932 | 977 | RAB11 family | hsa-let-7d | −0.27 | >0.99 | 2003, |
| | | | interacting protein 4 | | | | 2005, |
| | | | (class II) | | | | 2007, |
| | | | | | | | 2009 |
| C5orf62 | NM_032947 | 978 | chromosome 5 open | hsa-let-7d | −0.38 | 0.92 | 2007, |
| | | | reading frame 62 | | | | 2009 |
| ZCCHC3 | NM_033089 | 979 | zinc finger, CCHC | hsa-miR- | −0.16 | 0.93 | 2007, |
| | | | domain containing 3 | 4458 | | | 2009 |
| NKD1 | NM_033119 | 980 | naked cuticle | hsa-let-7a | −0.2 | 0.95 | 2005, |
| | | | homolog 1 | | | | 2007, |
| | | | (Drosophila) | | | | 2009 |
| SCRT2 | NM_033129 | 981 | scratch homolog 2, | hsa-miR- | −0.05 | 0.88 | 2005, |
| | | | zinc finger protein | 4458 | | | 2007, |
| | | | (Drosophila) | | | | 2009 |
| SURF4 | NM_033161 | 982 | surfeit 4 | hsa-let-7a | −0.02 | 0.87 | 2005, |
| | | | | | | | 2007, |
| | | | | | | | 2009 |
| PURB | NM_033224 | 983 | purine-rich element | hsa-miR- | −0.03 | 0.87 | 2009 |
| | | | binding protein B | 4458 | | | |
| RASL10B | NM_033315 | 984 | RAS-like, family 10, | hsa-miR- | −0.06 | 0.94 | 2005, |
| | | | member B | 4458 | | | 2007, |
| | | | | | | | 2009 |
| C20orf54 | NM_033409 | 985 | chromosome 20 open | hsa-miR- | −0.3 | <0.1 | |
| | | | reading frame 54 | 4458 | | | |
| FAM125B | NM_033446 | 986 | family with sequence | hsa-miR- | >−0.01 | 0.77 | 2007, |
| | | | similarity 125, | 4458 | | | 2009 |
| | | | member B | | | | |
| TSPYL5 | NM_033512 | 987 | TSPY-like 5 | hsa-miR- | −0.24 | 0.58 | |
| | | | | 4458 | | | |
| TRIM41 | NM_033549 | 988 | tripartite motif | hsa-let-7f | −0.22 | 0.92 | |
| | | | containing 41 | | | | |
| STARD13 | NM_052851 | 989 | StAR-related lipid | hsa-let-7g | −0.4 | >0.99 | 2005, |
| | | | transfer (START) | | | | 2007, |
| | | | domain containing 13 | | | | 2009 |
| VPS26B | NM_052875 | 990 | vacuolar protein | hsa-miR- | −0.15 | 0.9 | 2009 |
| | | | sorting 26 homolog B | 4500 | | | |
| | | | (S. pombe) | | | | |
| EGLN2 | NM_053046 | 991 | egl nine homolog 2 | hsa-miR- | −0.16 | 0.93 | 2005, |
| | | | (C. elegans) | 4500 | | | 2007, |
| | | | | | | | 2009 |
| CCND1 | NM_053056 | 992 | cyclin D1 | hsa-let-7b | −0.12 | 0.99 | 2005, |
| | | | | | | | 2007, |
| | | | | | | | 2009 |
| GALNTL2 | NM_054110 | 993 | UDP-N-acetyl-alpha- | hsa-miR- | −0.2 | 0.94 | 2005, |
| | | | D- | 4500 | | | 2007, |
| | | | galactosamine:polypeptide | | | | 2009 |
| | | | N- | | | | |
| | | | acetylgalactosaminyltransferase- | | | | |
| | | | like 2 | | | | |
| C20orf112 | NM_080616 | 994 | chromosome 20 open | hsa-let-7b | −0.22 | 0.97 | |
| | | | reading frame 112 | | | | |
| TMEM41A | NM_080652 | 995 | transmembrane | hsa-miR- | −0.13 | 0.94 | |
| | | | protein 41A | 4458 | | | |
| ADAMTS14 | NM_080722 | 996 | ADAM | hsa-miR- | −0.18 | 0.93 | 2007, |
| | | | metallopeptidase with | 4458 | | | 2009 |
| | | | thrombospondin type | | | | |
| | | | 1 motif, 14 | | | | |
| ZNF280B | NM_080764 | 997 | zinc finger protein | hsa-let-7d | −0.34 | 0.98 | 2007, |
| | | | 280B | | | | 2009 |
| SOCS4 | NM_080867 | 998 | suppressor of | hsa-miR- | −0.15 | 0.91 | 2005, |
| | | | cytokine signaling 4 | 4500 | | | 2007, |
| | | | | | | | 2009 |
| KLHL6 | NM_130446 | 999 | kelch-like 6 | hsa-let-7d | −0.32 | 0.95 | 2007, |
| | | | (Drosophila) | | | | 2009 |
| TSPAN18 | NM_130783 | 1000 | tetraspanin 18 | hsa-miR- | −0.08 | 0.94 | |
| | | | | 4500 | | | |
| UNC5A | NM_133369 | 1001 | unc-5 homolog A (C. elegans) | hsa-let-7d | −0.12 | 0.9 | 2007, |
| | | | | | | | 2009 |
| GRIN3A | NM_133445 | 1002 | glutamate receptor, | hsa-miR- | >−0.01 | 0.87 | 2009 |
| | | | ionotropic, N-methyl- | 4458 | | | |
| | | | D-aspartate 3A | | | | |
| PYGO2 | NM_138300 | 1003 | pygopus homolog 2 | hsa-miR- | −0.07 | 0.92 | 2005, |
| | | | (Drosophila) | 4500 | | | 2007, |
| | | | | | | | 2009 |
| DCAF15 | NM_138353 | 1004 | DDB1 and CUL4 | hsa-miR- | −0.17 | 0.95 | 2007, |
| | | | associated factor 15 | 4458 | | | 2009 |
| MARS2 | NM_138395 | 1005 | methionyl-tRNA | hsa-let-7d | −0.37 | 0.94 | 2009 |
| | | | synthetase 2, | | | | |
| | | | mitochondrial | | | | |
| MARCH9 | NM_138396 | 1006 | membrane-associated | hsa-miR- | −0.09 | 0.78 | 2007, |
| | | | ring finger (C3HC4) 9 | 4500 | | | 2009 |
| ZNF689 | NM_138447 | 1007 | zinc finger protein | hsa-miR- | −0.29 | 0.94 | 2009 |
| | | | 689 | 4500 | | | |
| CTHRC1 | NM_138455 | 1008 | collagen triple helix | hsa-miR- | −0.31 | 0.76 | 2009 |
| | | | repeat containing 1 | 4458 | | | |
| C11orf84 | NM_138471 | 1009 | chromosome 11 open | hsa-miR- | −0.14 | 0.94 | 2005, |
| | | | reading frame 84 | 4458 | | | 2007, |
| | | | | | | | 2009 |
| H2AFV | NM_138635 | 1010 | H2A histone family, | hsa-miR- | >−0.03 | <0.1 | |
| | | | member V | 4458 | | | |
| CD200R1 | NM_138806 | 1011 | CD200 receptor 1 | hsa-let-7a | −0.38 | 0.82 | 2009 |
| ADAMTS15 | NM_139055 | 1012 | ADAM | hsa-let-7i | −0.38 | >0.99 | |
| | | | metallopeptidase with | | | | |
| | | | thrombospondin type | | | | |
| | | | 1 motif, 15 | | | | |
| LIPH | NM_139248 | 1013 | lipase, member H | hsa-miR- | −0.29 | 0.94 | 2009 |
| | | | | 4500 | | | |
| PPTC7 | NM_139283 | 1014 | PTC7 protein | hsa-let-7d | −0.06 | 0.85 | 2007, |
| | | | phosphatase homolog | | | | 2009 |
| | | | (S. cerevisiae) | | | | |
| GNAT1 | NM_144499 | 1015 | guanine nucleotide | hsa-let-7g | −0.14 | <0.1 | |
| | | | binding protein (G | | | | |
| | | | protein), alpha | | | | |
| | | | transducing activity | | | | |
| | | | polypeptide 1 | | | | |
| CNOT6L | NM_144571 | 1016 | CCR4-NOT | hsa-miR- | −0.02 | 0.92 | 2007, |
| | | | transcription | 4458 | | | 2009 |
| | | | complex, subunit 6- | | | | |
| | | | like | | | | |
| MAPK1IP1L | NM_144578 | 1017 | mitogen-activated | hsa-miR- | −0.03 | 0.99 | 2009 |
| | | | protein kinase 1 | 4458 | | | |
| | | | interacting protein 1- | | | | |
| | | | like | | | | |
| TEX261 | NM_144582 | 1018 | testis expressed 261 | hsa-miR- | −0.04 | 0.8 | 2009 |
| | | | | 4458 | | | |
| FOPNL | NM_144600 | 1019 | FGFR1OP N-terminal | hsa-let-7a | −0.13 | 0.88 | 2009 |
| | | | like | | | | |
| KLHL23 | NM_144711 | 1020 | kelch-like 23 | hsa-let-7f | −0.2 | 0.95 | |
| | | | (Drosophila) | | | | |
| SMCR8 | NM_144775 | 1021 | Smith-Magenis | hsa-let-7d | −0.16 | 0.95 | 2009 |
| | | | syndrome | | | | |
| | | | chromosome region, | | | | |
| | | | candidate 8 | | | | |
| TSPEAR | NM_144991 | 1022 | thrombospondin-type | hsa-let-7a | −0.16 | 0.9 | 2005, |
| | | | laminin G domain and | | | | 2007 |
| | | | EAR repeats | | | | |
| TET3 | NM_144993 | 1023 | tet oncogene family | hsa-miR-98 | −0.19 | >0.99 | 2009 |
| | | | member 3 | | | | |
| CCNY | NM_145012 | 1024 | cyclin Y | hsa-let-7d | −0.22 | 0.94 | |
| SLC2A12 | NM_145176 | 1025 | solute carrier family 2 | hsa-miR- | −0.2 | 0.93 | 2007, |
| | | | (facilitated glucose | 4500 | | | 2009 |
| | | | transporter), member | | | | |
| | | | 12 | | | | |
| B3GNT7 | NM_145236 | 1026 | UDP- | hsa-miR- | −0.2 | 0.98 | |
| | | | GlcNAc:betaGal beta- | 4458 | | | |
| | | | 1,3-N- | | | | |
| | | | acetylglucosaminyltransferase 7 | | | | |
| KIFC2 | NM_145754 | 1027 | kinesin family | hsa-miR- | −0.16 | 0.64 | |
| | | | member C2 | 4500 | | | |
| MTPN | NM_145808 | 1028 | myotrophin | hsa-let-7d | −0.04 | 0.82 | 2005, |
| | | | | | | | 2007, |
| | | | | | | | 2009 |
| SYT11 | NM_152280 | 1029 | synaptotagmin XI | hsa-miR- | −0.13 | 0.98 | 2005, |
| | | | | 4458 | | | 2007, |
| | | | | | | | 2009 |
| POGLUT1 | NM_152305 | 1030 | protein O- | hsa-let-7f | −0.14 | 0.87 | 2007, |
| | | | glucosyltransferase 1 | | | | 2009 |
| GRPEL2 | NM_152407 | 1031 | GrpE-like 2, | hsa-let-7i | −0.18 | 0.93 | 2009 |
| | | | mitochondrial (E. coli) | | | | |
| RNF165 | NM_152470 | 1032 | ring finger protein | hsa-miR- | −0.19 | >0.99 | 2007, |
| | | | 165 | 4458 | | | 2009 |
| ZNF362 | NM_152493 | 1033 | zinc finger protein | hsa-miR- | −0.08 | 0.98 | 2007, |
| | | | 362 | 4458 | | | 2009 |
| ARL6IP6 | NM_152522 | 1034 | ADP-ribosylation-like | hsa-miR- | −0.33 | 0.83 | |
| | | | factor 6 interacting | 4500 | | | |
| | | | protein 6 | | | | |
| SLC16A14 | NM_152527 | 1035 | solute carrier family | hsa-miR-98 | −0.18 | 0.94 | 2007, |
| | | | 16, member 14 | | | | 2009 |
| | | | (monocarboxylic acid | | | | |
| | | | transporter 14) | | | | |
| C7orf60 | NM_152556 | 1036 | chromosome 7 open | hsa-let-7a | −0.06 | 0.87 | 2005, |
| | | | reading frame 60 | | | | 2007, |
| | | | | | | | 2009 |
| FAM116A | NM_152678 | 1037 | family with sequence | hsa-miR- | −0.08 | 0.7 | |
| | | | similarity 116, | 4458 | | | |
| | | | member A | | | | |
| SENP5 | NM_152699 | 1038 | SUMO1/sentrin | hsa-miR- | −0.17 | 0.94 | 2005, |
| | | | specific peptidase 5 | 4458 | | | 2007, |
| | | | | | | | 2009 |
| HOXA9 | NM_152739 | 1039 | homeobox A9 | hsa-let-7d | −0.16 | 0.85 | 2005, |
| | | | | | | | 2007, |
| | | | | | | | 2009 |
| SDK1 | NM_152744 | 1040 | sidekick homolog 1, | hsa-miR- | −0.14 | 0.95 | |
| | | | cell adhesion | 4458 | | | |
| | | | molecule (chicken) | | | | |
| SCUBE3 | NM_152753 | 1041 | signal peptide, CUB | hsa-miR- | >−0.02 | 0.88 | 2005, |
| | | | domain, EGF-like 3 | 4458 | | | 2007, |
| | | | | | | | 2009 |
| RICTOR | NM_152756 | 1042 | RPTOR independent | hsa-miR- | −0.14 | 0.98 | 2007, |
| | | | companion of MTOR, | 4500 | | | 2009 |
| | | | complex 2 | | | | |
| YTHDF3 | NM_152758 | 1043 | YTH domain family, | hsa-miR- | −0.1 | 0.86 | 2005, |
| | | | member 3 | 4500 | | | 2007, |
| | | | | | | | 2009 |
| MFSD8 | NM_152778 | 1044 | major facilitator | hsa-miR-98 | −0.33 | 0.91 | |
| | | | superfamily domain | | | | |
| | | | containing 8 | | | | |
| COL24A1 | NM_152890 | 1045 | collagen, type XXIV, | hsa-let-7a | −0.19 | 0.92 | 2005, |
| | | | alpha 1 | | | | 2007, |
| | | | | | | | 2009 |
| UHRF2 | NM_152896 | 1046 | ubiquitin-like with | hsa-let-7d | −0.41 | 0.89 | 2005, |
| | | | PHD and ring finger | | | | 2007, |
| | | | domains 2 | | | | 2009 |
| PXT1 | NM_152990 | 1047 | peroxisomal, testis | hsa-let-7f | −0.54 | 0.93 | 2009 |
| | | | specific 1 | | | | |
| NPHP3 | NM_153240 | 1048 | nephronophthisis 3 | hsa-let-7f | −0.49 | >0.99 | 2009 |
| | | | (adolescent) | | | | |
| BRWD3 | NM_153252 | 1049 | bromodomain and | hsa-let-7i | −0.12 | 0.95 | |
| | | | WD repeat domain | | | | |
| | | | containing 3 | | | | |
| ATXN7L2 | NM_153340 | 1050 | ataxia 7-like 2 | hsa-miR- | −0.18 | 0.75 | 2007 |
| | | | | 4458 | | | |
| GPR26 | NM_153442 | 1051 | G protein-coupled | hsa-miR- | −0.17 | 0.95 | 2009 |
| | | | receptor 26 | 4500 | | | |
| LCORL | NM_153686 | 1052 | ligand dependent | hsa-miR- | −0.2 | 0.78 | 2007, |
| | | | nuclear receptor | 4458 | | | 2009 |
| | | | corepressor-like | | | | |
| FAM43A | NM_153690 | 1053 | family with sequence | hsa-miR- | −0.16 | 0.82 | 2009 |
| | | | similarity 43, member A | 4458 | | | |
| TTL | NM_153712 | 1054 | tubulin tyrosine ligase | hsa-miR- | −0.08 | 0.94 | 2007, |
| | | | | 4458 | | | 2009 |
| ATP2A2 | NM_170665 | 1055 | ATPase, Ca++ | hsa-miR- | −0.28 | 0.96 | 2005, |
| | | | transporting, cardiac | 4500 | | | 2007 |
| | | | muscle, slow twitch 2 | | | | |
| IL28RA | NM_170743 | 1056 | interleukin 28 | hsa-miR- | −0.17 | 0.72 | |
| | | | receptor, alpha | 4458 | | | |
| | | | (interferon, lambda | | | | |
| | | | receptor) | | | | |
| RDH10 | NM_172037 | 1057 | retinol dehydrogenase | hsa-miR-98 | −0.19 | 0.95 | 2005, |
| | | | 10 (all-trans) | | | | 2007, |
| | | | | | | | 2009 |
| DCUN1D3 | NM_173475 | 1058 | DCN1, defective in | hsa-miR- | −0.21 | 0.98 | 2007, |
| | | | cullin neddylation 1, | 4500 | | | 2009 |
| | | | domain containing 3 | | | | |
| | | | (S. cerevisiae) | | | | |
| LSM11 | NM_173491 | 1059 | LSM11, U7 small | hsa-let-7b | −0.35 | 0.94 | 2005, |
| | | | nuclear RNA | | | | 2007, |
| | | | associated | | | | 2009 |
| SLC38A9 | NM_173514 | 1060 | solute carrier family | hsa-miR- | −0.17 | 0.82 | 2005, |
| | | | 38, member 9 | 4458 | | | 2007 |
| KLHDC8B | NM_173546 | 1061 | kelch domain | hsa-miR- | −0.35 | 0.98 | 2009 |
| | | | containing 8B | 4458 | | | |
| RFX6 | NM_173560 | 1062 | regulatory factor X, 6 | hsa-let-7d | −0.24 | 0.95 | 2005, |
| | | | | | | | 2007, |
| | | | | | | | 2009 |
| PRR14L | NM_173566 | 1063 | proline rich 14-like | hsa-miR- | −0.03 | 0.9 | |
| | | | | 4458 | | | |
| UBN2 | NM_173569 | 1064 | ubinuclein 2 | hsa-miR- | >−0.02 | 0.94 | 2009 |
| | | | | 4458 | | | |
| PGM2L1 | NM_173582 | 1065 | phosphoglucomutase | hsa-miR- | −0.05 | >0.99 | 2005, |
| | | | 2-like 1 | 4458 | | | 2007, |
| | | | | | | | 2009 |
| ANKRD52 | NM_173595 | 1066 | ankyrin repeat | hsa-miR- | >−0.06 | 0.96 | 2009 |
| | | | domain 52 | 4458 | | | |
| RIMKLA | NM_173642 | 1067 | ribosomal | hsa-let-7b | −0.08 | <0.1 | |
| | | | modification protein | | | | |
| | | | rimK-like family | | | | |
| | | | member A | | | | |
| CCDC141 | NM_173648 | 1068 | coiled-coil domain | hsa-miR- | −0.17 | 0.95 | |
| | | | containing 141 | 4458 | | | |
| SLC9A9 | NM_173653 | 1069 | solute carrier family 9 | hsa-miR- | −0.11 | 0.89 | 2005, |
| | | | (sodium/hydrogen | 4458 | | | 2007, |
| | | | exchanger), member 9 | | | | 2009 |
| C3orf64 | NM_173654 | 1070 | chromosome 3 open | hsa-let-7d | −0.21 | >0.99 | 2007, |
| | | | reading frame 64 | | | | 2009 |
| CRB2 | NM_173689 | 1071 | crumbs homolog 2 | hsa-miR- | −0.12 | 0.93 | 2009 |
| | | | (Drosophila) | 4458 | | | |
| PRTG | NM_173814 | 1072 | protogenin | hsa-miR-98 | −0.56 | >0.99 | 2007, |
| | | | | | | | 2009 |
| SREK1IP1 | NM_173829 | 1073 | SREK1-interacting | hsa-let-7g | −0.12 | 0.95 | 2007, |
| | | | protein 1 | | | | 2009 |
| FAM84B | NM_174911 | 1074 | family with sequence | hsa-miR- | −0.13 | 0.58 | 2007 |
| | | | similarity 84, member B | 4500 | | | |
| ZPLD1 | NM_175056 | 1075 | zona pellucida-like | hsa-miR- | −0.2 | 0.94 | 2009 |
| | | | domain containing 1 | 4458 | | | |
| TXLNA | NM_175852 | 1076 | taxilin alpha | hsa-let-7b | −0.1 | 0.9 | 2009 |
| CHSY3 | NM_175856 | 1077 | chondroitin sulfate | hsa-miR- | −0.17 | 0.75 | 2007 |
| | | | synthase 3 | 4500 | | | |
| C19orf39 | NM_175871 | 1078 | chromosome 19 open | hsa-let-7d | −0.32 | 0.77 | |
| | | | reading frame 39 | | | | |
| ANKRD43 | NM_175873 | 1079 | ankyrin repeat | hsa-miR- | −0.22 | 0.94 | 2007, |
| | | | domain 43 | 4500 | | | 2009 |
| FLJ36031 | NM_175884 | 1080 | hypothetical protein | hsa-let-7g | −0.31 | 0.88 | 2007, |
| | | | FLJ36031 | | | | 2009 |
| C5orf51 | NM_175921 | 1081 | chromosome 5 open | hsa-miR- | −0.26 | 0.94 | 2005, |
| | | | reading frame 51 | 4458 | | | 2007, |
| | | | | | | | 2009 |
| PRR18 | NM_175922 | 1082 | proline rich 18 | hsa-miR- | −0.13 | 0.72 | |
| | | | | 4500 | | | |
| CXorf36 | NM_176819 | 1083 | chromosome X open | hsa-let-7e | −0.02 | 0.81 | |
| | | | reading frame 36 | | | | |
| PDE12 | NM_177966 | 1084 | phosphodiesterase 12 | hsa-let-7a | −0.25 | 0.98 | 2007, |
| | | | | | | | 2009 |
| SESTD1 | NM_178123 | 1085 | SEC14 and spectrin | hsa-miR- | −0.19 | 0.92 | |
| | | | domains 1 | 4500 | | | |
| SNAI3 | NM_178310 | 1086 | snail homolog 3 | hsa-let-7i | −0.18 | 0.56 | 2007 |
| | | | (Drosophila) | | | | |
| TMEM26 | NM_178505 | 1087 | transmembrane | hsa-miR- | −0.1 | 0.93 | 2009 |
| | | | protein 26 | 4458 | | | |
| NAT8L | NM_178557 | 1088 | N-acetyltransferase 8- | hsa-miR-98 | −0.05 | 0.94 | |
| | | | like (GCN5-related, | | | | |
| | | | putative) | | | | |
| RSPO2 | NM_178565 | 1089 | R-sporadin 2 | hsa-let-7d | −0.3 | 0.88 | 2007, |
| | | | | | | | 2009 |
| MTDH | NM_178812 | 1090 | metadherin | hsa-miR-98 | −0.1 | 0.95 | |
| AGPAT6 | NM_178819 | 1091 | 1-acylglycerol-3- | hsa-let-7d | −0.24 | 0.98 | |
| | | | phosphate O- | | | | |
| | | | acyltransferase 6 | | | | |
| | | | (lysophosphatidic | | | | |
| | | | acid acyltransferase, | | | | |
| | | | zeta) | | | | |
| MFSD4 | NM_181644 | 1092 | major facilitator | hsa-let-7a | −0.31 | 0.98 | |
| | | | superfamily domain | | | | |
| | | | containing 4 | | | | |
| TMTC3 | NM_181783 | 1093 | transmembrane and | hsa-miR- | −0.01 | 0.79 | |
| | | | tetratricopeptide | 4500 | | | |
| | | | repeat containing 3 | | | | |
| SLC46A3 | NM_181785 | 1094 | solute carrier family | hsa-miR- | −0.13 | 0.74 | |
| | | | 46, member 3 | 4500 | | | |
| USP12 | NM_182488 | 1095 | ubiquitin specific | hsa-let-7f | −0.37 | 0.9 | |
| | | | peptidase 12 | | | | |
| DDX26B | NM_182540 | 1096 | DEAD/H (Asp-Glu- | hsa-let-7f | −0.25 | 0.94 | 2009 |
| | | | Ala-Asp/His) box | | | | |
| | | | polypeptide 26B | | | | |
| GDPD1 | NM_182569 | 1097 | glycerophosphodiester | hsa-miR- | −0.19 | 0.94 | 2005, |
| | | | phosphodiesterase | 4458 | | | 2007, |
| | | | domain containing 1 | | | | 2009 |
| SP8 | NM_182700 | 1098 | Sp8 transcription | hsa-miR- | −0.16 | 0.92 | 2007, |
| | | | factor | 4458 | | | 2009 |
| ARRDC4 | NM_183376 | 1099 | arrestin domain | hsa-miR- | −0.15 | 0.94 | 2005, |
| | | | containing 4 | 4458 | | | 2007, |
| | | | | | | | 2009 |
| KIF1B | NM_183416 | 1100 | kinesin family | hsa-miR- | −0.07 | 0.88 | |
| | | | member 1B | 4458 | | | |
| TMEM65 | NM_194291 | 1101 | transmembrane | hsa-miR- | −0.2 | 0.94 | 2007, |
| | | | protein 65 | 4500 | | | 2009 |
| SLC16A9 | NM_194298 | 1102 | solute carrier family | hsa-miR- | −0.25 | 0.9 | 2009 |
| | | | 16, member 9 | 4458 | | | |
| | | | (monocarboxylic acid | | | | |
| | | | transporter 9) | | | | |
| E2F6 | NM_198256 | 1103 | E2F transcription | hsa-let-7c | −0.21 | 0.98 | 2007, |
| | | | factor 6 | | | | 2009 |
| ANKRD46 | NM_198401 | 1104 | ankyrin repeat | hsa-miR- | −0.19 | 0.87 | 2009 |
| | | | domain 46 | 4458 | | | |
| NRK | NM_198465 | 1105 | Nik related kinase | hsa-let-7i | −0.07 | 0.94 | 2005, |
| | | | | | | | 2007, |
| | | | | | | | 2009 |
| NHLRC2 | NM_198514 | 1106 | NHL repeat | hsa-let-7d | −0.08 | 0.83 | |
| | | | containing 2 | | | | |
| ZNF710 | NM_198526 | 1107 | zinc finger protein | hsa-let-7d | −0.24 | >0.99 | 2003, |
| | | | 710 | | | | 2007, |
| | | | | | | | 2009 |
| TMEM110 | NM_198563 | 1108 | transmembrane | hsa-miR- | −0.24 | 0.94 | 2007, |
| | | | protein 110 | 4458 | | | 2009 |
| RAB15 | NM_198686 | 1109 | RAB15, member | hsa-miR- | −0.16 | 0.94 | 2005, |
| | | | RAS onocogene | 4458 | | | 2007, |
| | | | family | | | | 2009 |
| DHX57 | NM_198963 | 1110 | DEAH (Asp-Glu-Ala- | hsa-miR- | −0.25 | 0.88 | 2005, |
| | | | Asp/His) box | 4500 | | | 2007, |
| | | | polypeptide 57 | | | | 2009 |
| MED8 | NM_201542 | 1111 | mediator complex | hsa-let-7f | −0.42 | 0.92 | |
| | | | subunit 8 | | | | |
| ZNF784 | NM_203374 | 1112 | zinc finger protein | hsa-miR- | −0.21 | 0.83 | 2009 |
| | | | 784 | 4458 | | | |
| PPAPDC2 | NM_203453 | 1113 | phosphatidic acid | hsa-miR- | −0.2 | 0.94 | 2007, |
| | | | phosphatase type 2 | 4500 | | | 2009 |
| | | | domain containing 2 | | | | |
| SPRYD4 | NM_207344 | 1114 | SPRY domain | hsa-miR- | −0.2 | 0.94 | 2007, |
| | | | containing 4 | 4458 | | | 2009 |
| FREM2 | NM_207361 | 1115 | FRAS1 related | hsa-miR- | −0.07 | 0.94 | 2009 |
| | | | extracellular matrix | 4458 | | | |
| | | | protein 2 | | | | |
| C10orf140 | NM_207371 | 1116 | chromosome 10 open | hsa-let-7d | −0.13 | 0.85 | 2005, |
| | | | reading frame 140 | | | | 2007, |
| | | | | | | | 2009 |

TABLE S3
3′ UTR sequences.

Human FNTB
5′AGGACCTGGGTCCCGGCAGCTCTTTGCTCACCCATCTCCCCAGTCAGA
CAAGGTTTATACGTTTCAATACATACTGCATTCTGTGCTACACAAGCCTT
AGCCTCAGTGGAGCTGTGGTTCTCTTGGTACTTTCTTGTCAAACAAAACC
AATGGCTCTGGGTTTGGAGAACACAGTGGCTGGTTTTAAAAATTCTTTCC
ACACCTGTCAAACCAAAAATCTATCAGCCCACGTGGTGTGGTTGGTGAAC
AGTGCATGCCAGGAGGAAGCAGTCCCTCCTCACCAGCTCTCCAGCCAGGA
CGATCACACAGAGATGAATGGCATCTGAGTATTACGGCATCCAGAGCCAC
TGCTGACTCCCACTTGCACGCCACCATTCAGTCACCAGACTGGGTGCCCT
CCGATGGGTGGAATAAGTCTGCTTCATGCCAAGGCTGGGCTTTGGGTCCC
ACCAAGATGAGTTCTCTGTAAGACTGTGGTGGAGTTGCACCAGGAGGTGC
CTCTGCCTCTCGACTTGCACCCTGGTCATTTGTAAGGGAAAAGAGCTGGA
GGTGGGGAGAGAAAGATCTCCTTCAGTTGGGAGTCCTTCCACTTCAACAC
TGGAGAACTGAGCCTTGCATCTCTCCAGGGTCCAAGGCCACGCTTGGTGC
ACAGGCAAGACTTGCTTCAGCCCCAGGTGTGGTGACTTAGACCTAGGAAA
CCAATTATGAGTGGAAAGTGACCCTCTAGTTCAACTGTGCCAGAGGAAAC
AGCCCTCCAGTGCCCACCTGCCTCACTCCTCCCTATCATGTACCGTGAAA
ACCCCCTCTGATGGCCTCAAGGCAGTGCCTGCAGGCCGAGGCCCTTCTGG
GGGTTTCTATCTTTCTTCCACCAGACTCCAAGCCCACTCTCCTCCAAGAC
TGTGTTGTCTTTTCTCACCAAGAGTATTAACACTACTAAGTCTTTCACCT
TAACTTATGACTCAGGATTTATTCACGTCCTGCCCACTCTAGGCTCACAG
GAATAAAATCAAGTGCTAGACACACTGGCTGCTACTAAGGCACTAGCCTC
TGTAGCTGGTGGTGGCAGCGTGGGGTGCCGCCCAGCGTGCTGGGTCCTGG
CAGTGCCTCTGCTGTGCTGCACATTGAGCCCTTTCTCAGTCAGTGGAGTA
TCAAGTTGGGCCATCTGTCTACTGACCTGGCCTTCATGTAAGCAGCTGTG
GGCTGCGGGCAGACAGGAGCTCAGAGATGCAGCATGAGGCGCTTAGAAAA
ACCTGGCCATTTGCTGCCTCTAATTCCCTTTTGCTTTG-3′
(SEQ ID NO: 1117)
Zebrafish Fntb
5′ACTATCTATTTTTCAACTGTAAACATATTGGGGGATTTGGGCTAGCTT
GAACTGTGCAGAGGAATCTTCTGTAAATGCTGTAGCCAAATGTCCTTTGC
TGGTGTGTACAGCGTCTACAGATGGAGAAACACTCTGAGGCCTGATCTGC
TGCTGCTTCAGCATGAGGTTATGGGTTTTAGCCAGGATAAACAGTAGAGA
CTGACTAGGTAAGGTGTTTTTTCATGCACCAGTCATTGATTGATATTTTA
TTGCACATGCCAGCTTATTTTGGGCAAAATGTTCCCAGAGTGTACGTGGC
AGTGGGTTCTGGACAGAAATAAAGACTTGGATGGAAA-3′
(SEQ ID NO: 1118)
Zebrafish Smarca5
5′GCAGGCAGGCATTTCACACACCTCACTCGGCGAGGAGCTTCAGTACAG
CAATACTGCATTGATTGTTACGGGTCCCACTCATGTACTGTATGGATTTG
CAGCACTGATCCTCGCCTCTCAAGTAGCTTGGCCTTCTTAACAAGGTGTA
GAGTTGTAAATTAGGTCTCTTTTAGTTATATAATGTAACTACGGCTGTGC
TGTCGGATGTGTTTTGTATTTATGGCTACTTCAAATTTTTTTTTGTACCA
CATTCCATTTGCTTGTATCAGTTTAATTTGCAGTCTTTACCCCCTCATTA
TTAGTGTCTTCAGTATTGTATTGTCTCTGTATCCGCCATTGGAAAGTGAC
TAATAAATGTGGTTTTTATAAATGCTGCTCTGTATGTTTCCTACAAATAA
ATGTAATGTCTTTTGCCTTGTA-3′ (SEQ ID NO: 1119)

TABLE S4
MiR mimics and antagomiR sequences.

| miRs used | Sequence |
|---|---|
| Dre-miR-100 mimic | 5′-AACCCGUAGAUCCGAACUUGUG-3′ |
| | (SEQ ID NO: 1120) |
| | 5′-CAAGCUUGUAUCUAUAGGUAUC-3′ |
| | (SEQ ID NO: 1121) |
| Dre-miR-99 mimic | 5′-AACCCGUAGAUCCGAUCUUGUG-3′ |
| | (SEQ ID NO: 1122) |
| | 5′-CAAGCUCGAUUCUAUGGGUCUC-3′ |
| | (SEQ ID NO: 1123) |
| Dre-miR-99 | 5′-ACAAGTTCGGATCTACGGGT-3′ |
| inhibitor | (SEQ ID NO: 1124) |
| Dre-miR-100 | 5′-ACAAGATCGGATCTACGGGT-3′ |
| inhibitor | (SEQ ID NO: 1125) |
| GFP siRNA (delivery | 5′-GGCUACGUCCAGGAGCGCACC-3′ |
| control) | (SEQ ID NO: 1126) |
| | 5′-GGUGCGCUCCUGGACGUAGCC-3′-Cy5 |
| | (SEQ ID NO: 1127) |
| Fntb morpholino | 5′-GCGCCTCTTCCATGATGAGCTCTCA-3′ |
| (translation- | (SEQ ID NO: 1128) |
| blocking) | |
| Smarca5 morpholino | 5′-CTTCTTCCCGCTGCTGCTCCATGCT-3′ |
| (translation- | (SEQ ID NO: 1129) |
| blocking) | |

The application's sequence listing, which the Patent Office published only in electronic form, follows.

SEQUENCE LISTING (1141 sequences)

SEQ ID NO: 1 - DNA, 4304 bp, Homo sapiens
gtcgcgggcagctggcgccgcgcggtcctgctctgccggtcgcacggacgcaccggcgggccgccggccggagggacggggcgggagctgggcccgcggacagcgagccggagcgggagccgcgcgtagcgagccgggctccggcgctcgccagtctcccgagcggcgcccgcctcccgccggtgcccgcgccgggccgtggggggcagcatgcccgcgcgcgctgcctgaggacgccgcggcccccgcccccgccatgggcgcccctgcctgcgccctcgcgctctgcgtggccgtggccatcgtggccggcgcctcctcggagtccttggggacggagcagcgcgtcgtggggcgagcggcagaagtcccgggcccagagcccggccagcaggagcagttggtcttcggcagcggggatgctgtggagctgagctgtcccccgcccgggggtggtcccatggggcccactgtctgggtcaaggatggcacagggctggtgccctcggagcgtgtcctggtggggccccagcggctgcaggtgctgaatgcctcccacgaggactccggggcctacagctgccggcagcggctcacgcagcgcgtactgtgccacttcagtgtgcgggtgacagacgctccatcctcgggagatgacgaagacggggaggacgaggctgaggacacaggtgtggacacaggggccccttactggacacggcccgagcggatggacaagaagctgctggccgtgccggccgccaacaccgtccgcttccgctgcccagccgctggcaaccccactccctccatctcctggctgaagaacggcagggagttccgcggcgagcaccgcattggaggcatcaagctgcggcatcagcagtggagcctggtcatggaaagcgtggtgccctcggaccgcggcaactacacctgcgtcgtggagaacaagtttggcagcatccggcagacgtacacgctggacgtgctggagcgctccccgcaccggcccatcctgcaggcggggctgccggccaaccagacggcggtgctgggcagcgacgtggagttccactgcaaggtgtacagtgacgcacagccccacatccagtggctcaagcacgtggaggtgaatggcagcaaggtgggcccggacggcacaccctacgttaccgtgctcaagacggcgggcgctaacaccaccgacaaggagctagaggttctctccttgcacaacgtcacctttgaggacgccggggagtacacctgcctggcgggcaattctattgggttttctcatcactctgcgtggctggtggtgctgccagccgaggaggagctggtggaggctgacgaggcgggcagtgtgtatgcaggcatcctcagctacggggtgggcttcttcctgttcatcctggtggtggcggctgtgacgctctgccgcctgcgcagcccccccaagaaaggcctgggctcccccaccgtgcacaagatctcccgcttcccgctcaagcgacaggtgtccctggagtccaacgcgtccatgagctccaacacaccactggtgcgcatcgcaaggctgtcctcaggggagggccccacgctggccaatgtctccgagctcgagctgcctgccgaccccaaatgggagctgtctcgggcccggctgaccctgggcaagccccttggggagggctgcttcggccaggtggtcatggcggaggccatcggcattgacaaggaccgggccgccaagcctgtcaccgtagccgtgaagatgctgaaagacgatgccactgacaaggacctgtcggacctggtgtctgagatggagatgatgaagatgatcgggaaacacaaaaacatcatcaacctgctgggcgcctgcacgcagggcgggcccctgtacgtgctggtggagtacgcggccaagggtaacctgcgggagtttctgcgggcgcggcggcccccgggcctggactactccttcgacacctgcaagccgcccgaggagcagctcaccttcaaggacctggtgtcctgtgcctaccaggtggcccggggcatggagtacttggcctcccagaagtgcatccacagggacctggctgcccgcaatgtgctggtgaccgaggacaacgtgatgaagatcgcagacttcgggctggcccgggacgtgcacaacctcgactactacaagaagacaaccaacggccggctgcccgtgaagtggatggcgcctgaggccttgtttgaccgagtctacactcaccagagtgacgtctggtcctttggggtcctgctctgggagatcttcacgctggggggctccccgtaccccggcatccctgtggaggagctcttcaagctgctgaaggagggccaccgcatggacaagcccgccaactgcacacacgacctgtacatgatcatgcgggagtgctggcatgccgcgccctcccagaggcccaccttcaagcagctggtggaggacctggaccgtgtccttaccgtgacgtccaccgacgagtacctggacctgtcggcgcctttcgagcagtactccccgggtggccaggacacccccagctccagctcctcaggggacgactccgtgtttgcccacgacctgctgcccccggccccacccagcagtgggggctcgcggacgtgaagggccactggtccccaacaatgtgaggggtccctagcagcccaccctgctgctggtgcacagccactccccggcatgagactcagtgcagatggagagacagctacacagagctttggtctgtgtgtgtgtgtgtgcgtgtgtgtgtgtgtgtgtgcacatccgcgtgtgcctgtgtgcgtgcgcatcttgcctccaggtgcagaggtaccctgggtgtccccgctgctgtgcaacggtctcctgactggtgctgcagcaccgaggggcctttgttctggggggacccagtgcagaatgtaagtgggcccacccggtgggacccccgtggggcagggagctgggcccgacatggctccggcctctgcctttgcaccacgggacatcacagggtgggcctcggcccctcccacacccaaagctgagcctgcagggaagccccacatgtccagcaccttgtgcctggggtgttagtggcaccgcctccccacctccaggctttcccacttcccaccctgcccctcagagactgaaattacgggtacctgaagatgggagcctttaccttttatgcaaaaggtttattccggaaactagtgtacatttctataaatagatgctgtgtatatggtatatatacatatatatatataacatatatggaagaggaaaaggctggtacaacggaggcctgcgaccctgggggcacaggaggcaggcatggccctgggcggggcgtgggggggcgtggagggaggccccagggggtctcacccatgcaagcagaggaccagggccttttctggcaccgcagttttgttttaaaactggacctgtatatttgtaaagctatttatgggcccctggcactcttgttcccacaccccaacacttccagcatttagctggccacatggcggagagttttaatttttaacttattgacaaccgagaaggtttatcccgccgatagagggacggccaagaatgtacgtccagcctgccccggagctggaggatcccctccaagcctaaaaggttgttaatagttggaggtgattccagtgaagatattttatttcctttgtcctttttcaggagaattagatttctataggatttttctttaggagatttattttttggacttcaaagcaagctggtattttcatacaaattcttctaattgctgtgtgtcccaggcagggagacggtttccagggaggggccggccctgtgtgcaggttccgatgttattagatgttacaagtttatatatatctatatatataatttattgagtttttacaagatgtatttgttgtagacttaacacttcttacgcaatgcttctagagttttatagcctggactgctacctttcaaagcttggagggaagccgtgaattcagttggttcgttctgtactgttactgggccctgagtctgggcagctgtcccttgcttgcctgcagggccatggctcagggtggtctcttcttggggcccagtgcatggtggccagaggtgtcacccaaaccggcaggtgcgattttgttaacccagcgacgaactttccgaaaaataaagacacctggttgctaacctggaaaaaaaaaaaaaaaaa

SEQ ID NO: 2 - DNA, 11242 bp, Homo sapiens
ttttttttttttttttttgagaaaggggaatttcatcccaaataaaaggaatgaagtctggctccggaggagggtccccgacctcgctgtgggggctcctgtttctctccgccgcgctctcgctctggccgacgagtggagaaatctgcgggccaggcatcgacatccgcaacgactatcagcagctgaagcgcctggagaactgcacggtgatcgagggctacctccacatcctgctcatctccaaggccgaggactaccgcagctaccgcttccccaagctcacggtcattaccgagtacttgctgctgttccgagtggctggcctcgagagcctcggagacctcttccccaacctcacggtcatccgcggctggaaactcttctacaactacgccctggtcatcttcgagatgaccaatctcaaggatattgggctttacaacctgaggaacattactcggggggccatcaggattgagaaaaatgctgacctctgttacctctccactgtggactggtccctgatcctggatgcggtgtccaataactacattgtggggaataagcccccaaaggaatgtggggacctgtgtccagggaccatggaggagaagccgatgtgtgagaagaccaccatcaacaatgagtacaactaccgctgctggaccacaaaccgctgccagaaaatgtgcccaagcacgtgtgggaagcgggcgtgcaccgagaacaatgagtgctgccaccccgagtgcctgggcagctgcagcgcgcctgacaacgacacggcctgtgtagcttgccgccactactactatgccggtgtctgtgtgcctgcctgcccgcccaacacctacaggtttgagggctggcgctgtgtggaccgtgacttctgcgccaacatcctcagcgccgagagcagcgactccgaggggtttgtgatccacgacggcgagtgcatgcaggagtgcccctcgggcttcatccgcaacggcagccagagcatgtactgcatcccttgtgaaggtccttgcccgaaggtctgtgaggaagaaaagaaaacaaagaccattgattctgttacttctgctcagatgctccaaggatgcaccatcttcaagggcaatttgctcattaacatccgacgggggaataacattgcttcagagctggagaacttcatggggctcatcgaggtggtgacgggctacgtgaagatccgccattctcatgccttggtctccttgtccttcctaaaaaaccttcgcctcatcctaggagaggagcagctagaagggaattactccttctacgtcctcgacaaccagaacttgcagcaactgtgggactgggaccaccgcaacctgaccatcaaagcagggaaaatgtactttgctttcaatcccaaattatgtgtttccgaaatttaccgcatggaggaagtgacggggactaaagggcgccaaagcaaaggggacataaacaccaggaacaacggggagagagcctcctgtgaaagtgacgtcctgcatttcacctccaccaccacgtcgaagaatcgcatcatcataacctggcaccggtaccggccccctgactacagggatctcatcagcttcaccgtttactacaaggaagcaccctttaagaatgtcacagagtatgatgggcaggatgcctgcggctccaacagctggaacatggtggacgtggacctcccgcccaacaaggacgtggagcccggcatcttactacatgggctgaagccctggactcagtacgccgtttacgtcaaggctgtgaccctcaccatggtggagaacgaccatatccgtggggccaagagtgagatcttgtacattcgcaccaatgcttcagttccttccattcccttggacgttctttcagcatcgaactcctcttctcagttaatcgtgaagtggaaccctccctctctgcccaacggcaacctgagttactacattgtgcgctggcagcggcagcctcaggacggctacctttaccggcacaattactgctccaaagacaaaatccccatcaggaagtatgccgacggcaccatcgacattgaggaggtcacagagaaccccaagactgaggtgtgtggtggggagaaagggccttgctgcgcctgccccaaaactgaagccgagaagcaggccgagaaggaggaggctgaataccgcaaagtctttgagaatttcctgcacaactccatcttcgtgcccagacctgaaaggaagcggagagatgtcatgcaagtggccaacaccaccatgtccagccgaagcaggaacaccacggccgcagacacctacaacatcaccgacccggaagagctggagacagagtaccctttctttgagagcagagtggataacaaggagagaactgtcatttctaaccttcggcctttcacattgtaccgcatcgatatccacagctgcaaccacgaggctgagaagctgggctgcagcgcctccaacttcgtctttgcaaggactatgcccgcagaaggagcagatgacattcctgggccagtgacctgggagccaaggcctgaaaactccatctttttaaagtggccggaacctgagaatcccaatggattgattctaatgtatgaaataaaatacggatcacaagttgaggatcagcgagaatgtgtgtccagacaggaatacaggaagtatggaggggccaagctaaaccggctaaacccggggaactacacagcccggattcaggccacatctctctctgggaatgggtcgtggacagatcctgtgttcttctatgtccaggccaaaacaggatatgaaaacttcatccatctgatcatcgctctgcccgtcgctgtcctgttgatcgtgggagggttggtgattatgctgtacgtcttccatagaaagagaaataacagcaggctggggaatggagtgctgtatgcctctgtgaacccggagtacttcagcgctgctgatgtgtacgttcctgatgagtgggaggtggctcgggagaagatcaccatgagccgggaacttgggcaggggtcgtttgggatggtctatgaaggagttgccaagggtgtggtgaaagatgaacctgaaaccagagtggccattaaaacagtgaacgaggccgcaagcatgcgtgagaggattgagtttctcaacgaagcttctgtgatgaaggagttcaattgtcaccatgtggtgcgattgctgggtgtggtgtcccaaggccagccaacactggtcatcatggaactgatgacacggggcgatctcaaaagttatctccggtctctgaggccagaaatggagaataatccagtcctagcacctccaagcctgagcaagatgattcagatggccggagagattgcagacggcatggcatacctcaacgccaataagttcgtccacagagaccttgctgcccggaattgcatggtagccgaagatttcacagtcaaaatcggagattttggtatgacgcgagatatctatgagacagactattaccggaaaggagggaaagggctgctgcccgtgcgctggatgtctcctgagtccctcaaggatggagtcttcaccacttactcggacgtctggtccttcggggtcgtcctctgggagatcgccacactggccgagcagccctaccagggcttgtccaacgagcaagtccttcgcttcgtcatggagggcggccttctggacaagccagacaactgtcctgacatgctgtttgaactgatgcgcatgtgctggcagtataaccccaagatgaggccttccttcctggagatcatcagcagcatcaaagaggagatggagcctggcttccgggaggtctccttctactacagcgaggagaacaagctgcccgagccggaggagctggacctggagccagagaacatggagagcgtccccctggacccctcggcctcctcgtcctccctgccactgcccgacagacactcaggacacaaggccgagaacggccccggccctggggtgctggtcctccgcgccagcttcgacgagagacagccttacgcccacatgaacgggggccgcaagaacgagcgggccttgccgctgccccagtcttcgacctgctgatccttggatcctgaatctgtgcaaacagtaacgtgtgcgcacgcgcagcggggtggggggggagagagagttttaacaatccattcacaagcctcctgtacctcagtggatcttcagaactgcccttgctgcccgcgggagacagcttctctgcagtaaaacacatttgggatgttccttttttcaatatgcaagcagctttttattccctgcccaaacccttaactgacatgggcctttaagaaccttaatgacaacacttaatagcaacagagcacttgagaaccagtctcctcactctgtccctgtccttccctgttctccctttctctctcctctctgcttcataacggaaaaataattgccacaagtccagctgggaagccctttttatcagtttgaggaagtggctgtccctgtggccccatccaaccactgtacacacccgcctgacaccgtgggtcattacaaaaaaacacgtggagatggaaatttttacctttatctttcacctttctagggacatgaaatttacaaagggccatcgttcatccaaggctgttaccattttaacgctgcctaattttgccaaaatcctgaactttctccctcatcggcccggcgctgattcctcgtgtccggaggcatgggtgagcatggcagctggttgctccatttgagagacacgctggcgacacactccgtccatccgactgcccctgctgtgctgctcaaggccacaggcacacaggtctcattgcttctgactagattattatttgggggaactggacacaataggtctttctctcagtgaaggtggggagaagctgaaccggcttccctgccctgcctccccagccccctgcccaacccccaagaatctggtggccatgggccccgaagcagcctggcggacaggcttggagtcaaggggccccatgcctgcttctctcccagccccagctcccccgcccgcccccaaggacacagatgggaaggggtttccagggactcagccccactgttgatgcaggtttgcaaggaaagaaattcaaacaccacaacagcagtaagaagaaaagcagtcaatggattcaagcattctaagctttgttgacattttctctgttcctaggacttcttcatgggtcttacagttctatgttagaccatgaaacatttgcatacacatcgtctttaatgtcacttttataacttttttacggttcagatattcatctatacgtctgtacagaaaaaaaaaagctgctattttttttgttcttgatctttgtggatttaatctatgaaaaccttcaggtccaccctctcccctttctgctcactccaagaaacttcttatgctttgtactagagtgcgtgactttcttcctcttttcccggtaatggatacttctatcacataatttgccatgaactgttggatgcctttttataaatacatcccccatccctgctcccacctgcccctttagttgttttctaacccgtaggctctctgggcacgaggcagaaagcaggccgggcacccatcctgagagggccgcgctcctctccccagcctgccctcacagcattggagcctgttacagtgcaagacatgatacaaactcaggtcagaaaaacaaaggttaaatatttcacacgtctttgttcagtgtttccactcaccgtggttgagaagcctcaccctctctttcccttgcctttgcttaggttgtgacacacatatatatatatttttttaattcttgggtacaacagcagtgttaaccgcagacactaggcatttggattactatttttcttaatggctatttaatccttccatcccacgaaaaacagctgctgagtccaagggagcagcagagcgtggtccggcagggcctgttgtggccctcgccacccccctcaccggaccgactgacctgtctttggaaccagaacatcccaagggaactccttcgcactggcgttgagtgggaccccgggatccaggctggcccagggcggcaccctcagggctgtgcccgctggagtgctaggtggaggcagcacagacgccacggtggcccaagagcccctttgcttcttgctgggggaccagggctgtggtgctggcccactttccctcggccaggaatccaggtccttggggcccaggggtcttgtcttgtttcatttttagcacttctcaccagagagatgacagcacaagagttgcttctgggatagaaatgtttaggagtaagaacaaagctgggatacggtgattgctagttgtgactgaagattcaacacagaaaagaaagtttatacggcttttttgctggtcagcagtttgtcccactgctttctctagtctctatcccatagcgtgttccctttaaaaaaaaaaaaaaggtattatatgtaggagttttcttttaatttattttgtgataaattaccagtttcaatcactgtagaaaagccccattatgaatttaaatttcaaggaaagggtgtgtgtgtgtgtatgtgtggggtgtgtgtgtgtgagagtgatgggacagttcttgattttttgggttttttttcccccaaacatttatctacctcactcttattttttatatgtgtatatagacaaaagaatacatctcacctttctcagcacctgacaataggccgttgatactggtaacctcatccacgccacaggcgccacacccaggtgatgcagggggaagccaggctgtattccggggtcaaagcaacactaactcacctctctgctcatttcagacagcttgcctttttctgagatgtcctgttttgtgttgctttttttgttttgttttctatcttggtttccaccaaggtgttagatttctcctcctcctagccaggtggccctgtgaggccaacgagggcaccagagcacacctgggggagccaccaggctgtccctggctggttgtctttggaacaaactgcttctgtgcagatggaatgaccaacacatttcgtccttaagagagcagtggttcctcaggttctgaggagaggaaggtgtccaggcagcaccatctctgtgcgaatccccagggtaaaggcgtggggcattgggtttgctccccttgctgctgctccatccctgcaggaggctcgcgctgaggcaggaccgtgcggccatggctgctgcattcattgagcacaaaggtgcagctgcagcagcagctggagagcaagagtcacccagcctgtgcgccagaatgcagaggctcctgacctcacagccagtccctgatagaacacacgcaggagcagagtcccctccccctccaggctgccctctcaacttctccctcacctccttccctaggggtagacagagatgtaccaaaccttccggctggaaagcccagtggccggcgccgaggctcgtggcgtcacgccccccccgccagggctgtacctccgtctccctggtcctgctgctcacaggacagacggctcgctcccctcttccagcagctgctcttacaggcactgatgatttcgctgggaagtgtggcgggcagctttgcctaagcgtggatggctcctcggcaattccagcctaagtgaaggcgctcaggagcctcctgctggaacgcgacccatctctcccaggaccccggggatcttaaggtcattgagaaatactgttggatcagggttttgttcttccacactgtaggtgaccccttggaataacggcctctcctctcgtgcacatacctaccggtttccacaactggatttctacagatcattcagctggttataagggttttgtttaaactgtccgagttactgatgtcattttgtttttgttttatgtaggtagcttttaagtagaaaacactaacagtgtagtgcccatcatagcaaatgcttcagaaacacctcaataaaagagaaaacttggcttgtgtgatggtgcagtcactttactggaccaacccacccaccttgactataccaaggcatcatctatccacagttctagcctaacttcatgctgatttctctgcctcttgatttttctctgtgtgttccaaataatcttaagctgagttgtggcattttccatgcaacctccttctgccagcagctcacactgcttgaagtcatatgaaccactgaggcacatcatggaattgatgtgagcattaagacgttctcccacacagcccttccctgaggcagcaggagctggtgtgtactggagacactgttgaacttgatcaagacccagaccaccccaggtctccttcgtgggatgtcatgacgtttgacatacctttggaacgagcctcctccttggaagatggaagaccgtgttcgtggccgacctggcctctcctggcctgtttcttaagatgcggagtcacatttcaatggtacgaaaagtggcttcgtaaaatagaagagcagtcactgtggaactaccaaatggcgagatgctcggtgcacattggggtgctttgggataaaagatttatgagccaactattctctggcaccagattctaggccagtttgttccactgaagcttttcccacagcagtccacctctgcaggctggcagccgaatggcttgccagtggctctgtggcaagatcacactgagatcgatgggtgagaaggctaggatgcttgtctagtgttcttagctgtcacgttggctccttccagggtggccagacggtgttggccactcccttctaaaacacaggcgccctcctggtgacagtgacccgccgtggtatgccttggcccattccagcagtcccagttatgcatttcaagtttggggtttgttcttttcgttaatgttcctctgtgttgtcagctgtcttcatttcctgggctaagcagcattgggagatgtggaccagagatccactccttaagaaccagtggcgaaagacactttctttcttcactctgaagtagctggtggtacaaatgagaacttcaagagaggatgttatttagactgaacctctgttgccagagatgctgaagatacagaccttggacaggtcagagggtttcatttttggccttcatcttagatgactggttgcgtcatttggagaagtgagtgctccttgatggtggaatgaccgggtggtgggtacagaaccattgtcacagggatcctggcacagagaagagttacgagcagcagggtgcagggcttggaaggaatgtgggcaaggttttgaacttgattgttcttgaagctatcagaccacatcgaggctcagcagtcatccgtgggcatttggtttcaacaaagaaacctaacatcctactctggaaactgatctcggagttaaggcgaattgttcaagaacacaaactacatcgcactcgtcagttgtcagttctggggcatgactttagcgttttgtttctgcgagaacataacgatcactcatttttatgtcccacgtgtgtgtgtccgcatctttctggtcaacattgttttaactagtcactcattagcgttttcaatagggctcttaagtccagtagattacgggtagtcagttgacgaagatctggtttacaagaactaattaaatgtttcattgcatttttgtaagaacagaataattttataaaatgtttgtagtttataattgccgaaaataatttaaagacactttttttttctctgtgtgtgcaaatgtgtgtttgtgatccattttttttttttttttttaggacacctgtttactagctagctttacaatatgccaaaaaaggatttctccctgaccccatccgtggttcaccctcttttccccccatgctttttgccctagtttataacaaaggaatgatgatgatttaaaaagtagttctgtatcttcagtatcttggtcttccagaaccctctggttgggaaggggatcattttttactggtcatttccctttggagtgtagctactttaacagatggaaagaacctcattggccatggaaacagccgaggtgttggagcccagcagtgcatggcaccgttcggcatctggcttgattggtctggctgccgtcattgtcagcacagtgccatggacatgggaagacttgactgcacagccaatggttttcatgatgattacagcatacacagtgatcacataaacgatgacagctatggggcacacaggccatttgcttacatgcctcgtatcatgactgattactgctttgttagaacacagaagagaccctattttatttaaggcagaaccccgaagatacgtatttccaatacagaaaagaatttttaataaaaactataacatacacaaaaattggttttaaagttgactccacttcctctaactccagtggattgttggccatgtctccccaactccacaatatctctatcatgggaaacacctggggtttttgcgctacataggagaaagatctggaaactatttgggttttgttttcaacttttcatttggatgtttggcgttgcacacacacatccaccggtggaagagacgcccggtgaaaacacctgtctgctttctaagccagtgaggttgaggtgagaggtttgccagagtttgtctacctctgggtatccctttgtctgggataaaaaaaatcaaaccagaaggcgggatggaatggatgcaccgcaaataatgcattttctgagttttcttgttaaaaaaaaatttttttaagtaagaaaaaaaaaggtaataacatggccaatttgttacataaaatgactttctgtgtataaattattcctaaaaaatcctgtttatataaaaaatcagtagatgaaaaaaatttcaaaatgtttttgtatattctgttgtaagaatttattcctgttattgcgatatactctggattctttacataatggaaaaaagaaactgtctattttgaatggctgaagctaaggcaacgttagtttctcttactctgcttttttctagtaaagtactacatggtttaagttaaataaaataattctgtatgca

SEQ ID NO: 3 - DNA, 4676 bp, Homo sapiens
aggagcggcgcggggaggcagaggcgagcgcgggcgatcgcggcggcgggacgtctccggcggccgcggcaccagcggcggcgctctgtgtggagaagcaggggcagcggcagcagcaacagcggcagcggcagcagcagcggcagcagcggcggccgcctctccgccgccggggacgccaaggtgcggctggtggcactgacatcggcggccctgcctctcctccctcgcccccggccttccccatgtgatcggtcttaatcctggccgtgtgtgcgcgcgtggggctccattccgcggtgctgggtctccgtgccggggtgggtgctcgtgtgtgcgcttctcctccccatcccccttcccccaagaataaaagaagaaccgggaggcgtgctcagaaaataaataaataaccaccacacacgcgcagcccggagcgagtcggcggggctggcggcagcggcggaggaggagtgaaggcggcggcggcggaggagggacgcgcggaaaaggcagcaactttaaagccagctcagagcctagacctccagccgagcggtttgcagcgcggcggcggcggcggcggcggcggcgttgagtgtctggcccgccggtccggtcggggtgtgcagtcggacggacgagcagcgcgtcgctgtcctccggcagctggagatgtccgagcccaaggcaattgatcccaagttgtcgacgaccgacagggtggtgaaagctgttccatttcctccaagtcaccggcttacagcaaaagaagtgtttgataatgatggaaaacctcgtgtggatatcttaaaggcgcatcttatgaaggagggaaggctggaagagagtgttgcattgagaataataacagagggtgcatcaattcttcgacaggaaaaaaatttgctggatattgatgcgccagtcactgtttgtggggacattcatggacaattctttgatttgatgaagctctttgaagtcgggggatctcctgccaacactcgctacctcttcttaggggactatgttgacagagggtacttcagtattgaatgtgtgctgtatttgtgggccttgaaaattctctaccccaaaacactgtttttacttcgtggaaatcatgaatgtagacatctaacagagtatttcacatttaaacaagaatgtaaaataaagtattcagaacgcgtatatgatgcctgtatggatgcctttgactgccttcccctggctgccctgatgaaccaacagttcctgtgtgtgcatggtggtttgtctccagagattaacactttagatgatatcagaaaattagaccgattcaaagaaccacctgcatatggacctatgtgtgatatcctgtggtcagaccccctggaagattttggaaatgagaagactcaggaacatttcactcacaacacagtcagggggtgttcatacttctacagttacccggctgtatgtgaattcttacagcacaataacttgttatctatactccgagcccacgaagcccaagatgcagggtaccgcatgtacaggaaaagccaaacaacaggcttcccttctctaattacaattttttcagcaccaaattacttagatgtatacaataacaaagctgcagtattgaagtatgagaacaatgttatgaatatcaggcaattcaactgttctcctcatccatactggcttccaaatttcatggatgtttttacttggtcccttccatttgttggggaaaaagtgactgagatgctggtaaatgtcctcaacatctgctcagatgatgaactagggtcagaagaagatggatttgatggtgcaacagctgcagcccggaaagaggtgataaggaacaagatccgagcaataggcaaaatggccagagtgttctcagtgctcagagaagagagtgagagtgtgctgacgctgaaaggcttgaccccaactggcatgctccccagcggagtactttctggagggaagcaaaccctgcaaagcgctactgttgaggctattgaggctgatgaagctatcaaaggattttcaccacaacataagatcactagcttcgaggaagccaagggcttagaccgaattaatgagaggatgccgcctcgcagagatgccatgccctctgacgccaaccttaactccatcaacaaggctctcacctcagagactaacggcacggacagcaatggcagtaatagcagcaatattcagtgaccacttcctgttcactttttttttttttttttttttttttttttgagctgcggggcatgatggggattgctgcatatcagcagttggatgttcttgcctctgacagtagcttatttgctctgggggccaggaattggattcagtttacactatcattaaaaaagagggagagagataataaactatattttggtggggatggtgattaaacacctcttttgggtatgccttttaaaaatgcttatagagaaaaaaaattttaaaaagaaagctaatgctagtatatactgcaatgttaggggaatgaacatgttttcctactgcattggggacttctagataggttaatgaaaggccttttattctgttactggacatgaaaactttgtctaatttcttactctattgtacgtttacagtcgcagcactaaaaatggatgacatcaaacatttttaacaaaatgatgtacaaactaaggactatttattgataatgttttgctactcttgtcagacaatggctataaactgaattaggcagtcttaaaaaaaaaaaaaaacagaaaaagaaaaaaaagaacgttgcaaatttgttaaaatgccaaaaaggacagtttaattttgtacagattatgcttacctcaggtttctttagtgtgcttgaatgcccttctttccatataacacttatcttcttcttaattcggcaatggaatatcttttaagttttaaaaaaactggaataattatatctatcttttttgccgtttatatttaggggtttttgttgataaaatcaagtcttggttgtggcttgctgaattaaatatttatgagtggtgcatttttaagtatagtgaacaagacaccatattaagtacagtgataaagcatctatattctgtaaaaaaaaaaaaaatctgcctatgcatgttttttaagaaaaaaaaaatggctgtatcggcctgtatgggactgtaatgcgcttagtggtctgacatatactggaaatgtatgtatactggcgtactttatattctctaaaatgcttaatgcctttgaaattttgtaatcaaaaaaaagctttgaaaaaatctaaaggggagagtattctttaaagtttttaacataagcttgtcaatgcacatgtagatggttagcatgtttagcaaaccttgtgaaattataataagtttgtagttacatgtgaaactctaaatgcatggcaactgttaatgtcataacagtttagttattttgttctgttctgtcatgtgccacaaaatatgtacttttttcacttttttccctttgtatatcagttacgggttacaactggttcattctgaaaacaacaacaacaaaagtccattcatattttttaacaattgtataagtgcccaagtaattcactacagcctaaagccttgcctttgtaatttgacttctgacatgttggcaatcaaagcatgcacttgtaacaatgaaaaagaaaaagcattttatattactactcaataaaatgtgcatgaacttacagaattctcatccttccactgagtccgctgaagggatttatgtgcacaaccaccatgtgtcttctaggtgctggcccaccaccacacatcacaggctgatttccacaggcttcttcctaggggcctcgtgatctgaggggtggtgcctacttccactgtaagaaagaatcttggtggatttgtgtctcaaatcagataagagaagcctgtttaaagagcagatgccatcttctggcttcctcaaggagccagttaaaaaaccagagcattcctttttattgaaaaataaaattaatttgttatcaggttgtttcagttgtattggatgccctatctatctgctaaagcaaaaagtactaggctactaagtgcattttcatcacagaaaagagttgcatttgtattaacaagaaatttgtatacccacgcttcagctactatctaatcatcacccgaagatttaagatacaccaaatttcagtttgtttgtaacattgttcatctttagtgcactttgttttatataataaagtatgcctgttatattaaataataagaatatggcaattagcgatatagcatacccaaacaaagatgttctcgatacagtctggcaaagactatcccaaggttattttaatgaattcagacattttttcctgtggatatttctccatcctaaaaaaagtggcaaccaaggaaaatatttagatgcaacttactagagtgatgatgtgaaagaaatggtgattctggtatcatggtgtttattttctttcttataactgcagagaaaatatcctgactaaaaaaaattcatttttttggattcctttcttttacaaattgtgctgaggcaactatggcatagaaataaacatttgacattaaaataag

SEQ ID NO: 4 - DNA, 2965 bp, Homo sapiens
agtattctcggctcggccattattctgtgcctcggctgccggaagggctcgttcctgtgtcatctcctagcggcctggcgccgaggcggcggtacgcaaggctggagccgcagcgggagcccccggtcttgtagatgatactctccaagctgtaaggaagaagtcaaggattaaggagacctggactggagaggagcctttttcaaaaaacaacaatgacaagagaaaatgtagcccacaatgctctgagacaagagggccttgtgaaggggaaggatgatacctggaaatggggaaccagcttccaaggaagtagctcctctgtttgggagacctcccacctacactttagacaattacgttaccatgagacatctggaccccaggaagccctgagccggctcagggaactctgtcgccggtggctgagaccagaagcacgcaccaaggcacagatcctggagctgctggtgctggagcagtttctgagcatcctgcctggggagattcggacctgggtacagctccatcaccctggaagtggcgaggaggctgtggccctggtagaggagctgcagaaagaccttgatggaccagcaatacaagttccagtccttgtcaaggatcaggacactctccagaaggtggtgagtgccccaggaacaacacttcctcctgtacttcctggcagccacatagcagctgaaatttgcccgcatcctcctactgacctagtggcattcaacctccaggatcctcagcatgattctcctgcccctgaagcttctgccctttcccaggaagagaacccaagaaatcaattaatggcacttatgctcctaacagcccagccccaggagttggtgatgttcgaggaggtgtcagtatgcttcacttcagaggaatgggcatgtctgggcccaatccagagggccttgtactgggatgtgatgctggagaattatggaaatgtgacctccctaggttacaggaaatacaggaggcagaggaacaaataaaagacaccacgagaaacagacacatccagaacgtggaatattgcataagaaagctgccctggattcttcaaaatattattatgatgaaaaagagaggggagtgaaaattgttcaagctgtcttgagtctgctgtgagtttattataccattctctgcttttgtgtatgtatgaaaatttcgatatgaaaggtataaaacatggatgaggaggcttgtttttaaaagataatactagagagccgttaggtactaagaaccagaaatagactcacataaatggccaattgatttttgacaggggcaaaagcaattcaatggaggagggatcgccttttcagcaaatactgttggagtaattggatatccataggcagtaaaccaacaacttcaggacctaggactgagctaagaaggctcagatgactcaaaagcatgctccttagaaggaaaaaaaatgttaaattggacttcatcaaaattaagataatttaccctgtaagagacctttttacaaagatgatattacaggttgggaaaaaatatttgcaaatcatatccaacaagggatttgtatgtaaactacataaagaactttccaaatttaacagtaataagtaaatacaattagaaaataagcaaaagacagacatttcactgaagtatagatagcaaataagcaaatgaaaagatgttcaacatcattaggcatgagggaaatgcagagtaaaatcgtgagatatcacctatcagaatagcttaactttttttttttaatggtggtaactgctggcaaggatgaagagaaacaggatctcatacattgctgggaatgtaaaatggtacagccactctggaatataatttggcagtttcttgtaaaaccacacatgtatatgtcatgcttcaggaattgcacttctgagcatttatcccagagaaatgaaaacttgcgttcacacaaaaacctgtatacgaatgttcatagcagctttatttgtaatggtcgaaacctgtaggcaacccatatatccttccttaggtggttaaaacaaattgtggtttatgtattaccatggaatacttgttactctgcaataaaattgacttattgatatccataacaactcaaataaatttcaagggaattaatgctgagtgaaaataatcacaaaaggccatattctgtatgaaaatattcatataacattctcaaaatgataaaactatagagatgaaaaatggattaatggttgccaaaggttagggatggtgggaggaaaaatggggagagggttggatggaactattaaaaggtagcaccagaaaggtctttgtggtgatggaacacttgtgtatcttgattgcagtggtggttacacaaatctataggtgctatacctatacacacatactgtaccaatgttgatttcctttttcattttatgtaagatgtaaccatgaggggaaagtgggtgaagggtgctatctttgcaacttcctgtgattctatcatttcaaaataaaaagtaaaaaccaacaatggcaacgaaaacccaaaactaaagagctgtaaccaactaaagtgtgtgaaactgatttgaaaaaaagttataaaatacatgttttaggacagttgggaaatttgaatatgactggttattagatggtattagggaatttttgttgattttcttacctgtgacggtggtggtagtttgaagaatattcttaatcttaagggatgcatgttgaagtatttggaatgaagtgttctgatgtttacaactttcaaaaaaatgattttaaatatgtattgagagatcaggcaaacatagcaaaatgttcattgttgagtccacatggaaaatacgggtattcaatgtgccatactttcaactcttctgtactctgatattttcaaaataaaacatttgaggggaaatta

SEQ ID NO: 5 - DNA, 2759 bp, Homo sapiens
agtccaggcctgggggagggaggaggccttggagaaggaggagggaaaaaggggctgtgggatttagtggctgggctgcaccccctgggggggcagcagagcccaatgggccagaagggccacaaagactccctttacccttgtggagggactcctgagagcagcctccatgaggccctggaccagtgcatgaccgccctggacctcttcctcaccaaccagttctcagaagcactcagctacctcaagcccagaaccaaggaaagcatgtaccactcactgacatatgccaccatcctggagatgcaggccatgatgacctttgaccctcaggacatcctgcttgccggcaacatgatgaaggaggcacagatgctgtgtcagaggcaccggaggaagtcttctgtaacagattccttcagcagcctggtgaaccgccccacgctgggccaattcactgaagaggaaatccacgctgaggtctgctatgcagagtgcctgctgcagcgagcagccctgaccttcctgcaggacgagaacatggtgagcttcatcaaaggcggcatcaaagttcgaaacagctaccagacctacaaggagctggacagccttgttcagtcctcacaatactgcaagggtgagaaccacccgcactttgaaggaggagtgaagcttggtgtaggggccttcaacctgacactgtccatgcttcctactaggatcctgaggctgttggagtttgtggggttttcaggaaacaaggactatgggctgctgcagctggaggagggagcgtcagggcacagcttccgctctgtgctctgtgtcatgctcctgctgtgctaccacaccttcctcaccttcgtgctcggtactgggaacgtcaacatcgaggaggccgagaagctcttgaagccctacctgaaccggtaccctaagggtgccatcttcctgttctttgcagggaggattgaagtcattaaaggcaacattgatgcagccatccggcgtttcgaggagtgctgtgaggcccagcagcactggaagcagttccaccacatgtgctactgggagctgatgtggtgcttcacctacaagggccagtggaagatgtcctacttctacgccgacctgctcagcaaggagaactgctggtccaaggccacctacatttacatgaaggccgcctacctcagcatgtttgggaaggaggaccacaagccgttcggggacgacgaagtggaattatttcgagctgtgccaggcctgaagctcaagattgctgggaaatctctacccacagagaagtttgccatccggaagtcccggcgctacttctcctccaaccctatctcgctgccagtgcctgctctggaaatgatgtacatctggaacggctacgccgtgattgggaagcagccgaaactcacggatgggatacttgagattatcactaaggctgaagagatgctggagaaaggcccagagaacgagtactcagtggatgacgagtgcttggtgaaattgttgaaaggcctgtgtctgaaatacctgggccgtgtccaggaggccgaggagaattttaggagcatctctgccaatgaaaagaagattaaatatgaccactacttgatcccaaacgccctgctggagctggccctgctgcttatggagcaagacagaaacgaagaggccatcaaacttttggaatctgccaagcaaaactacaagaattactccatggagtcaaggacacactttcgaatccaggcagccacactccaagccaagtcttccctagagaacagcagcagatccatggtctcatcagtgtccttgtagctttgtgcagcagttccgggctggaagacagagacagctggacagagctcctgaaaacatttcaaaataccccctccccctgccctgccctgcctttggggtccaccggcactccagttggatggcacaacatagtgtatccgtgcagaagccgagctggcattttcaccagtgtagccaagggcctttgccaagggcagagcaggtggagccctctgcctgccctatcacacatacgggtacttgcttttcactgtgatgtttaagagaatgtatgaacagtttacattttccttagaaatacattgatgggatcacagttggctttaaaaaccaacaacaatcaaccacctgtaagtctttgtcttcacctattatcatctggaggtaaatctctttatatgatgatgccaaagggcaaattgcttttcaaattcagcaagttctcagcttgtgtgacggaaggtccttcagaggacctgaggaatgcctgggagaggctaagcctcaggcttcaatgcttctggggttgggcatgaggatgtacacagacacccactaccttactactcacacttcatttcactccttttgtaaatttccaatttaaaaatcaagcacgtctttttagtgagataaaatctgagctcttctgtagaaaaatcaatctctaccagtagaaaatgccagggcttgatggaagagctgtgtagccctttctatgccaaagccaggaaatttggggggcaggaggaggttctcagaatccagtctgtatctttgctgtatgccaaactgaaaccactgggaataatttatgaaacataaaaatcttctgtacttcactccaaggtacatttgcttactgacagcatttttgttaaaactgttattcttgaaaaaaaaaaaaaaaaaaa

SEQ ID NO: 6 - DNA, 4147 bp, Homo sapiens
cggcgcgcgacgtgctttgctgtataaatgcggtggcgcccggcgtagggacacttcggtcctgagcgcttgggagttaggttgtttgccggcgtagcggccagcgcctgagcccgcccttgatcttcgctgtggcatggcggacgaggggaagtcgtacagcgaacacgatgatgaacgcgttaatttccctcaaagaaagaagaaaggccggggtcccttccggtggaaatatggtgaaggaaaccgtaggtctggaagaggcggttctggtattcggtcttcccgccttgaggaagatgatggagatgtggcaatgagtgatgcccaggatggtccccgagtacgatacaacccctataccacccgacctaaccgtcggggtgatacttggcatgatcgagatcgcattcatgttactgtgcggagagacagagctcctccagagagaggaggggctggcaccagccaggatgggacctcaaagaactggttcaagattacaattccttatggcagaaagtatgacaaggcatggctcctgagcatgattcagagcaagtgcagtgtgcccttcacccctattgagtttcactatgagaatacacgggcccagttcttcgttgaagacgccagtactgcctctgcattgaaggctgtcaactataagattttggatcgggagaaccgaaggatatctatcatcatcaactcttctgctccaccccacactatactgaatgaactgaagccagaacaagtagaacagctaaagctgatcatgagcaaacgatacgatggctcccaacaagcccttgacctcaaaggcctccgttcagacccagatttggtggcccagaacattgacgttgtcctgaatcgcagaagctgtatggcagctaccctgaggatcattgaagagaacatccctgagctattgtccttgaacttgagcaacaacaggctgtacaggctggatgacatgtctagcattgttcagaaggcacccaacctgaagatcctaaacctttctggaaatgaattgaagtctgagcgggaattggacaagataaaggggctgaagctagaagagctctggctcgatggaaactccctgtgtgacaccttccgagaccagtccacctacatcaggtcagttgtagcctgtgtctcccctcctggggaccttcaccccctgggaggctgagctaatgcatcctgaccagggcccgtctgcggagatgtgcagccctgagctggaaccacctgtcctttgagaggatcgcgtgctccccactttggtctgtctgtgtcttccagctttgtcctgagatgttctctcttctcttctgacttgactatctgtttgctgggtctgtggcctttctctttcttcctgaacacaaccttttctagaatctccctaccctgttgttccaggaaaggcatctcccctttctactctaaccagagggtatcttgtacataccctatagatggggttgccttgtgccaagagcctggtgtccatgggttgaggaagccctccctacctgggacttcctactgagatgggccttccctcctttgtactgtgatggcccctcttgcccttgcgccaagagggacccttttctcaggatccacttgcccagggctgttgctgtccatgctgaggttgaggcctcctaggggctggtggcatgcaatctgtctctcttgcccagtgctatgagctgggctctccctgaagaagaaacctgggttccccaagatgtgaccagagctggggccccgccagcaggcgagggaatcccaaggcaggtgctgggcgtggaggccacgggggcataggctaccaaggagacagagaactgaccccctcgggggcgctgcctctccctcactcacacactgcacgtcaccctgtttggccccggtggatggctggttagccagagacgggtaagattcctcagggaaggaacaacctaagacaggcacagtcgcagaggggccatcaggagagaacttgggggcaacagaggtggggcatggaccctcacccccacaatcctacaggggcctgaaccctcacaccttctgagggaggtctcctgcccccatggctgctttgcttcccacgcccagttcagatcgggacccaggtagcagacagagacctggccaacagcaagtgcccactcaccacagcaaggatttgtttctcatttctaccttggaccacagggatggggcagctgaaagaaagggctgtgtcagggtgtctttctcccttttctccctcatttttctagatgcttttttgccttgtagttctttctctttttctttgctttctctttcctttttctgtctgtctcctatacctccccatctctcccttgcccctgccccatcttgcctttttctctttttcctccttttcctttcttattcctttgcctctcctcttcctgagccccacctgctcatctccctgccccaacatcctgtgccatccctgtggtgtgtttgggtcttggccaaagccagacctggcagaactgatggatacctggtgaggcagcggagcccctgggctcccaccccattccctcctcccggggctgcacaggtgagtaggtggaaggtaaggggggcagggaggggaaagaggtcctgggcttaaagcctgggcttggagtactgctccttgacactcagggtcaggcagagagaaaagagacagccttcaaggcagtccatgtctgggtgccccgggtcaggtggggagtgggggccatttttccctgagcacaggctgggagggagtggagggatgagcaggatgggatgggctgtccctcgggtttggtatatttgctcctagagcagcccaggaggcacggtggctctgaagcatcactcacttctgtcccgttcttgacagcgccattcgcgaacgatttcccaagttactacgcctggatggccatgagctacccccaccaattgcctttgatgttgaagcccccacgacgttaccgccctgcaagggaagctattttggaacagaaaacttgaagagtctggtcttgcacttcctgcaacagtactatgcaatttacgactctggagaccgacaagggctcctggatgcctaccatgatggggcctgctgttccctgagcattcctttcattcctcagaaccctgcccgaagcagcttagccgagtatttcaaggatagcagaaatgtgaagaagcttaaagaccctaccttgcggttccggctgctgaagcacacgcgtctcaacgttgttgccttcctcaatgagttgcccaaaacccagcacgacgtcaattccttcgtggtagacataagcgcccagacaagcacattgctgtgtttttctgtcaatggagtcttcaaggaagtggacggaaagtcccgggattctttgcgagccttcacccggacattcattgctgttcctgctagcaattcagggctatgtattgtaaatgatgagctatttgtgcggaatgccagttctgaagagatccaaagagccttcgctatgcctgcacccacgccttcctccagcccggtgcccaccctctctccagagcagcaggaaatgttgcaagcattctctacccagtctggcatgaacctcgagtggtcccagaagtgccttcaggacaacaactgggactacaccagatctgcccaggccttcactcatctcaaggccaagggcgagatcccagaagtggcattcatgaagtgatcgtagtcatgcctcagaagcagtcccccctgtaaatagtccttggatattaccgtctggttgtcgtctgtcatctcctcctgtctggcccgaggccgccccgtgactgtgaccgagggagggagggctgcctgatccctctcctcgcctgccttctggaagacttcagaagattgagcctcactggtgccaggaagccaaagcttactttgtagaactgacactaaactacccgaaggacttaggtgctttgtgtacttaaccccaggacctccttactttttaatataaagagtgatgttgtatttcgtgttctgcactttttaatataaagagtgatgttgtatttc

SEQ ID NO: 7 - DNA, 5779 bp, Homo sapiens
ggagaggccgccgcggtgctgagggggaggggagccggcgagcgcgcgcgcagcgggggcgcgggtggcgcgcgtgtgtgtgaagggggggcggtggccgaggcgggcgggcgcgcgcgcgaggcttcccctcgtttggcggcggcggcggcttctttgtttcgtgaagagaagcgagacgcccattctgcccccggccccgcgcggaggggcgggggaggcgccgggaagtcgacggcgccggcggctcctgcgtctcgcccttttgcccaggctagagtgcagtggtgcggtcatggttcactgcagcctcaacctcctggactcagcaggaggccactgtctgcagctcccgtgaagatgtccactccagacccacccctgggcggaactcctcggccaggtccttccccgggccctggcccttcccctggagccatgctgggccctagcccgggtccctcgccgggctccgcccacagcatgatggggcccagcccagggccgccctcagcaggacaccccatccccacccaggggcctggagggtaccctcaggacaacatgcaccagatgcacaagcccatggagtccatgcatgagaagggcatgtcggacgacccgcgctacaaccagatgaaaggaatggggatgcggtcagggggccatgctgggatggggcccccgcccagccccatggaccagcactcccaaggttacccctcgcccctgggtggctctgagcatgcctctagtccagttccagccagtggcccgtcttcggggccccagatgtcttccgggccaggaggtgccccgctggatggtgctgacccccaggccttggggcagcagaaccggggcccaaccccatttaaccagaaccagctgcaccagctcagagctcagatcatggcctacaagatgctggccagggggcagcccctccccgaccacctgcagatggcggtgcagggcaagcggccgatgcccgggatgcagcagcagatgccaacgctacctccaccctcggtgtccgcaacaggacccggccctggccctggccctggccccggcccgggtcccggcccggcacctccaaattacagcaggcctcatggtatgggagggcccaacatgcctcccccaggaccctcgggcgtgccccccgggatgccaggccagcctcctggagggcctcccaagccctggcctgaaggacccatggcgaatgctgctgcccccacgagcacccctcagaagctgattcccccgcagccaacgggccgcccttcccccgcgccccctgccgtcccacccgccgcctcgcccgtgatgccaccgcagacccagtcccccgggcagccggcccagcccgcgcccatggtgccactgcaccagaagcagagccgcatcacccccatccagaagccgcggggcctcgaccctgtggagatcctgcaggagcgcgagtacaggctgcaggctcgcatcgcacaccgaattcaggaacttgaaaaccttcccgggtccctggccggggatttgcgaaccaaagcgaccattgagctcaaggccctcaggctgctgaacttccagaggcagctgcgccaggaggtggtggtgtgcatgcggagggacacagcgctggagacagccctcaatgctaaggcctacaagcgcagcaagcgccagtccctgcgcgaggcccgcatcactgagaagctggagaagcagcagaagatcgagcaggagcgcaagcgccggcagaagcaccaggaatacctcaatagcattctccagcatgccaaggatttcaaggaatatcacagatccgtcacaggcaaaatccagaagctgaccaaggcagtggccacgtaccatgccaacacggagcgggagcagaagaaagagaacgagcggatcgagaaggagcgcatgcggaggctcatggctgaagatgaggaggggtaccgcaagctcatcgaccagaagaaggacaagcgcctggcctacctcttgcagcagacagacgagtacgtggctaacctcacggagctggtgcggcagcacaaggctgcccaggtcgccaaggagaaaaagaagaaaaagaaaaagaagaaggcagaaaatgcagaaggacagacgcctgccattgggccggatggcgagcctctggacgagaccagccagatgagcgacctcccggtgaaggtgatccacgtggagagtgggaagatcctcacaggcacagatgcccccaaagccgggcagctggaggcctggctcgagatgaacccggggtatgaagtagctccgaggtctgatagtgaagaaagtggctcagaagaagaggaagaggaggaggaggaagagcagccgcaggcagcacagcctcccaccctgcccgtggaggagaagaagaagattccagatccagacagcgatgacgtctctgaggtggacgcgcggcacatcattgagaatgccaagcaagatgtcgatgatgaatatggcgtgtcccaggcccttgcacgtggcctgcagtcctactatgccgtggcccatgctgtcactgagagagtggacaagcagtcagcgcttatggtcaatggtgtcctcaaacagtaccagatcaaaggtttggagtggctggtgtccctgtacaacaacaacctgaacggcatcctggccgacgagatgggcctggggaagaccatccagaccatcgcgctcatcacgtacctcatggagcacaaacgcatcaatgggcccttcctcatcatcgtgcctctctcaacgctgtccaactgggcgtacgagtttgacaagtgggccccctccgtggtgaaggtgtcttacaagggatccccagcagcaagacgggcctttgtcccccagctccggagtgggaagttcaacgtcttgctgacgacgtacgagtacatcatcaaagacaagcacatcctcgccaagatccgttggaagtacatgattgtggacgaaggtcaccgcatgaagaaccaccactgcaagctgacgcaggtgctcaacacgcactatgtggcaccccgccgcctgctgctgacgggcacaccgctgcagaacaagcttcccgagctctgggcgctgctcaacttcctgctgcccaccatcttcaagagctgcagcaccttcgagcagtggtttaacgcaccctttgccatgaccggggaaaaggtggacctgaatgaggaggaaaccattctcatcatccggcgtctccacaaagtgctgcggcccttcttgctccgacgactcaagaaggaagtcgaggcccagttgcccgaaaaggtggagtacgtcatcaagtgcgacatgtctgcgctgcagcgagtgctctaccgccacatgcaggccaagggcgtgctgctgactgatggctccgagaaggacaagaagggcaaaggcggcaccaagaccctgatgaacaccatcatgcagctgcggaagatctgcaaccacccctacatgttccagcacatcgaggagtccttttccgagcacttggggttcactggcggcattgtccaagggctggacctgtaccgagcctcgggtaaatttgagcttcttgatagaattcttcccaaactccgagcaaccaaccacaaagtgctgctgttctgccaaatgacctccctcatgaccatcatggaagattactttgcgtatcgcggctttaaatacctcaggcttgatggaaccacgaaggcggaggaccggggcatgctgctgaaaaccttcaacgagcccggctctgagtacttcatcttcctgctcagcacccgggctggggggctcggcctgaacctccagtcggcagacactgtgatcatttttgacagcgactggaatcctcaccaggacctgcaagcgcaggaccgagcccaccgcatcgggcagcagaacgaggtgcgtgtgctccgcctctgcaccgtcaacagcgtggaggagaagatcctagctgcagccaagtacaagctcaacgtggaccagaaggtgatccaggccggcatgttcgaccagaagtcctccagccatgagcggcgcgccttcctgcaggccatcctggagcacgaggagcaggatgagagcagacactgcagcacgggcagcggcagtgccagcttcgcccacactgcccctccgccagcgggcgtcaaccccgacttggaggagccacctctaaaggaggaagacgaggtgcccgacgacgagaccgtcaaccagatgatcgcccggcacgaggaggagtttgatctgttcatgcgcatggacctggaccgcaggcgcgaggaggcccgcaaccccaagcggaagccgcgcctcatggaggaggacgagctcccctcgtggatcatcaaggacgacgcggaggtggagcggctgacctgtgaggaggaggaggagaagatgttcggccgtggctcccgccaccgcaaggaggtggactacagcgactcactgacggagaagcagtggctcaaggccatcgaggagggcacgctggaggagatcgaagaggaggtccggcagaagaaatcatcacggaagcgcaagcgagacagcgacgccggctcctccaccccgaccaccagcacccgcagccgcgacaaggacgacgagagcaagaagcagaagaagcgcgggcggccgcctgccgagaaactctcccctaacccacccaacctcaccaagaagatgaagaagattgtggatgccgtgatcaagtacaaggacagcagcagtggacgtcagctcagcgaggtcttcatccagctgccctcgcgaaaggagctgcccgagtactacgagctcatccgcaagcccgtggacttcaagaagataaaggagcgcattcgcaaccacaagtaccgcagcctcaacgacctagagaaggacgtcatgctcctgtgccagaacgcacagaccttcaacctggagggctccctgatctatgaagactccatcgtcttgcagtcggtcttcaccagcgtgcggcagaaaatcgagaaggaggatgacagtgaaggcgaggagagtgaggaggaggaagagggcgaggaggaaggctccgaatccgaatctcggtccgtcaaagtgaagatcaagcttggccggaaggagaaggcacaggaccggctgaagggcggccggcggcggccgagccgagggtcccgagccaagccggtcgtgagtgacgatgacagtgaggaggaacaagaggaggaccgctcaggaagtggcagcgaagaagactgagccccgacattccagtctcgaccccgagcccctcgttccagagctgagatggcataggccttagcagtaacgggtagcagcagatgtagtttcagacttggagtaaaactgtataaacaaaagaatcttccatatttatacagcagagaagctgtaggactgtttgtgactggccctgtcctggcatcagtagcatctgtaacagcattaactgtcttaaagagagagagagagaattccgaattggggaacacacgatacctgtttttcttttccgttgctggcagtactgttgcgccgcagtttggagtcactgtagttaagtgtggatgcatgtgcgtcaccgtccactcctcctactgtattttattggacaggtcagactcgccgggggcccggcgagggtatgtcagtgtcactggatgtcaaacagtaataaattaaaccaacaacaaaacgcacagccaaaaaaaaa

SEQ ID NO: 8 - DNA, 7766 bp, Homo sapiens
cggaacgcgtcgcgtcacaatggagccggtcggaggcggcgagccggacagcgccggggcttcccgctgagcccgcagcctccggcagccgggaaagtgcgggcgcggggccgcagcctgcccgcccggagcggcccaggagcacgccgcggggagcgcgggcgtccggggctggagtcgcgcagaatcctcagagtgaaaacaccaacaggctccagtttgtgttttcagctgcctactagacctcactacctggatggcccacaggtaatagttaacctcttctgtgagaagtcagaaggtgatctctttaatgctttctttttaagaatttttcaaattgagactaattgcagaggttccagttgaccagcattcataggaatgaagacaaacacagagatggtgtgtctaagaaacttcaaaaggtgtagacctcctgactgaagcatattggatttatttaatttttttcactgtatttctgtcctcctacaagggaaagtcatgattacactaactgagctaaaatgcttagcagatgcccagtcatcttatcacatcttaaaaccatggtgggacgtcttctggtattacatcacactgatcatgctgctggtggccgtgctggccggagctctccagctgacgcagagcagggttctgtgctgtcttccatgcaaagtggaatttgacaatcactgtgccgtgccttgggacatcctgaaagccagcatgaacacatcctctaatcctgggacaccgcttccgctccccctccgaattcagaatgacctccaccgacagcagtactcctatattgatgccgtctgttacgagaaacagctccattggtttgcaaagtttttcccctatctggtgctcttgcacacgctcatctttgcagcctgcagcaacttttggcttcactaccccagtaccagttccaggctcgagcattttgtggccatccttcacaagtgcttcgattctccatggaccacccgcgccctttcagaaacagtggctgagcagtcagtgaggcctctgaaactctccaagtccaagattttgctttcgtcctcagggtgttcagctgacatagattccggcaaacagtcattgccctacccacagccaggtttggagtcagctggcatagaaagcccaacttccagtgtcctggacaagaaggagggtgaacaggccaaagccatctttgaaaaagtgaaaagattccgcatgcatgtggagcagaaggacatcatttatagagtatatctgaaacagataatagtcaaagtcattttgtttgtgctcatcataacttatgttccatattttttaacccacatcactcttgaaatcgactgttcagttgatgtgcaggcttttacaggatataagcgctaccagtgtgtctattccttggcagaaatctttaaggtcctggcttcattttatgtcattttggttatactttatggtctgacctcttcctacagcctgtggtggatgctgaggagttccctgaagcaatattcctttgaggcgttaagagaaaaaagcaactacagtgacatccctgatgtcaagaatgactttgccttcatccttcatctggctgatcagtatgatcctctttattccaaacgcttctccatattcctatcagaggtcagtgagaacaaactgaaacagatcaacctcaataatgaatggacagttgagaaactgaaaagtaagcttgtgaaaaatgcccaggacaagatagaactgcatctttttatgctcaacggtcttccagacaatgtctttgagttaactgaaatggaagtgctaagcctggagcttatcccagaggtgaagctgccctctgcagtctcacagctggtcaacctcaaggagcttcgtgtgtaccattcatctctggtcgtagaccatcctgcactggcctttctagaggagaatttaaaaatcctccgcctgaaatttactgaaatgggaaaaatcccacgctgggtatttcacctcaagaatctcaaggaactttatctttcgggctgtgttctccctgaacagttgagtactatgcagttggagggctttcaggacttaaaaaatctaaggaccctgtacttgaagagcagcctctcccggatcccacaagttgttacagacctcctgccttcattgcagaaactgtcccttgataatgagggaagcaaactggttgtgttgaacaacttgaaaaagatggtcaatctgaaaagcctagaactgatcagctgtgacctggaacgcatcccacattccattttcagcctgaataatttgcatgagttagacctaagggaaaataaccttaaaactgtggaagagatcattagctttcagcatcttcagaatctttcctgcttaaagttgtggcacaataacattgcttatattcctgcacagattggggcattatctaacctagagcagctctctttggaccataataatattgagaatctgcccttgcagcttttcctatgcactaaactacattatttggatctaagctataaccacttgaccttcattccagaagaaatccagtatctgagtaatttgcagtactttgctgtgaccaacaacaatattgagatgctaccagatgggctgtttcagtgcaaaaagctgcagtgtttacttttggggaaaaatagcttgatgaatttgtcccctcatgtgggtgagctgtcaaaccttactcatctggagctcattggtaattacctggaaacacttcctcctgaactagaaggatgtcagtccctaaaacggaactgtctgattgttgaggagaacttgctcaatactcttcctctccctgtaacagaacgtttacagacgtgcttagacaaatgttgacttaaagaaaagagacccgtgtttcaaaatcatttttaaaagtatgctcggccgggcgtggtggctcatgcctataatcccagcactttgggaggccaagatgggcggattgcttgaggtcaggagttcgagaccagtctggccaacctggtgaaaccccatctctgctaaaactacaaaaaaattagccaggcgtggtggcgtgcgcctgtaatcccagctacttgggaggctgacgcaggggaattgcttgaaccagggaggtggaggttgcagtgagccgagattgtgccactgtacaccagcctgggtgacagagcaagactcttatctcaaaaaaaaaaaaaaaatgctccagggctttaaatgagaagtaaaattttctaagttaataaagatgaagaatgggtgactattatgatgaaccataactaaatgtcttattaaagcaactgagtgtctagccctaaattaaccaggtaaaaactgttaacactaacctgaagttttgtgaataactgttctttaacttattgagatgttgcaagaaatgcacatccagggtggactgggagctatgaaatgactaaattcctccttgcagtgtttaccttcaagattgtataggtattctctcctcttcttcccccagtccccattacttatttgcacacttgttttaactgacttcctgttttgatatttatcaccaagaccataaactcatcaatatgaattttcttgatgtatactcacgactgtctttgatttatgttcctaaatttttttagatagggtatgttgtgcttggcagaattcttttttggcttaatttttacttcctttcccagcttgcttgagtcttccttaacctggttttctcttaacaccaatgatgaaccctgagaaaatgcctgcatttggcctttgcctagaacaggagctgagtatttaagatgtattatcctcggggcatcctgaaaattaatgtattccctaaaatttcttcttgtctatcatcaaggcctttttttatttgttaagaatttttatattaaatgtaaaacatataaatattttctattgtataatcttggattcaacatctgtgaggatcatttttgtaagatacatagaatttgtgcatttctttatgaacttactgttagtgttcttggtttcggctgtttatgactcatgtttatgtacattctgctccaaaatgtttttgtactctgcaactaattacttttggataacaaaagccttgtgtttaatgccctaaagtatttgggggtttccttgtgagagggtggccgaatcatctacctctctcttccatagttgctgtgcaatcgtacgggtaaaattcttaattacttacaaaaactgtgatagaggggagaggtacagatttggtttttaaattgattttaaaatactttatagaaatttagtaagagttaaagcaaaagactttttttccctccatctatgtaatctctagctatgattataatgtaaaacagcctctattcagtgtctaaaatgagttctcaaaacccacaaagaaatagatccatttaactgaaattcatctcatgcctttatctaactcttctggaaaatacattttgctcctttttataaagagctttgtgcttggccttttattatgcatatttttaatgaataaaatcaactgactcatttttgggaaatgtacatctttaatatgtttttccctaagggtctaggcattatgatgccacctcttcattttggatataactatgaagaaatctattaactgcacctacacaaaactggaaaacactataggtaaacagtactgtgtatatggaattgtggtgcgtggtatgtgttttctcttgctttgttccagaaagatgaaagtgagtctttaaagcatagcaaatagagcttcccctcacctgccacacactcctgcactaaagttcaaagaaaagaattattcaaatcaaatgaaatttgaataatattagctatcaggaatataggacaccaaacacactgcctcacacattattgtttattctgaacggaaaggaacagtgtaaaaataaactacttaccaaaacttgcctttagtcagaacattcagctctcagggaagcaggtataactgatgaaacttctaggacttcagaaaacagattctaattatatccatgtttttcgttgttattttcattttttaaagtgtgagttgatgtttattttagtgtttcacaatagaattatcatgtatactgattccagtgtggcatgtgattaagttttggacatgaatatgccaaaagtgcttaaatgtttttggccacataactagctagaatttcaaaacaaaattcagatttgctaccattcacctgacgaacttctccatggctcgtcactggtttggttcaactgcagaagtcattggctaaattttccttatcacctacgtaaatttctagaagaatttactagcaggattaataatgaatattataaactgctttccacacactagggtataattattggtgcaatctatgttgttcttgatgccatggttttacatcttttaatttaaaccttatacaccagtgtttaggtcgcttttgagacaaggtagccctgatgcaaggaaaaatgaggctactacttcacataaaaaatagggtgttaataccacctttactgtactgttggagcagatctttattttacaagtgttcatattcacataagagaattttaaatgaagaaaattaagtttgttaaattataattatgagactttcgttggcatttgatttcaagaatacatatgcattttccaaaaaataaatgtggaggttattcagaacaaaattcatagcttacggtagtaatggcatggattaattttatttgcatgcacacacagacacacatacttcatatatgcaaattatagcattagtttttgatatatctagtggtttttttttcaaaattgcaggaggttgtagattaaattaagtatgatagcacgttttttaattcattaatcatgaagtgctctgttccctaagttatgacatttagaagaaatcacatgctcaaccttaatctgagaacctaagtgtttttgagcattccagtaaaggagtagtgttcttttcctaacttacatcagggtacatctgtgtggcacacagatactatcttttcattcttcactcccagtcttaatttctttcccctgtatgtcactgtattttatgtcacttcacattgtgttaaacagggtaaatagagatcctcagtatctcagtgctgtggcatagctccaataggtgtgctgtggtgcactgcagtgatgtatttgcataacattgtttgatagtgaaaaattttttttcggttcaagtgttttgtgattaaaattttatgtttaattaaaatattgcataatattgatgggttcaaaaaccattaaaataatcaaacaattattctgtgcccttaacattattttcttgtgttttcaataaaattttcttttcatctttccatcttcacattctcttagcatcatcctatgcacataaggtatgttgttttccttctccactcacctaccgcactaaatttgatcagcaattgtacagtaacagaatatatttgtgccagaagatttgcaatgatatttgagcatgtatttatttaggaggaagccagtgcctgtaattatgtctcattgagtagttttactttgcccatcctgcagtatttagagctgatctgtacccaaagcaggacaatgtaactgtagatctgctttgttttcagtaactgtacattgcatcagaatctgtttatttctatctggaaacagacagaatggtgggggagggaaggagttattttgcatcctagtttgtattatgaagtcatcatatatatatttgaaatagtataagctaattactgttgcagaatgccctcgatataattatttcttttcagctggatgtgaaaagctgaagcagtgaaaacctgcagtcttatttcactggtttccttctgtttcttgtccatcacttctgtatccacagggagctatctactacatacctttggtaacaggctacattctcttcagattttttatatgaataatttcatcagcactaaagcattaacatagaataatgagccaaagtactgagtcgagatggctttcagttgagtttaatttcatatttaacttttgcatttaacttgtataatacactactgctgagaaaaacaattatgaatgccttctgcatgttgtacattatctctaacagagatggtgcaattttaagaatacaaaggggtatagagttagaatggatgtgttcgtgcatatatatgttgtatttaaatattaatgtttacaagaagattttttttaaattcttcaaatacttcacttagtgaaataatgggccaatctggaatagagacattttatttggttagtgcaagagtgaaagctagcatttgttaaccttcacatatttatctgtgtacaattgtttttgcttctggtaatgaattattagaaaatggaagattttgttcaatgtttttggccctcaggtttactgtgtaaatctgcatttttggtggtaaatccctttgccacagattcagtagcttttggtaaacttcactgtttttaaagtaccttttgtgtaaaataaagatccaatttttataacaaatggcaaataaaaacagtaaatgctggaaaaaaaaaaaaaaaaaaaaaaaaaaaaaaa

SEQ ID NO: 9 - DNA, 3418 bp, Homo sapiens
gcggccgcccctcggccccggagcccctcggcggcgccaccatgtactcgggagccggccccgcacttgcacctcctgcgccgccgccccccatccaaggatatgccttcaagcctccacctagacccgactttgggacctccgggagaacaatcaaattacaggccaatttcttcgaaatggacatccccaaaattgacatctatcattatgaattggatatcaagccagagaagtgcccgaggagagttaacagggaaatcgtggaacacatggtccagcactttaaaacacagatctttggggatcggaagcccgtgtttgacggcaggaagaatctatacacagccatgccccttccgattgggagggacaaggtggagctggaggtcacgctgccaggagaaggcaaggatcgcatcttcaaggtgtccatcaagtgggtgtcctgcgtgagcttgcaggcgttacacgatgcactttcagggcggctgcccagcgtcccttttgagacgatccaggccctggacgtggtcatgaggcacttgccatccatgaggtacacccccgtgggccgctccttcttcaccgcgtccgaaggctgctctaaccctcttggcgggggccgagaagtgtggtttggcttccatcagtccgtccggccttctctctggaaaatgatgctgaatattgatgtgtcagcaacagcgttttacaaggcacagccagtaatcgagtttgtttgtgaagttttggattttaaaagtattgaagaacaacaaaaacctctgacagattcccaaagggtaaagtttaccaaagaaattaaaggtctaaaggtggagataacgcactgtgggcagatgaagaggaagtaccgcgtctgcaatgtgacccggcggcccgccagtcaccaaacattcccgctgcagcaggagagcgggcagacggtggagtgcacggtggcccagtatttcaaggacaggcacaagttggttctgcgctacccccacctcccatgtttacaagtcggacaggagcagaaacacacctaccttcccctggaggtctgtaacattgtggcaggacaaagatgtattaaaaaattaacggacaatcagacctcaaccatgatcagagcgactgctaggtcggcgcccgatcggcaagaagagattagcaaattgatgcgaagtgcaagtttcaacacagatccatacgtccgtgaatttggaatcatggtcaaagatgagatgacagacgtgactgggcgggtgctgcagccgccctccatcctctacgggggcaggaataaagctattgcgacccctgtccagggcgtctgggacatgcggaacaagcagttccacacgggcatcgagatcaaggtgtgggccattgcgtgcttcgccccccagcgccagtgcacggaagtccatctgaagtccttcacagagcagctcagaaagatctcgagagacgccggcatgcccatccagggccagccgtgcttctgcaaatacgcgcagggggcggacagcgtggagcccatgttccggcacctgaagaacacgtatgcgggcctgcagctggtggtggtcatcctgcccggcaagacgcccgtgtacgccgaggtcaagcgcgtgggagacacggtgctggggatggccacgcagtgcgtgcagatgaagaacgtgcagaggaccacgccacagaccctgtccaacctctgcctgaagatcaacgtcaagctgggaggcgtgaacaacatcctgctgccccagggcaggccgccggtgttccagcagcccgtcatctttctgggagcagacgtcactcacccccccgccggggatgggaagaagccctccattgccgccgtggtgggcagcatggacgcccaccccaatcgctactgcgccaccgtgcgcgtgcagcagcaccggcaggagatcatacaagacctggccgccatggtccgcgagctcctcatccagttctacaagtccacgcgcttcaagcccacccgcatcatcttctaccgcgacggtgtctctgaaggccagttccagcaggttctccaccacgagttgctggccatccgtgaggcctgtatcaagctagaaaaagactaccagcccgggatcaccttcatcgtggtgcagaagaggcaccacacccggctcttctgcactgacaagaacgagcgggggacaagcaggccttcgcactatcacgtcctctgggacgacaatcgtttctcctctgatgagctgcagatcctaacctaccagctgtgtcacacctacgtgcgctgcacacgctccgtgtccatcccagcgccagcatactacgctcacctggtggccttccgggccaggtaccacctggtggataaggaacatgacagtgctgaaggaagccatacctctgggcagagtaacgggcgagaccaccaagcactggccaaggcggtccaggttcaccaagacactctgcgcaccatgtactttgcttgacatgttttagtgtttagcgattgtgtaccgagtgggattcacgagaccagctacactcagaccaacagatggccagcccttccgtgacagccagcatcgaacatgagacgtcattgattttattagattctccgttttccagaatgccttccgtcccagatttcaaacttggattttgaactgcagacctgtatgagaacccaatgtcataggaaatatggtttgctaaaatctataagctgcttattaaaacagagtcccgtgtgtcctaaaaatctcctaaaaccagtctatgaactcagggctttaaaacatttttaatttatttggtcattcaatttacttgtttttaatacatgattctctatgaaattgatgggctcaaactagctgtgaatcttctgagagtgaaagcaacacaaaacacaagtgtggttttaaagccttgaacattctgatgttgtcactaaagttgatttccaggcgatgctcgtgtgcccctggcgtggctcacccaagttcctcgactgagggccggtggccatgcagaggcgtccgcaggtgccgtgttctgccagcaccgcccttcacccggcctgaactaaggagcagtggcagaaggtgggccccgtgtgtttacagcatttccaggtccagagaggttggcagacaagtgccattttaataaaaaatgtatttaaaaaaagaaaaaagacaatatactgacagtctaatcatcagatttgtcctataggactgtgacatttattttccaaagtttttaaagaatacgggtctgtggtgataaatacagtacaatcctttttcactgttatgtctttaatgtaagagaagaatatatatatctggtttgcagtaaaaaaaaaaaaaaaaaaaaa

SEQ ID NO: 10 - DNA, 9032 bp, Homo sapiens
gtcccgcccccttgagctgcgatacgccgagcgctcaacatccgaggactttggcccagagtaaccccgctctcgtgacctttcccctccattccgcacctccgagtgctggccgggcgagaggctggcggctgggctctcgcgcccctccctgcagggctcaggctctccccctcctgtcttctccgcgctgttcctcgtcatggcggccctcagcaagtccatccctcataactgctatgagatcggccacacttggcacccttcctgccgggtctccttcctgcagatcaccgggggcgccctggaggagtccctgaagatctatgctcctctgtacttgattgcagcaattctccggaaacggaaattagactattatttacacaaactactccctgagatcctacaatccgcttcatttctaactgctaatggggccttgtatatggctttcttttgcattttaaggaagatacttggaaaattctactcatggactcctggctttggtgccgctctgccagcatcttatgtggccattctcattgaaagaaaaagcaggagagggctgctcacaatttatatggccaacttggtccttttgttttgcatcacagctgccatgtacatgttctttttcaggtgcaaggatggcttgaaaggatttacattttctgcacttaggttcattgtagggaaggaagaaattcccacacattctttttcaccagaggcagcatatgcaaaagtggaacaaaagagagagcaacatgaggaaaaacccggaagaatgaatatgattggtctagtcaggaaatttgtggattcaatatgcaaacatggaccaaggcatagatgttgcaaacattatgaagataattgcatctcttattgcattaaaggtttcatcagaatgtttagcgtggggtacttgatccagtgctgcctccgaatcccttctgcatttaggcatctgtttacacagccatctcggctactttctctcttctacaataaagaaaacttccagcttggagcttttcttggctcttttgttagtatatacaagggtactagttgcttcctgcgctggatcagaaacttagatgatgaactacatgctattatagctggatttttggcaggtatatcaatgatgttttataaaagcacaacaatttccatgtatttagcgtccaaattggtagagacaatgtatttcaaaggcattgaagcagggaaggttccctattttcctcatgcagatactatcatctattccatctctacagcaatttgcttccaggcagctgtcatggaagttcagactttgagaccatcttactggaagttccttttaagactcaccaagggcaaatttgctgtcatgaaccgaaaagtccttgatgtttttggtactggtgcatctaaacactttcaggatttcatccccaggttggatccaagatacacaactgtaacaccagagttgcccacagagttttcctgaagatgactgtaacttattaatgtgactaaatgtttcatcttgaagagttaattatgttgaacacaaaggagggggcccaagctcgaacttcagtgttatttcagttagagatactcttttcatttgttttgtttttcttatgaatcagaaattcagaagctttttaggaagatgttgcttaataattaagcttcctccatagccagaataagattctggatcactgtagtgactgacattatatattattgatcaaattatgtccacaagcaatattatataatctacgtagaagtgtaataacaaacaagagtacacttaaaattactttaaaagatgtctttagttcattccaatataattcttgattaaaattaggattatttctacattttaggatttacaaaggatcacgggtacatggatttggtctatatatttttttaaagttttgaattggtatctgtagtagtggaatgttatagatttgaagtaactctccacggacagtgctgctttcgtgtagagcaatttaattggagaagtggccattcttacttcagggatgcaaagatgggtctcataccatttggataaatgtcgtggtatccatgctttttttcaactaataacatcatctctcttcatgaccagttaattgggctatttggcagcccagtgaacctatgtactaatggcaagttaggggcaaatggaaatggacacatccgataaagttgaaatgtatgttttaatctttcacagaagtattacacttgaatatttaaaaacaaaacttttaaacttcctataggtttatgatgtttgttttcatttatatggacataatccttcatagctcagtttatatgccattgttgtattagaagggatcaaaatcctatggaacaaagtagtcttggcaagttggcagtttgtgtcctctcagctgtttaacttatgtaatggatgttttgcacctgaaaacactataaaaatccagtggttgtttaaaaagtccatttgtcactaattccattcaggttctccaaccttcttcttgaatatcattgtcaccatttttactgttagaataaagaggtgacaccataaagtcctgctgataatgagagtagttcaggacagctgtgattgaaatatggtcgctatttacagtttttcagggaaaagttatacttttctatgttaataaagagctgaagtggtctacagttaatgtgacatgtagggatgatgatatttttaaaatacattttgttgctaaaaagtttttaggccagtgcaaattatgcagtagaacttgtgttgcaaaaggaattataacccatactttaaaaatgcttaatccctcatattcaatttcatcaagccttgtatacttctgcttaaatgtaattcaatccttggttgttatggcaaacagaaacccaacaaaaagacagactctggtactatggtaacagagccactttatcatttggtcaaaatttggcattatgattagctttgtagaactgacctgtttatttggcaatgctgttaaaggatcatttcggtttcagacttcaaagttgattaataaatttaatcttaactttttattcactggaatcaaaacgatggttggtactgtgtttactgtttaaaatgaagtactaaagccctgagaactgcacctcattttctttatccagaaattgtgcttatatattttcctgtcaggtttaaaaagatgttttaattcataaattattgttttcattgacattaaaagactgtgatattgaaagatgaattacgaaatttgctgagattgtttagtaaaattttgctggtcaaaaaggtgtatttctacaatttaccttttcatttttataaattgcagtcatttttttaaattttatgtaaaatgtaaaatgaaatagctatcatgaagcagaatacaatgatgaatgtataggttgagtgaataaccaatttgcagtggtggattgagaagtccagtttgatttcattgggacagactgcaaagtgtagttgtttgagcaaacacaaagaaactttgtgtttttgaagacaatcagaatgattacctttctacctctaactaatcaggtattgattgacaactttttggcattataaataaagtaaaatagatctctgcattccaaaatatgttttttagtttatttatatcctgaagaaatggtaagttttcactggaactgattacagtaaacaataatatgtccccttagtctttctgacatttttatatagattgagattgaaaaaccgtgcatttggggcagtggtattatggtcatttcgttgctattttctgttttaataaaatcctagaactagtagcaaccgagtaaagattgagtttgcaagataacagattgtctcaaatctattcaattctcagcagtttttcatcaaataatttcaggatccattttattactcatttttgaagtaacacctttggtttagttttattttcccataaattctgcttttgcttctgtaacttttttcttgaactataagcatagtcatcactcagttgatatctagtttattttttgccttcattcgttgtttagtcagttgttatttaatttagaattttatatttttttggctctcagattttataatgaacttttattagactgaacatgtatgtttttgatggaatccaaactgagcaaatgtcacacagtattttcttgttgtgctcgagtgttcgtctccttgtagattgtatctaggctaacatttcatttagttgttaatgctgacgtaattgtttcctgcttatattttatcatatccctgagcttctgtgtgctctacatttcataggtaatgaaaagcaatgtcctttactctcagggagcttcgtccacttgcctgtgtcacaacctctcccttggtgctaattaggaagcttcttgtgggactgaagggaactgaccactggagcaatggcccaaatgttgtttttggagcagagaaattattagcccagagattccttaaattctccgtgtgatttatttttttattttttgagttgaggtctagctctgttgcccgggttggagtacagtggtgcaatcatagctcattgaaacctcaaattccttggttcaagcaattatttcccctcagtctctaatagctgggacaacaggcatgtgccaccatgcctggctaatatttattttatttattttttttttgtagaaacaaggtgttgctatgttgtccaggctggtcttaaactcctggcctcaagtgatcctcttgggttggcctcccgggactctgggattccaggtgtgagccacggtacctagccatatttttatttgtatgagtattaagtagtttgacacagcaacaaagttgtcctttgtttcccaaaggcaaaagtatacatttcttactaagatatcttataaacattctctctcctaacacctccttctagtaatcattttcacatagtagaatacttcactcagctgaaaatgagtggccaagaaaaaaatacaagaaaaggaataagaagtgattattttctttagggctgcactttgaatgtgatgagtaataaggttaccttcattgtggaggtgatgtttacaattgcctccagccctttactattggtgctgaagccaccattggtgccagctctataatttcttcttcttgtggaattaacaaagaaaggagtgtcaaggactgagatgaccctcagattggggggctgtcttagattctagggctttgtagtactatgtttctgtttaaagtagtggcctcaggtgactttgtaatagccctgtagttgcaaaaagggtaactacaaagaaatgaaactgactctagtgtgtgtgacttctggaaacagaagtggggcagtaagttggccatgatatagctagtgtcataggactacagcagagtagtgagtgaatggccttaagcttacagctgtggtgaataagaatgtgtgctattttacacacagaagaaaatgattgacttttggttggaggaaagaatttatatctggtcttttggaaattattctgttgctgttttatgtgggctctctctctctccctctctctctctctctgtctgtctctcttgctgctccctctccctgccaccttgtccattctctgcttgctggtgttactttatgttaactagtctccttggacttcattgcaaccttttaagccagccgttcaagtgagaggctctggagtgatcataacggtgataacaatggagtaaacatttccagagacactgattttttttttatatgctctgtttttcttaggcaggatgatgtagaagataattgcacagatatggaaggagatgtttctctgtatgtgaagcctttaaatccagaacaattaatttcttctcttcttaaaaccccgtaacatcacttgactctggaatttcctattttcttttactttctccattttttttccatctgtccctcctacgaatatgttttacatgaaataatgtattgggttttatcttttgtcccagcagacctgaaaatcccagtatattaccacagacacacataccatctggtcaccaacagggacatcagggccaagagcagtttatacttctttctttagctcacaaactactatagcttgcctgttcagttttttttttttttaatattcagttttgtgccatactctcccccacccccagcctgctgcctctgcagagcataacattctaatcttgtcagaccgtggataataggatgttccctggtcttggcatagaggccataggcatacaacatgctttatctgccttgcttagactcagcatccctttctgtcttgagagattcaggcttccataaagtagacctgtagacctatgttggctgaggtcaccctgcattactactttcctccatccctgaactaggaccagttaattttcgaagtctagttcttcagtgtctattaaactttttccagtagttaatcgatctcttaaattaattttcttttcagattatttttggtcacctaagaggaccctgaagctatagtgccaaaggtttaaagcatgaagtacattctgtggttggtcattatgggattggatgccaaaaggaatgggagagaagagactataaacatattttaagccttatctcttttctcctattcttttctttacctttcctggcccatgctttcctgccatatctttgctatgtatttcttcatcttgagctctcaagggaaaaaacaggagtccttatttttctatttatttcagggaaaattgaaggtaaataatatctgcaaagcttcaggaagaaattcagttgcatctgaatctgagtcggcagtttttgatagcctgtcactgctcagggatagcactaaggctctcttcagaaccaaagggcaggataaataaatctatgaaactagaggcatcattgaatcatctgaggacctttttttttttttttttttcactaaaacgcttcctataacttggattaaaattcaaaaatgggattgcagtcattgttaattgctcaactagtggcagtttttccttgctgagggaacactgatgttgtttaagacagttacatgcctagccccagggatgaatcataattgttctaggcctttcatgtctttcctttcttcttgtccagatacttttccaaccagcctttactcggaggtgttcatgtgaccctgttttggccaataaaatgtaatggaaaatctgggaaacacttgggaaaaatcttccctctctgcttaaaggaaagttctttttacctctttttctcttgttcaaggtattagtattagtcagtagggtctgaatctgtggcagcaatcttgcagacatgaaatgaaaagtacaaacatgaaaaaccagcatattaaagatgccaggtcagaaaaatagaaagaacctgcttctgtgagccactgaatggtgccattaaccatctgcatttgagcattttgagaaaataaacctctatttcttaaagttctgtatcagtcagggtttcccagagaggcagaacaatagggatagagagatacatagagagagatatgagagggatagagagagacacagagagagatatgagaggggattaagggagttggctcatgtgattgtggaggctgagaaaccccaccacaggccattcataacctggagaccttgggatgctggtggtctggctcagtacaagtccaaaagccttggaaccagggaaactgatggtgtaattctcagtccaaggctgaattttcaagtctgagaacctgggggtgggatgggggagtgatagttttaagtcctggagtcccaaggttagaggatctggggtcctaatgtccatgggcagttggagaagagtgtatccctgctgcaggggagagagagaagccaattctcctttcttctgtttttattctacccaggcctccagtggattggaggtgcctgcccatattgagggcagatcttctctgcctagtccacgctaactcacatgccaatctcctctggaaacaccctcacagacacaccccaaaataatgccttaccagttctctagatattccttaatccagtcaagttgatgcctaaaattaaccatcacaggctttatggctctattacccaagaattctgttactttcagctgaaaacatttctaatggacatattccaattctgtatagatcagatctcagtttcatttcccattatatccttctctctcttgatttagaattctctttttctccactcttctgtgtatgctaaaatactgtcaatctcgtctttgaaggttttgctcatctttaaaaaatcttagttgattatgttttatgtgtcatttaattaaggaatgaatttgcttatttttatttcagtagcttttggggtacaagtggtttttggttgcatggatgaattgtatattggtgaagtctgaaattttagtgcacctgtcaccagaatagtgtgcattgtacccaatatatagctttttattccttccccttctgagtctccatagtccattatatcactctgtatacccttgtgtatccatagcttagctcccacttacagttgagaacatacagaatttgattttctattccggagttactttacttagaataatggcctccagctccatccaagatgctgcaaaagacattatttcatcttttattttttatggctgagtagtattccatggtgcatatataccacattttctttatccactcattggtctatgggcactttggttgattctgtatctttgcaattgtgaactgtgttaacaataaaaatatatatacgagtgtcttttatggtaaaaaaaaaaaaaaaaaaa

SEQ ID NO: 11 - DNA, 2431 bp, Homo sapiens
atcttttggtgtccggacatggccttggcactgtagcatgtggacagccagtgccatggatttcagaacctgcattgccagttgactgcctgctttgtgctacgtgcaggcctgccgcgccctgatgattgctgcctcggtcctgggtctgccggccattttactgctgctgactgttcttccctgcatccggatgggccaggagcccggtgtggctaagtacaggcgggcccagctggctggtgttttgctcattctgctggctctctgcgcccttgttgccaccatctggttccctgtgtgcgcccaccgtgagaccaccatcgtgagctttggctactccctgtatgcaggctggattggtgctgtgctgtgcctcgtgggtggctgtgtcatcctctgctgcgctggagatgcccaggcctttggtgaaaaccgtttctactacactgcgggctctagctccccgactcatgcgaagagtgcccacgtataagagggctgcccggctgcccacagaggtgctgtagatgctgggcccagggccctaggtttgctcgtcacagtgtggggaagcccattcctctgccaggctctaaagccaaaggtctagaaaagcatcctgtctggcattttgtagtcttaacttctccccatttcccccatcttttggttgccttaaaagaaatctctagctcagataatgcccagacatttttttcccttggtgttgcccctattagctcttttcttgggcattcttttgctgtttattaaaaatatattatatatattttgtttctttaaatttcaaatgttttgcaaacatcactgagttaggtgggggtggggaagagaaatacaagatacttttttttttttttttttttttttttttttaaatagggcctcactctgttgctcaggctggagtgcggtggtgtgatctcggctcatgtagcctcaacctccccggctcaagtgatcctcctgcctcagcctcccaagtagctgggactacaggcgttcactactacacccagctaatttttaagttttttatagagatgagggctccctatgttgcccaggttggtctcgaactcctggactcaaagtatcctcccgcctcggcctcccaaagtgttgggattataggagtgagccaccacaccggccaagatgcttttcaaactgatacagatgacaatgggagcctcataaagatggcttttgtttcttcccttcaaggtcatttacttgtacgagacagaaaaagatagcattggggacatgggatgggggagggagggcaatagtggaacgaactttccatgggaaactttcccttttgtaagttgagggccaggggtagggatattttttagtttgtgattttacatttatctgtacatactttttcaagattgatcatttttataaccatggttttcctgaaatcctcaattcatcaatatgaaggaaatgaaccacatagactttatgcaataaataacagtgcaagtgagtataactctaactgatgttccacaaaacatttttgatttcaggtttgtatgatgtagtttttaatcgtacattttcatatgcttcaaactaacacatttttaaagctttcccccacttttctctctatttgtattgttagccatcttgaagtgatgttgtttaacataaattgtactgttgaatttggctttacgggtgtaaacactgatggtatatcagtatctgagaccccaaactctccaaatactgatggtgcattttattcttgaagtgaaatctgtgcaataaaataacagactgtctgcaaaactggccttcaatcttctgttgtatccagaggtatcattattgatttaaaaaaatctcattaatctctactggtaatttatagggaatctgatcagtgattcaagaacaagtaattctgcattgccttgaataattaaaaagttatattttattcacggtattgcagtggtaatttgtggtcatgaaagcataacctcagtgctctctaggtttcttaagtggggtgactttatggcatctttaatcatcgatcaatgggcagcaatcagaaacaaagttctcagcattatgcagttaatgtccttcatctacttctaacacttagtaaaggaattgattggctaggtataaaaagagaattaacgaaacctattttattggatctttaagtaataatatctaaatacatttcgttcaaacatacatatgtagctgtttggacattttggacaaagacacattgagttgatttttatttgtttttctgttccagaaacttcatcaagttacgggcctggtctaagaaaacacattgcaatctattttggcagacttctttcaaataaaatactaatttcattagctgatagta

SEQ ID NO: 12 - DNA, 12086 bp, Homo sapiens
gactcccccctttgtgtctggtctgctcggagccactggaagtgcctcccggagggacgcagggtgtctcgccgcctccctgcccacccccttccccggctaccttcatccgccctcccgccgccccccgccctcggtccgcgacgcccgagttccgtcaggagcccagagctgcgggagaacgaggcggcggcggcggcggcggcggcggcggcggcggcagcagcagcggcttcctcggggggttgtgattcgctcacaggagccattgacgggagaagaggaggctttcttggtggaatttacctcaggcaagatcgagccgcaggaataaaaagcgaggaagggaagggagcgccgccgggaggactagaaggggcagcctctcacacccactccgcctgccgtctcggggagcccggaccggggccgcgaccgcgacccctcccctcccccgctcctacctctcctcagccttcgccagggcctccccaaccctctcacggttgttctgcgaaggcgtggggactgtgagcttgtccatggaggcaggcaccttttttgatccagtcaaggaagaggatttgttgttttcgaaatcagagtgaaggaagcaccgaagcgaaacttaaggaatcctgccttcccggagccgcgggcgatgcgactagggctgccgggcgccgccgccgcccgtccggcttcgtccttcccggcagtcgggaactagttctgaccctcgccccccgaccccggatcgaatccccgccctccgcaccctggatatgttttctcccagacctggatatttttttgatatcgtgaaactacgagggaaataatttgggggatttcttcttggctccctgctttccccacagacatgccttccgtttggagggccgcggcaccccgtccgaggcgaaggaacccccccagccgcgagggagagaaatgaagggaatttctgcagcggcatgaaagctctgcagctaggtcctctcatcagccatttgtcctttcaaactgtattgtgatacgggcaggatcagtccacgggagagaagacgagcctcccggctgtttctccgccggtctacttcccatatttcttttctttgccctcctgattcttggctggcccagggatgacttcctcgctgcagcggccctggcgggtgccctggctaccatggaccatcctgctggtcagcactgcggctgcttcgcagaatcaagaacggctatgtgcgtttaaagatccgtatcagcaagaccttgggataggtgagagtagaatctctcatgaaaatgggacaatattatgctcgaaaggtagcacctgctatggcctttgggagaaatcaaaaggggacataaatcttgtaaaacaaggatgttggtctcacattggagatccccaagagtgtcactatgaagaatgtgtagtaactaccactcctccctcaattcagaatggaacataccgtttctgctgttgtagcacagatttatgtaatgtcaactttactgagaattttccacctcctgacacaacaccactcagtccacctcattcatttaaccgagatgagacaataatcattgctttggcatcagtctctgtattagctgttttgatagttgccttatgctttggatacagaatgttgacaggagaccgtaaacaaggtcttcacagtatgaacatgatggaggcagcagcatccgaaccctctcttgatctagataatctgaaactgttggagctgattggccgaggtcgatatggagcagtatataaaggctccttggatgagcgtccagttgctgtaaaagtgttttcctttgcaaaccgtcagaattttatcaacgaaaagaacatttacagagtgcctttgatggaacatgacaacattgcccgctttatagttggagatgagagagtcactgcagatggacgcatggaatatttgcttgtgatggagtactatcccaatggatctttatgcaagtatttaagtctccacacaagtgactgggtaagctcttgccgtcttgctcattctgttactagaggactggcttatcttcacacagaattaccacgaggagatcattataaacctgcaatttcccatcgagatttaaacagcagaaatgtcctagtgaaaaatgatggaacctgtgttattagtgactttggactgtccatgaggctgactggaaatagactggtgcgcccaggggaggaagataatgcagccataagcgaggttggcactatcagatatatggcaccagaagtgctagaaggagctgtgaacttgagggactgtgaatcagctttgaaacaagtagacatgtatgctcttggactaatctattgggagatatttatgagatgtacagacctcttcccaggggaatccgtaccagagtaccagatggcttttcagacagaggttggaaaccatcccacttttgaggatatgcaggttctcgtgtctagggaaaaacagagacccaagttcccagaagcctggaaagaaaatagcctggcagtgaggtcactcaaggagacaatcgaagactgttgggaccaggatgcagaggctcggcttactgcacagtgtgctgaggaaaggatggctgaacttatgatgatttgggaaagaaacaaatctgtgagcccaacagtcaatccaatgtctactgctatgcagaatgaacgcaacctgtcacataataggcgtgtgccaaaaattggtccttatccagattattcttcctcctcatacattgaagactctatccatcatactgacagcatcgtgaagaatatttcctctgagcattctatgtccagcacacctttgactataggggaaaaaaaccgaaattcaattaactatgaacgacagcaagcacaagctcgaatccccagccctgaaacaagtgtcaccagcctctccaccaacacaacaaccacaaacaccacaggactcacgccaagtactggcatgactactatatctgagatgccatacccagatgaaacaaatctgcataccacaaatgttgcacagtcaattgggccaacccctgtctgcttacagctgacagaagaagacttggaaaccaacaagctagacccaaaagaagttgataagaacctcaaggaaagctctgatgagaatctcatggagcactctcttaaacagttcagtggcccagacccactgagcagtactagttctagcttgctttacccactcataaaacttgcagtagaagcaactggacagcaggacttcacacagactgcaaatggccaagcatgtttgattcctgatgttctgcctactcagatctatcctctccccaagcagcagaaccttcccaagagacctactagtttgcctttgaacaccaaaaattcaacaaaagagccccggctaaaatttggcagcaagcacaaatcaaacttgaaacaagtcgaaactggagttgccaagatgaatacaatcaatgcagcagaacctcatgtggtgacagtcaccatgaatggtgtggcaggtagaaaccacagtgttaactcccatgctgccacaacccaatatgccaatgggacagtactatctggccaaacaaccaacatagtgacacatagggcccaagaaatgttgcagaatcagtttattggtgaggacacccggctgaatattaattccagtcctgatgagcatgagcctttactgagacgagagcaacaagctggccatgatgaaggtgttctggatcgtcttgtggacaggagggaacggccactagaaggtggccgaactaattccaataacaacaacagcaatccatgttcagaacaagatgttcttgcacagggtgttccaagcacagcagcagatcctgggccatcaaagcccagaagagcacagaggcctaattctctggatctttcagccacaaatgtcctggatggcagcagtatacagataggtgagtcaacacaagatggcaaatcaggatcaggtgaaaagatcaagaaacgtgtgaaaactccctattctcttaagcggtggcgcccctccacctgggtcatctccactgaatcgctggactgtgaagtcaacaataatggcagtaacagggcagttcattccaaatccagcactgctgtttaccttgcagaaggaggcactgctacaaccatggtgtctaaagatataggaatgaactgtctgtgaaatgttttcaagcctatggagtgaaattattttttgcatcatttaaacatgcagaagatgtttaaaaataaaaaaaaaactgctttatcctcctgtcagcaccccctcccacccctgcaacaaagacttgctttaaatagatttcagctatgcagaaaaatttagcttatgcttccatatttttaaattttgttttttaagttttgcacttttgtttagtctcgctaaagttatatttgtctgttatgaccacagagttatatgtgtgtgtatcaaaagtggtctcaaaatatttttttaagaaaaaaagcaaaaacaatgtattgctgataatcagtttggaccagtttcttaaggtcattaaaacagaagcaaattaagacaggtttgactgcagtggtgtctggtatccatgttttatttctgggcacaagctagtttttatgttgatacgttcctgaacatattatcttgttggacatcttttctcttgtgttttgtttgaatgtgcaatagtttataggccacaaataagctttcttgtaagctctcttcctaacagggcacatattcttccataatataaacacttttctgccccatctcccatacttttgaaggtcagttctatgacagtgaattttgcacaggagaagcagctacctgatttcttactttctctctccttatcatggagaatacagaaacattgtctgaaagggctctaaagaaggaactaccaaaacctgacttgaaatgccatttcttttaaccttccaaatcctaaatgtttccttcaaggcatcttaataaacttatttgcttctggttttgggagttcataagagagaatagaacaaaatacaggacatcaaatattagccatttcccattttattttatttttctatgtaggttcatgttccatgttcatttatttaagaaatacatttttattggtaagcttatagagctacacttatggaatttttaagtaggtaaataaatggttaagacaaaatagtgttatagccttcattctctgaataggccatctttgactcataaaattacccttactgtttattataacttcagaagtaatttatagttctgaacctatagtatcttttaccctgttcccaagcaaagactggtgactttatctgaaaatgattcctcttcccatgacctaaaacactgtgaggaaaaatcattcaagtggcatgccaagtccctatgaaggaagggctgctatcaaacctaccttttttgagcaaactgagactaaacttctctcttttcaaaattgtgttatcttccttaatcctattttcataatttttccttttgccagtttttcacattatctttgatatgtgagcaacatttattatttacattagagtataccttttagtaataaaatgacttgaaatcatattatttttaaaagccctttgcttctttcattacttataatctcctctaaaacaacctctgcatgttttttttaaataaagcactttctgtcaaataatggacttttttctaaacagaaattattttctattaatttgcaaactgatgatttcacttttttttacttttttttcgattatcagagtacttagtaaatgttatatagtttagttctaagatagttccagggattaaaaggttaagaggaaaacacaaatcaccaaatttctgatttatgtttttatctcctgaacaatattttctcactcatattcctctatcttatcacttagctaaagacagcctaaatttcccaattttctgtccaaaatatttgtgatttacttgtatataagccttctcatttgccatgtgctgtgatcttacaagttagatgttactatacctaccatttattcagctggattgctgaacacagttctggattcatagaattaagaatatcttgttagtgcccaggatttccacgttttgtgttttattggcccttttctttattcagccccttaatctattttcagtcttctggcacgtaatttttttcacagttattattcttctattaacaaattatttttatctttcctagtacattttcacttagttctcttgcccttaaatatctttcacatgcattttaggatattcttttcaaatatttgtaggacaactttgaatcaaaataaattatgttccttctccaatttgaagcattgaggataaatgaccatttgaggtctaactgatcttttcctgccagaagagttatcttacgttctgctatatttgtatttgggccagttgattgtaggttgtccaacattttttaatattgggaaaattatgataaaatgctttaaaaattaatatgccagattaaaataactgaatagtttactatttcattcaagcatgtttaaaacaaataatttcctttcaccagtttttcttagtaaactcctgaaaaagtaggaaaggtggaaagtatatatcatttttataaattttaaattgtacatcagacttttaaaatctgtaatatacaagcaagcaaaattattttaaatgacttaattgtatgctaatactcatctgataataaatgcttcttaaagttgacatttaactgctatcacaaagttttatatgtagaaaagtggggtccttttgaataaaagatcattcaactaaaaatattaaaatttatttcactggatggtaatgtaaccttaaaagcatcataataggtaaagtctaatattagttcccttaacaaaatcctaactgtataccagaattaggtcactgaaagaacttgatttgaattacgtttagacaaaaatgatttaattgtaaattcttaaaactttctaaatgcataattggcaaaaaaaaaaacccactgttaccagtgtaggaagttacaagaaggcacatactgaatgctgaagtatacatatgctatttctcttaaacctcagagcaaccatatgagcattgtaattaatattcccattttacagatgaggaaactgaagctaagagaagctaagtaatatgcccaaggtccacatctagtaacagacaaagctgggatttcagtctatgtctgcctctctccacatctctttcatccataccacactgcctacatgccatatgacaggatgtgtaatgggctaacgtttatttaaaaagttcaggccaggtgcagtggcttatgcctataatccccgcactttgggaggccgagccgggtggatcatgaggtcagacgttcaacaccagcctggccaagatggtgaaaccccgtctctattaaaaatattttttaaaaattaactgagcgtggtggtgggcgcctgtagtcccagctactcaggaggctaaggcaggagaatctcttgaacccgagaggtggaggttgcagtgagctgagatcgcgccactgcactgcagcctaggcgacagagcaagactgcctcaaaaaaaaaacataaaaattcagtcactatactctggcacaattttcatttgtatatgagccaaaccacataccttaatgatttgggaagttaggcaaatatgagatatgtagacatatctatgctgattgttgcttgagaaataattactaattctagacaaaactcaatcctgtatcttccatcatgaatcttaaaatcatttcacttcactcctaacatttcttacattgcagaactaatggtaaagtaaattttacggaaaaagttaagatagctttgggaacagagacctttccctaaattgattccatagcagatttgggggaattaacaaagaatttcagtctcatcaatcctttgaatccatcttcaaaacttctgcttttaataactttagaaaatttactaatctatagaactaattgagtaggatataggaaggatacaaggatataatgtcctttttataaaagtttagtatagcttctttacatgtatccacttgttccagaaaatgtgcattggttctgaatgtgaaaatatttaaagagagaaaggaacactcaagtaagtgtgggcttcagtgggaattatcacaaaacattggcaagtatttttatttaaattattttcaaatttgacttctacagccaagtggaattggtaggctgtagctgttacactgaaatttctagtctttgtaagtgcctcctgaaagtcatttaaaatggaaaaatatttcaatgagcttttccttttttcatatttatggacatgaatattttattggagatcattaactcctagaatttgagattatatttccatacaacattttataaagttatgttgaacttactacctgttatgtgcaggttattatgtaactattcacagattgcttcatatattgctttatcttcccatctaacttcttaaagttaaaatccggacacacatgttgattatctagaccagtcattctggaaattgtaacactcccacataaaccccaggagactttttcagaatgcaatgtttctaaatgtactgttactggcagtttactctccagcatataaggttgcattttaacttttagattatgaactgtgcaaactttacccaaaactatcttgcatgattccctcctaaatatattccttgattaagtaaatctggcaaatcactgtttgagctagttacataaaatttgttatcaagagaaggcttttctacaagtttccagattaacataaagaaaagagggaatcacagggcatttaagtgcaccttcccattactttccttaaatcacctcatagttaggctgggcgcggtggctcacgcctgtaatcccagcactttgggaggccgagacggtggatcacgaggtcaggggactgagatcatcctggctaacacgatgaaacctcatctctactaaaaatacaaataattagccaggcatggtggcacgcgcctgtagtcccagctactcgggaggcagagacaggagaatcgtttgcacccgggaggcggaggttgttgcagtgagccgagatcgcgccaatgcactccagcctgggctacagagtgagactccatctcaaaaaaaaacaaaaaaaatcacctcatagtttatgtctgacttactccaaacctcagttatctgatttgtagtctgtgtcaggaaagttttcttcatatctattctgtctccctcctctttgattttaaatttttttcttttacccagtaggacaaaaaagagcagttggtcatcatccccaatattcttagtcttcagtatgcttcaggcctctcaatgaacacttaagtctcaattcttcagacaaaattgcttaagctcttctcctcagtcctattttaatgactttatatttaagaatatagaattatattttcttttatattcaaattcattactccagttaagtaatagtttgatagtttgatagaatcgagagttaagatgtttctatttgaaagtggattcaaccatcagaccaccagcaaatcggcacttaatttttgtgttatctaacattttctattgtggaattttatgattttatattctcattagttataactaaaaagccatgcacacagaattgtatatcattttgccattaaaattttttaacatattgcagcaagcttagttttatgattgagccacaaccttttacatattttttgtatgaaatattaaacactaaatgcaagattaactttcaaaagcaaaccctacattaatcaggtattatctatggacatttttgtagaccacttttgaaatacttattattttgcaacatagactggactatacaactttcatttaacttttaggtgactgatttaagttgagtgtgcatatagagaaaaacctagaaatttatctcatggcagatacatttgaaagtacttcagaagaatttatgctgtatattaaaactaggctcaaaataaatctatcgtatctttaaaagtccaattctgttattactgtgatgtttgtagtgttactattaaacattgtgaacatacacatttttaaaacaacttgaaacccattttaaaatctgggtaagagagaaggaatcttcagaacaaaatcacatcattagggtgtccagtttatgattgaatttttaagcaaattactgtatttgaaactacaacttgatttggttttcagttttaaaaggcaacatgtgggttttatccattttatttatacctttagatttcagaaacatcttcatgttttagatgcattctacagacatcatgttacttaaaaactcagggcccctttcatccctttgtacactgaaaaagttcaattgttagcaagtaagcaattagatccagttgaatatttaaagtgtttgttgcacagttcatttaatgtttcatcttatttgactttttcacatagatataatatcagatttcattaattataaaaagttgcccagttctgtaattactgaacagagggaatgactcaactaattggctacatgttgcaacaaatttaggcctttagagttgaagcactgacttaaaacgacttacatttctgttctttggtcaaatgaccatacatgatatgggacaaattgtttcattttgtttgttttttaataagggaacttggtaaagtagttcctgtcagataggattttctcaagagacaatttaacgttataaagccttctaaaagtgaactaaatattttataactttagtaatagcttggatggttttgagaaaataacctgtatttatcacattgtcaaacagaatttttctttgaatcagacaagttcaagctctaaattgatgtgctatatacttaaaatcctaggaagttatctgtaaccagtctcttgtctcaggctcttcaccttgttaccaatcctcgtaagtatgtaaaggaaacatatttttaaagaagcttaacagtaagaaaaaattactaaaagatgcaattcaaagataggtcccagtttaacactgaattgcttgacttctgtggcttttctttttctggccacatttatttatttaagcaatttttgtatgccttgttatttcatttccatagagattatattgtatcagtgtttatgtaagctggaatcatcctcagttttttgctgataatttttcaaataaagatacatggataattgtaaaatacactaactcttagggtgttgtagtagctgaaacatggagatgcgtagctgtcatgctttttctgaatggacaggagaaacataagctacggagtattcacttctgaggatgcttttccggaaaaagaaaggctagaaaatactcgcacttcctcagaaccctctttcttgttaacgggtatcttttgttggtgtgttttgctcttacattacagatagactatcatatatgactttatgaataatttcagttattttgcttttgtataagctgtctgaagccttgctatgctgtataagttgtgtttgatggatcagtgtgagtataaaataaagcaaatcacttttcttttgtattatctatggatgccactatgaaagctgacattaagccactaaagagttttctatgaataagtgtaagtaaatgctttgatatatataaacctaaataaaaagattgtattgatacagagacattggagaaggagattttaaggcagttctttaggtttaaaaaggcttgctgtaaaatggtgcgttattccgtttattaaagatcatattaatgacaataaaaaaaaaaaaaaaaa

SEQ ID NO: 13 - DNA, 2838 bp, Homo sapiens
gggcgcagagctgggccgagccgtcgccggcgccacgcgagtcccgcagccgccgcgcccgggcaatgggccgggggcactgagggccgccggggccgagcgcggaggggggaccgagccagtgccgtgccctcgggccgcgccaacatgccccgcggcttcctggtgaagcgcagcaagaagtccacgcccgtttcctaccgggtccgcggcggcgaggacggcgaccgcgcactgctgctctcgcccagctgcgggggcgcccgcgccgagcccccggcgccgagcccggtccccgggccgctgccgccgccgccgcccgcggagcgcgcccatgcagcgctcgccgccgcgcttgcctgcgcgcctgggccgcagccacccccgcagggcccgcgggccgcgcacttcggcaaccccgaggctgcgcaccccgcgccgctctacagtcccacgcggcccgtgagccgcgagcacgagaagcacaagtacttcgaacgcagcttcaacctgggctcgccggtctcggccgagtccttccccacgcccgccgcgctgctcggagggggcggcggcggcggcgcgagcggagctggcggaggcggcacctgcggcggcgacccgctgctcttcgcgcccgccgagctcaagatgggcacggcgttctcggctggcgccgaggcggcccgcggcccgggccccggccccccactgccccctgccgccgccctgcggcccccgggaaagcggcccccgccccctaccgccgcggagccgcccgccaaggcagtcaaggccccgggcgccaagaagcccaaggccatccgcaagctgcacttcgaggacgaggtgaccacgtcgcccgtgctggggctcaagatcaaggagggcccggtggaggcgccgcggggccgcgcggggggcgcggcgcggccgctgggcgagttcatctgccagctgtgcaaggaggagtacgccgacccgttcgcgctggcgcagcacaaatgctcgcgcatcgtgcgtgtggagtaccgctgtcccgagtgcgccaaggtcttcagctgcccggccaacctggcctcgcaccgccgctggcacaaaccgcggcccgcgcccgccgccgcccgcgcgccggagccagaagcagcagccagggctgaggcgcgggaggcacccggcggcggcagcgaccgggacacgccgagccccggcggcgtgtccgagtcgggctccgaggacgggctctacgagtgccatcactgcgccaagaagttccgccgccaggcctacctacgcaagcacctgctggcgcaccaccaggcgctgcaggccaagggcgcgccgctagcgcccccggccgaggacctactggccttgtaccccgggcccgacgagaaggcgccccaggaggcggccggcgacggcgagggggccggcgtgctgggcctgagtgcgtccgccgagtgccacctgtgcccagtgtgcggagagtcgttcgccagcaagggcgctcaggagcgccacctgcgcctgctgcacgccgcccaggtgttcccctgcaagtactgcccggccaccttctacagctcgcccggccttacgcggcacatcaacaagtgccacccatccgaaaacagacaggtgatcctcctgcaggtgcccgtgcgcccggcctgctagagcgcgccctccaccccggcccccgaactgtgccttcgcttggagacccacaaagagagtgcgccctgcacgccccgaacccgagtccgcgctgggggagcctcgcccccgcccccaccgggtgaaagtgtcgtctccgcttctctcggtgtggcgtgacggtaaccccatactctccttttgactccttttggaacccccacttttacgttgtgtccctccgcctcccccatggcgcaacaggagtcagtctctttctgtacaagggagaaaagctgtacgcgtttgtctcgtggttggaagcctccccttggcggggagaagctttttttcttgctagtattcgctgtgttcatggtctagaaatgcggtctggtctcgcctcgcctaccaatctctgctctctatgtatgtagcgtacgggttgttttgggtgaatcttgaggaataaatgcctttatatttcacaggctgtaaattgaacttcccacacgattagctttattatggcttgtgaactgctggagtctggctttacctttttgtatgtgaacaaatcaaattgcttaaaaaagagttttctttagtatagccacaaatgccttgaactgttgtctgggattgttttgtggggggagggaagggagtgttccgaagatgctgtagtaactgcctcagtgtttcacgtaagactttttggtttgatcatctttgttgaggtaggactatcagttccctctaaatgtatatgttgatttatgagtaattgttatttattctttatttatttatattaattatgaagattatgatattatttgattgcagatttttttggcgcgctgccccctccccaccctgccactcttgacattccactgtgcgttttagaagagagcctttttctaaagggatctgcttaaagttttaacttttatacctatctgagtgaattacagacaacctatcatttattctgcttcgagggtccccagggcccttgtacaaccgacagctcttacttttaaatgcaatctcttttctacatacattattttcttaattgttagctatttatagaaagcttcaatagaactgtttcaactgtataactatttactattcaaataaaatattttcaaagtcaaaaaaaaaaaa

SEQ ID NO: 14 - DNA, 4991 bp, Homo sapiens
ggcggcgcgcaagggacgtgcggagtgagtggcgctgcgggtggggccgtcggcggcgctggtgagctttgcggagctgggcggtgccgaggaggaggaggtggcggcctgggtctgacgcggccctgttcgagggggcctctcttgtttatttatttattttccgtgggtgcctccgagtgtgcgcgcgctctcgctacccggcggggagggggtggggggagggcccgggaaaagggggagttggagccggggtcgaaacgccgcgtgacttgtaggtgagagaacgccgagccgtcgccgcagcctccgccgccgagaagcccttgttcccgctgctgggaaggagagtctgtgccgacaagatggcggacggggagctgaacgtggacagcctcatcacccggctgctggaggtacgaggatgtcgtccaggaaagattgtgcagatgactgaagcagaagttcgaggcttatgtatcaagtctcgggagatctttctcagccagcctattcttttggaattggaagcaccgctgaaaatttgtggagatattcatggacaatatacagatttactgagattatttgaatatggaggtttcccaccagaagccaactatcttttcttaggagattatgtggacagaggaaagcagtctttggaaaccatttgtttgctattggcttataaaatcaaatatccagagaacttctttctcttaagaggaaaccatgagtgtgctagcatcaatcgcatttatggattctatgatgaatgcaaacgaagatttaatattaaattgtggaagaccttcactgattgttttaactgtctgcctatagcagccattgtggatgagaagatcttctgttgtcatggaggattgtcaccagacctgcaatctatggagcagattcggagaattatgagacctactgatgtccctgatacaggtttgctctgtgatttgctatggtctgatccagataaggatgtgcaaggctggggagaaaatgatcgtggtgtttcctttacttttggagctgatgtagtcagtaaatttctgaatcgtcatgatttagatttgatttgtcgagctcatcaggtggtggaagatggatatgaattttttgctaaacgacagttggtaaccttattttcagccccaaattactgtggcgagtttgataatgctggtggaatgatgagtgtggatgaaactttgatgtgttcatttcagatattgaaaccatctgaaaagaaagctaaataccagtatggtggactgaattctggacgtcctgtcactccacctcgaacagctaatccgccgaagaaaaggtgaagaaaggaattctgtaaagaaaccatcagatttgttaaggacatacttcataatatataagtgtgcactgtaaaaccatccagccatttgacaccctttatgatgtcacacctttaacttaaggagacgggtaaaggatcttaaatttttttctaatagaaagatgtgctacactgtattgtaataagtatactctgttatagtcaacaaagttaaatccaaattcaaaattatccattaaagttacatcttcatgtatcacaatttttaaagttgaaaagcatcccagttaaactagatgtgatagttaaaccagatgaaagcatgatgatccatctgtgtaatgtggttttagtgttgcttggttgtttaattattttgagcttgttttgtttttgtttgttttcactagaataatggcaaatacttctaatttttttccctaaacatttttaaaagtgaaatatgggaagagctttacagacattcaccaactattattttcccttgtttatctacttagatatctgtttaatcttactaagaaaactttcgcctcattacattaaaaaggaattttagagattgattgttttaaaaaaaaatacgcacattgtccaatccagtgattttaatcatacagtttgactgggcaaactttacagctgatagtgaatattttgctttatacaggaattgacactgatttggatttgtgcactctaatttttaacttattgatgctctattgtgcagtagcatttcatttaagataaggctcatatagtattacccaactagttggtaatgtgattatgtggtaccttggctttaggttttcattcgcacggaacaccttttggcatgcttaacttcctggtaacaccttcacctgcattggttttctttttcttttttctttctttttttttttttttttttttttgagttgttgtttgtttttagatccacagtacatgagaatccttttttgacaagccttggaaagctgacactgtctctttttcctccctctatacgaaggatgtatttaaatgaatgctggtcagtgggacattttgtcaactatgggtattgggtgcttaactgtctaatattgccatgtgaatgttgtatacgattgtaaggcttatgtcactaaagatttttattctgattttttcataatcaaaggtcatatgatactgtatagacaagctttgtagtgaagtatagtagcaataatttctgtacctgatcaagtttattgcagcctttcttttcctatttcttttttttaagggttagtattaacaaatggcaatgagtagaaaagttaacatgaagattttagaaggagagaacttacaggacacagatttgtgattctttgactgtgacactattggatgtgattctaaaagcttttattgagcattgtcaaatttgtaagcttcatagggatggacatcatatctataatgcccttctatatgtgctaccatagatgtgacatttttgaccttaatatcgtctttgaaaatgttaaattgagaaacctgttaacttacattttatgaattggcacattgtattacttactgcaagagatatttcattttcagcacagtgcaaaagttctttaaaatgcatatgtctttttttctaattccgttttgttttaaagcacattttaaatgtagttttctcatttagtaaaagttgtctaattgatatgaagcctgactgattttttttttccttacagtgagacatttaagcacacattttattcacatagatactatgtccttgacatattgaaatgattcttttctgaaagtattcatgatctgcatatgatgtattaggttaggtcacaaaggttttatctgaggtgatttaaataacttcctgattggagtgtgtaagctgagcgatttctaataaaattttagttgtacacttttagtagtcatagtgaagcaggtctagaaaataagcctttggcagggaaaaagggcaatgttgattaatctcagtattaaaccacattaatctgtatcccattgtctggcttttgtaaattcatccaggtcaagactaagtatgttggttaataggaatccttttttttttttttaaagactaaatgtgaaaaaataatcactacttaagctaattaatattggtcattaaatttaaaggatggaaatttatcatgtttaaaaattattcaagcactcttaaaaccacttaaacagcctccagtcataaaaatgtgttctttacaaatatttgcttggcaacacgacttgaaataaataaaactttgtttcttaggagaaaatgattctgtaattccagtgtcactaatttatattgttctttcctctgatttttttcaggttagtgatttttttgtatacaatttaatccaaatgttatgacattcagaaatcatgaaacacagtagatatctgttataatgtggtgtatcacatggattataaagcaaagttatggtcgatttctattcttgaaagaatcaactacagtgaatcctttgcatttgaagccttaacatgcattgctttaattttgcccagggacaaattttaataatcagcaagactggtttgtgcaaagcgttgagtcatcaggtatttagagcctagccagctacccagtatccatgctgccatatcccttcattgtaaaaagtacctaaacattcgtgaaatgattttttttagctgaaaaatgctggcaagaagaattttaaagcttaaaataggtggtaaatttgaagtatgagtgtgttcacgagaaacataggcttttcaaaaaaatttttattcaaggcaaagcaaggaacatcttgagatatgtctcaagaatataaagatgtattattttaagccaaggagctgaaatatatctcagtttataaattcaggtatattctttttgtctccatggcaaccataacttttgaaccaaaaaaaattgtttttacatctttatgctgaaaatgtgtttagattaggaatatggtcgggctgaatttgctgttgctccctaaccaaatccacctcttgttttccttgtgagtccatggctaaatcaaagctgcccctgagaagagacttaatccaagcctgattgtactagtggcatcacttagaagtaggctttccctcttcctagtagatctcaatgttttataattccttaaaacagctgaaaattgggacaacatactttacgcaatgaacagtagttaaataggaaataaactagttccatataagtatacacctagagttttaattacctttataatgtttcttaaaagtgaaacttagatacaattgtgattggatacttagatactaagtgaaacttagtgtaacaattttgatctgttaaattggattttacatgtacatttgaatgccagaatttctaaataaatcccctggttaggaaattttaaaagtcaaagcttgttttcttcaaccactaccttctacattggttgacttagaccgtaagctttttaagtttctcattgtaatttaccttctcatgcagattgctgatgttttattaaaccttatttttacaaaaatgaaaaaa

SEQ ID NO: 15 - DNA, 6584 bp, Homo sapiens
tgctgccatgtgccgctgccacgggtacccagcctgtcgctaaactttccgggcgccagcccggctctgagtcgcgcttctcagcggagtgacccagggacggaggacccaggctggctggggactgtctgctcttctcggcgggatccgtggagagtcctttccctggaatccgagccctaaccgtctctccccagccctatccggcgaggagcggagcgctgccagcggaggcagcgccttcccgaagcagtttatctttggacggttttctttaaaggaaaaagcaaccaacaggttgccagccccggcgccacacacgagacgccggagggagaagccccggcccggattcctctgcctgtgtgcgtccctcgcgggctgctggaggcgaggggagggagggggcgatggctcggcctgacccatccgcgccgccctcgctgttgctgctgctcctagcgcagctggtgggccgggcggccgccgcgtccaaggccccggtgtgccaggaaatcacggtgcccatgtgccgcggcatcggctacaacctgacgcacatgcccaaccagttcaaccacgacacgcaggacgaggcgggcctggaggtgcaccagttctggccgctggtggagatccaatgctcgccggacctgcgcttcttcctatgctctatgtacacgcccatctgtctgcccgactaccacaagccgctgccgccctgccgctcggtgtgcgagcgcgccaaggccggctgctcgccgctgatgcgccagtacggcttcgcctggcccgagcgcatgagctgcgaccgcctcccggtgctgggccgcgacgccgaggtcctctgcatggattacaaccgcagcgaggccaccacggcgccccccaggcctttcccagccaagcccacccttccaggcccgccaggggcgccggcctcggggggcgaatgccccgctgggggcccgttcgtgtgcaagtgtcgcgagcccttcgtgcccattctgaaggagtcacacccgctctacaacaaggtgcggacgggccaggtgcccaactgcgcggtaccctgctaccagccgtccttcagtgccgacgagcgcacgttcgccaccttctggataggcctgtggtcggtgctgtgcttcatctccacgtccaccacagtggccaccttcctcatcgacatggaacgcttccgctatcctgagcgccccatcatcttcctgtcagcctgctacctgtgcgtgtcgctgggcttcctggtgcgtctggtcgtgggccatgccagcgtggcctgcagccgcgagcacaaccacatccactacgagaccacgggccctgcactgtgcaccatcgtcttcctcctggtctacttcttcggcatggccagctccatctggtgggtcatcctgtcgctcacctggttcctggccgccggcatgaagtggggcaacgaggccatcgcgggctacgcgcagtacttccacctggctgcgtggctcatccccagcgtcaagtccatcacggcactggcgctgagctccgtggacggggacccagtggccggcatctgctacgtgggcaaccagaacctgaactcgctgcgcggcttcgtgctgggcccgctggtgctctacctgctggtgggcacgctcttcctgctggcgggcttcgtgtcgctcttccgcatccgcagcgtcatcaagcagggcggcaccaagacggacaagctggagaagctcatgatccgcatcggcatcttcacgctgctctacacggtccccgccagcattgtggtggcctgctacctgtacgagcagcactaccgcgagagctgggaggcggcgctcacctgcgcctgcccgggccacgacaccggccagccgcgcgccaagcccgagtactgggtgctcatgctcaagtacttcatgtgcctggtggtgggcatcacgtcgggcgtctggatctggtcgggcaagacggtggagtcgtggcggcgtttcaccagccgctgctgctgccgcccgcggcgcggccacaagagcgggggcgccatggccgcaggggactaccccgaggcgagcgccgcgctcacaggcaggaccgggccgccgggccccgccgccacctaccacaagcaggtgtccctgtcgcacgtgtaggaggctgccgccgagggactcggccggagagctgaggggaggggggcgttttgtttggtagttttgccaaggtcacttccgtttaccttcatggtgctgttgccccctcccgcggcgacttggagagagggaagaggggcgttttcgaggaagaacctgtcccaggtcttctccaaggggcccagctcacgtgtattctattttgcgtttcttactgccttctttatgggaaccctctttttaatttatatgtatttttcttaatttgtaactttgttgcattttggcaacaatttacctttgctttgggggctttacaatcctaaggttggcgttgtaatgaagttccacttggttcaggtttctttgaactgtgtggtctcaattgggaaaatatatttcctatacgtgtgtctttaaaaaaaaatgtgaacagtgaacgtttcggttgctgtgactgggaagttgttgggtgtgctttttcagccagcttctccttccactgcttaaagtgtccatgattctttaaggtgagctgcagtttatagccccaggtcatacctaggaggggagcataatgagctcagggcctccccaaagtgacaaggttagggagtgcttagcggttttgtgttcagccttagctttgtttatagagggaggttcagtttcttttctgtagtgcttgtaataattctcactcctaacagcaccatcgttgtgtcttgaataagttagaggtagcattatagaggatctggcataaatatttgcagtagtgagagcctaagcgatggtgattggtggagcttgaattttaggctggtgagatggcagctttgtgcctgagaggtagtgggtggttcttaagcttcagtgatcccctttttttttttttttttttttttttaaggaacttgtgttataattttggtaaaagtataaacccactccctctggacaatacttagcgacagttgctaaagggggctcctttttaaatgtaaggactgaaatggatatacttctaataagtaaatttccaacacttatttgctccaccccctcccccctcccccctccccctttatcatgttaaacagcctttttgcttttcttattcctcctctcctggagagctgtgattagaaaccacacccacccttgaatgaagtgcttgaactgggggagggaggctggctacctgtgaacaaacattggcccaaataagggaaaataagtgttcctggactttggactagtttatagccagatattccaagagcagcaagacgttgctctctgccgtctctgaaaacaaaagagatgcataacatgcttgcacaaccttttaaaatatagatcagtatagtgctacctctatagttttcttcctcttctgagaaagcctgtatattgatgatcacacacacacacactttgcaattagagaatttggtttgctttactaatctgtttaactattccttcattcattatgaacgcttatattgatgaacatacacacagaggtttctttgctattagaaaattctgtttgctttcctaatctgtttaagcattcattcatgaagagtgtggggccattactggggaaggggggtgacagtgcctcagccagcaaaataccaatgaccaggattggggactaaatttaggaagctaaaatggccagagcaattaacatttgagaaaatcctgtctaggaaaacaacttgagtgtaggcatttgtaattcacttataccaaagttggaaaagtaaaatttaagcctaggacaatttttacttcatggatgttaaatagacaaatgcatagttcccagggggaatttaaacactttactggtgggaagaaacctagtattaaagttgtaaggactctcaaaaacttcacatttattaaaatgcactgctcttacccaatttatcctctgaattaaaatttcagtggattctacaaaacctcgtacaaatagctacagaactttgtgcctattttattcctctatttattcttctaggaagaagcctcttcctagaatcttgaaatagatcccttgactgaatgccaattcctctcctgtttttcaaatgagagaaccttttctgatcaccttgaccttttccctcatttcatatgtcttcccagaaagtagacagactgctctgctgccttcagtcattgtgcctcatttgggttgtccctccttctttgtggagaaatctggaaatgatgcacagtgtatccaaaagttgtgggatgaagtggatgaaagtgatttaattcatttttagaatttttttttgttttgttttagcaacatgctgaacaactaatttactttaaaaataagccagttaaaacaaaggacgctaagcccaagtggggggcaatattagtcaggatctttggggtctaattccagaccaactttcagaagcacttctttgtctctgttctcacctctgctgtccctctcttccctcatcccctaagagagacaaagataaaagcccacctgcatccctaagtcttactgagatcagccaccccaggggagagaaactggatctacttacagccaccccctgtttccatccatatacttacttcccccaatttgcatgtgattatggaaacaagtcatgctcatgaaagcaactgtaaaataaaaggttatggagtagttcagcaacttcttcacagccagctttgtggagctggggaggacttagggcccattggagtctcttatgtgtacagcttcagggctgtccctttcagtttgattttaagcaatgcctcacttcatagcttagggggtaaggattccattcaggtaggttgtctaaaggaactaatgggacctctcagtgaattagctgaccagattttaggaaatctttttaatttctatgattttccttctcacattttgaaatggtaaaattgactggaaataatttttcttggtgccttattggttttccttgcaaacctttctcatattttctcatgaccattgccagtgaccaaggcccatgtgtgtgttgtgtgtaattgtgggcatgtacaagcttaaataacgtgccgacagcactgtttcaaagttggtattcattaggctgttgcctcctgggctggagctgcgctaatcctgacaccggctgccaggagaaaacctcatggatcacacaccaaaccttaataacagcatccgtgacctgcactctccagtacagaatgggaaccccagagctaggaaatgtagttgtatattttaatgaactgctaccccagccaaagaagcttctttcacttttgtgctctacagaaagcccaaggggggtaggagggacagagctttgaataactgctttctaacactaaatgtggccaacaggacagagcacatcacacgtataggcaggtgtgagggacagtggctaagaattgcctgctccctctgcatgctctttcttgtttccaaagtccaatcaagtgatcctgggaaacaaatctgtctggattgcggagggtggttctgaaagaactgccaagacgttaaagaagggtgaagagtaggcagaatataagtagctaacctgagtcaagactctcaaaagctagcagcctgatgacaataggatttatttcagccaggatagtgtctgtctgtgagtgcatcattttaagacagtatgacttcatgttgttacaaactatgtatagtatgtatgttttgtgggttgtatatatacataatatatattatatatatatatgagagatttggtgacttttgatacgggtttggtgcaggtgaatttattactgagccaaatgaggcacataccgagtcagtagttgaagtccagggcattcgatactgtttatgatttccatatatgtatagtgcctatcccatgctgtagtcactgttatgttaaatccagaagttacactagagccagcgatactttatttgtagacaatcaatttgaatccatatgttattactggcagatgatacatgattacagttctgaatctgtaacacttacaaaaggaaacccagagcagcttgatgagtttttgtttctgcttcgttcctgggagtcagtagaaacagcagttgtatgtggttatgttagtctcaagatacttaatttgttgaccttacttcagaaaaattttgtatgtattatatttgtgggaaggtaaaataatcatttgagatttttatcaaatatgaagattagttatttatgaaaaacaaagaaatgtctatttttctttgttcccaattaatgtagataaattttaaaatgcattaaagtaatggtaaagacaataaaaagatgctgtagaaaaaaaaaaaaaaaaaaaaaa

SEQ ID NO: 16 - DNA, 7926 bp, Homo sapiens
gcgagtgttgaaagtcggtggcgtaggtcgtcgtcctggatgctggcgagatagatgttatcttccagaggaagaggaggaggcggcgaagcgttttcccagcctcagtctctctttcgttttccttttcccttcccccaaccctccgcccttctctaaatcagccggccttccttgacctcagtgacccgtctggccccgcccaccctcgtcgacgtgattcccgccgtgaggtaagcgccggtggaacctagagccccgcggaagagcagaacgtttgggagtgtgcagctcctgggcccggctcaggcccgtcgcggaggcgcggcgcaggggagcgctcgggtgggagtctcgctcctccaccagtttattgcgacgtagcatccaggcctaggcctccccgtccatccccgccggactcgggcctctggcagcagcgggtgacgcagacggaacatcatgtcgtccgcggccgagcctccgccacccccgcctcccgagagcgcgccttccaagcccgcagcctcgatcgccagcggcgggagcaacagcagcaacaaaggcggccccgaaggcgtcgcggcgcaggcggttgcgtctgcggccagcgctggtcccgcagacgccgagatggaggaaatatttgatgatgcgtcacctggaaagcaaaaggaaatccaagaaccagatcctacctatgaagaaaaaatgcaaactgaccgggcaaatagattcgagtatttattaaagcagacagaactttttgcacatttcattcaacctgctgctcagaagactccaacttcacctttgaagatgaaaccagggcgcccacgaataaaaaaagatgagaagcagaacttactatccgttggcgattaccgacaccgtagaacagagcaagaggaggatgaagagctattaacagaaagctccaaagcaaccaatgtttgcactcgatttgaagactctccatcgtatgtaaaatggggtaaactgagagattatcaggtccgaggattaaactggctcatttctttgtatgagaatggcatcaatggtatccttgcagatgaaatgggcctaggaaagactcttcaaacaatttctcttcttgggtacatgaaacattatagaaacattcctgggcctcatatggttttggttcctaagtctacattacacaactggatgagtgaattcaagagatgggtaccaacacttagatctgtttgtttgataggagataaagaacaaagagctgcttttgtcagagacgttttattaccgggagaatgggatgtatgtgtaacatcttatgaaatgcttattaaagagaagtctgtgttcaaaaaatttaattggagatacttagtaatagatgaagctcacaggatcaaaaatgaaaaatctaagttgtcagaaatagtgagggaattcaagactacaaatagactattattaactggaacacctcttcagaacaacttgcatgagctgtggtcacttcttaactttctgttgccagatgtgtttaattcagcagatgactttgattcctggtttgatacaaacaactgccttggggatcaaaaactagttgagaggcttcatatggttttgcgtccattcctccttcgtcgaattaaggctgatgttgaaaagagtttgcctccaaagaaggaagtaaaaatctatgtgggcctcagcaaaatgcaaagggaatggtatactcggatattaatgaaggatatagatatactcaactcagcaggcaagatggacaaaatgaggttattgaacatcctaatgcagttgagaaaatgttgtaatcatccatatctctttgatggagcagaacctggtccaccttatacaacagatatgcatctagtaaccaacagtggcaaaatggtggttttagacaagctgctccctaagttaaaagaacaaggttcacgagtactaatcttcagtcaaatgacaagggtattggacattttggaagattattgcatgtggagaaattatgagtactgcaggttggatggtcagacaccccatgatgagagacaagactccatcaatgcatacaatgaaccaaacagcacaaagtttgttttcatgttaagcacgcgtgctggtggtcttggcatcaatcttgcgactgctgatgtagtaattttgtatgattctgattggaatccccaagtagatcttcaggctatggaccgagcacatagaattgggcagactaagacagtcagagtgttccgctttataactgataacactgtagaagaaagaatagtagaacgtgctgagatgaaactcagactggattcaatagtcattcaacaagggaggcttgtggatcagaatctgaacaaaattgggaaagatgaaatgcttcaaatgattagacatggagcaacacatgtgtttgcttcaaaggaaagtgagatcactgatgaagatatcgatggtattttggaaagaggtgcaaagaagactgcagagatgaatgaaaagctctccaagatgggcgaaagttcacttagaaactttacaatggatacagagtcaagtgtttataacttcgaaggagaagactatagagaaaaacaaaagattgcattcacagagtggattgaaccacctaaacgagaaagaaaagccaactatgccgttgatgcatatttcagggaagctcttcgtgttagtgaacctaaagcacccaaggctcctcgacctccaaaacaacccaatgttcaggatttccagttctttcctccacgtttatttgaattactggaaaaagaaattctgttttacagaaaaactattgggtacaaggtacctcgaaatcctgagctgcctaacgcagcacaggcacaaaaagaagaacagcttaaaattgatgaagctgaatcccttaatgatgaagagttagaggaaaaagagaagcttctaacacagggatttaccaattggaataagagagattttaaccagtttatcaaagctaatgagaagtggggtcgtgatgatattgaaaatatagcaagagaagtagaaggcaaaactccagaagaagtcattgaatattcagctgtgttttgggaaaggtgcaacgagctccaggacatagagaagattatggctcagattgaaaggggagaggcgagaattcaaagaagaataagcatcaagaaagcacttgacacaaagattggacggtacaaagcaccttttcatcagctgagaatatcatatggtactaacaaaggaaaaaactatactgaagaagaagatcgttttctgatttgtatgcttcacaaacttggatttgacaaagaaaatgtttatgatgaattgcgacagtgtattcgcaactctcctcagttcagatttgactggtttcttaagtccagaactgcaatggagctccagaggagatgtaataccttaattactttgattgaaagagaaaacatggaactagaagaaaaggagaaggcagagaaaaagaaacgaggaccaaagccttcaacacagaaacgtaaaatggatggcgcacctgatggtcgaggaagaaaaaagaagctgaaactatgaatatgtttttgtttcataatcactaactttaaaccagtagttctttaatttacgggtcttcataagatgtactgtacaatgctcaattgttatgtcatttaaagacatcaggttcatctgtttactgagctagaaacatagtatgtagtttcacttttttaaatgcaacagctgtgctgaaatttttttatcattaacacttgaagtaataaaataggcttcatttattactaagtgtttcatttgatttatttttctattgtagttccatttgtgaagattgtgactttttgtttattagctataatttctacacttgtaaggcttaaaaacaagttaaaaagaaaattgcaaataacatttgtccctttcagtcttcacctagttgtgtaattattttaattcactttgcctttgcagaaatttgggtattttctttgtagtgctattgagtctcatctggaaagattatataaattgcattctccttgcttatgtgggtagaatgggaaaagaaggcaagacaaagtatacttaaattctatgcatatttctgttatgctttctgttttttttagttgattctgaaatgaatatgccctattcttttgaaagaatggccttttagttgtatagccaaagacatttagtattttccggttccttaaggtattactgtaccattttgtaaaaggaatattattattattatttttaattatttggtaaatattttgtcatatgaccttctgaagcagccacaacttagataatgtcagaactaaggtgattttttttttttaattttgaaagcccagccaaaatgaggtgtgaatttgtcatactgttacattgaaattggtaacaaaatatatcccctcccatttggacttttagggtaaatgaaaattttattgtattttaaagtagtttctaagtgttagcaagactgactataattccagtttctgttttctatggacagacctgataaactggagaccctaaagcaggaatacccaaattatagtgtcaggattttagctgtaccagaggcctttatgtgctacacataatttgtataaaattttatatgtgcagattgggtacataaacagttctccatttttctaagggaatgcaataaatgtagcatcgtgaataaatataacttttataatccgtaaagtggtcttttctttccatttctttaattgttttctcaatttttattcactttttcctttaggacacatttcccttaattggatatctttcccttaaatttctattagtagttgttttcatctgcccacatgtaattgaagatttaaaaaaaaaattttgatacctgcagtattactaatactgcttaatttcttgaaatgtggaattgctgctgttaatgtcaagcaaaacgcagtatttatggcaaattgtaaagtaatttgaatttagtgctacctcaaaattaactttttaaatactatgttagattcttaacagttaaaggtctaatacatgcatgaggaatggttacttatgaaaggaaaaagaatttgtaagagttatcacctcagtttggaagaaattgaaaaaatgtaaggctgaagaaaacttacggaggtcacaaaagtgatgttttcaagaggaggagaaactgggagggagatacacagtggaaatgcaaaatgaatcaagtatagtggtagccctgagagcttagggactcaaatggaaactgtgtgaagggaaactcacttgaaaaaaaagcatgaaccagctaggccctgccaccactgtgtttggccaagttcacaaatctgttttaacctgtcacttccctgtcacttctctggctttcctctcccgctaagcttttgtttcctggcagtaattaaaatcttctgtcagtgccacagctactactgctactggaactgccttaaccactactgctactggaactgccttagccaccttggtatcgtggtttggcaaagtattggcctctaccaccatagggcccagagcttctgcctccaaagtttcctcccttcatgggtccaaaatttgaagactgattgttgtcattgccaaaatcattgtagcttttaccacctccaaaattgcttcaatcattaccaaatctattatagcaatccccactgccaccatatccatcaccaccaccatggctgccaccaaagccaccacgatcacagaacttgatgactgtatttgtgactaattgtataatagtttctgttctgtggaaagtaaagcattccaacacagggtttcagtgtagattgttttgttttgtacccatgctgttgattgctaaatgttttaataatctgatcatgatactgaataaatgtctttttttttttttaacaacaaagcatgaaagattgcttaattgtacatctgacaaagtgctggaggctattataaagtgtaattattactacttttaagagacagggtcttgctctgtcacccaggctggagtgcagtggtgcaatcacagctcactgcaacctcaaacttcagggctcaagtgatcctcccacctcagcttcccaagtagctaggactacagataccacgcccagctaagtttttttagtttttgtagagatagggccttgctatgttgcccagtccggtctcaaacgccgacttcaggcaatcctcttgcgtcaacctctcaaagtgctgggattacatgtgtaagcctacattccaaagtgctgggatcatagttgtgagcctacaccacacctggcctacattttgtttttcataaagttgagagaagcaaatcctaagcatagagtacaagttgagcatccctaatcaaaaaatctaaaatcagaaatgctccataatttgaatgctcattagggcatttctgatttttggattagggatgctgaactgataagtataatgcaagtattctaaagtctggaaaatgctaaaaacacttctggttccaggcatttcagataaggattgctccatctgccctttgagtatttaatatatgccgattgtttgaactaatctggatttaattatataaatgattatataaatgatctttggcttagtacctttcttaatctcgatcttaaaaagcattgtaaaacacccctgtggtttttcagaaaaattctgagtaaaaaataaatttcatcttgttctatccctttgaatctaaaaaacaaatctttttgaaaggatgtgctactatatttcaaaccagtagttttggagtagaacattgctaaaaaaatgggtactaaggagggtaatttaaacaaagtagattaatgacacaaggtggattgatgaactcataaatccaaatgaatggaatgctagaagacatgtattaacggagtagctgttaccaaaatatatacatattttgtatatgtacatagctgttaccaaaatgtatctttgcctgttggaatctgatgtcaagatcaaaggtgagggcatccctcagatgacagataatgggcaaaatacattcttggtgtggagcagtgctgcagaattaacttcgctgtgtacatcccagaatcgttttggatctgttaaggtttttattagaatgattaaataggcttttgcagcattaactttacagtagttaccagaaaagactatgctacaagaaccaaaattgaagtaagaagaaaaagactgaaatgatatgattctaaatgaaaaaaatgaagaagtggaatagtttctccacaggcataagaggcaaagcattgtttcagaagtggactggcacctcacctgagatactcaagactggcaacatgggtctacattctttgttaccacagattcccttgtgtccggagagattccctagctctaatgacagcttttttggggggtaatgaggctatgagaagattgaggatctaggtacttgcctttaactctacagcatacaaggtgtgtggctcttatctctaggacaccaatatttaatgttgcatatcatgtatctccagtacaagaagaaagtttatcagaatttagttaatgttggaaactttgtaatataaacaatgtaaacactacattgacaaaaatattttattaatacaaagaatatgcatatagtttgcttactacagaaattcttgtttttgatgtagacaacccaaaggagtttttatgtatatagattgtgaataaattgggaaaagaaatagagataagtagagattatttcacttcattaaacttttgaagtcctaattt

SEQ ID NO: 17 - DNA, 4756 bp, Homo sapiens
atttttttggggggaaggtgggatttggggggcgctggtgggcacccctggatctggcggctgcggcctcgcggggggaggctgatcggtgacaggggcagggggctattttgggggtagaaggcagtgagagcgtgagggggaggggggtccccagcgcccaagccggagccagagacgcggagcccgcgcgagcgtcggagacagggctccagggctccgaagcgacagagccgggccccggccgctgccaggggccccgcccggcccccccactccaccccacgtccctcctgcagcccagctccgcccgcagccgccgcggaccaggcaggcccgcaccgccgccatgatgtgcgaggtgatgcccaccatcagcgaggatggccggcggggctcggcgctgggcccggacgaggcgggcggggagctggagcgcctcatggtcacgatgctcacggagcgcgagcgcctgctggagacgctgcgcgaggcacaggacgggttggctacagcgcagctgcggctgcgcgagctcggccacgagaaggactcgctgcagcgccagctcagcatcgcgctgccccaggagtttgcagctctgacgaaggagctgaacttatgtcgggagcagctgctggagagggaggaagagattgcagagctgaaggcggaacggaacaacacgcggctgctcctggaacacctggagtgcctggtgtccaggcacgagaggtcactgcgcatgaccgtggtgaagcgccaggcccagtccccgggtggggtctcctcggaggtagaagtgctcaaagctctaaagtctctcttcgagcaccacaaggccctggatgagaaggtccgggagcggctgcggatggcgctggagcgcgtggcagtgctcgaggaggagctggaactgagcaatcaggagactctgaaccttcgagaacagctgtctaggcggcggtcagggctggaagagccgggcaaggatggggatgggcagactcttgccaatggcctgggtcctggcggggattccaaccggcgcacagcagagctggaggaggccctggagcggcagcgcgccgaggtgtgccagctgcgggagcgcctggcggtgctgtgccgtcagatgagccagctggaggaggagttgggcaccgcgcaccgtgagctgggcaaggcagaggaagccaactccaagctgcagcgcgacctcaaggaggcgctggcgcagcgggaagatatggaggagcggattacaacactggagaagcgctacctgagcgcccagcgggaggccacgtctctgcacgacgccaacgacaaactggagaacgagttagctagcaaggagtcgttgtatcggcagagtgaagagaagagccgtcagctggccgagtggttggacgacgccaagcagaagctgcagcagacgctgcagaaagcggagaccttgcccgagatagaggcgcagctggcgcagcgcgtggcggcgctcaacaaggccgaggaacgtcatgggaattttgaggagcggcttcggcagctggaggcccagctggaagagaagaatcaagagctgcagcgggcccggcagcgggagaagatgaacgatgaccacaataagcggctgtccgagacggtggacaagctgctgagcgagtccaacgagcgcttacagcttcacctcaaggagcgcatgggggcgctggaggagaagaactccctgagcgaggagatagccaacatgaagaagcttcaggatgagttgctgctaaacaaggagcagctcttggccgaaatggagcggatgcagatggagatcgaccagctgcgggggaggccaccatcctcctactccaggtctctccctggcagtgccctggagctccgttactctcaggcacccactttaccttctggtgcccacctggatccctatgtggctggcagtggtcgggcaggcaagaggggccgctggtcaggggtcaaggaggagccctccaaggattgggagcggtctgcccctgcgggctccataccacccccattccctggggaactggacggctccgatgaggaggaggcagaggggatgtttggggccgagctgctgtcccccagtgggcaggctgacgtgcagacgctggccatcatgcttcaggagcagctggaggccatcaacaaggagatcaagctgatccaagaggagaaggagacaacagaacagagggcagaggagctggagagtcgggtgtccagctctggcttggactcgttgggccgctaccgcagcagctgctccctgcccccctccctcaccacctctacccttgccagcccctcccctcccagctctggccactcaacaccccgcctggcaccccctagccctgcccgtgagggcaccgacaaggctaatcatgtccctaaggaggaagctggagctccacgaggggaggggccggccatcccaggagacaccccaccacccactccccgctctgcccgtcttgagagaatgacccaggccttggcactgcaggcggggtccctggaagatgggggacccccacggggaagtgagggcaccccagattctctgcacaaagcccccaagaagaagagcatcaagtcatccataggccgtctctttggcaagaaagagaagggacgaatgggacccccaggccgggacagctcttctctggctggaacaccctcagatgagacactggccactgaccctctggggctagccaagctgacaggcccaggagacaaggaccgaaggaacaagaggaagcatgaactcctggaggaggcctgccgccagggcctaccttttgctgcctgggacgggcccaccgtggtgtcctggctggagctgtgggtgggcatgcctgcctggtatgtggccgcctgccgggccaatgtcaagagcggtgccatcatggccaacctgtcagacacggagatccagcgcgagatcggcatcagcaacccgctgcaccgactcaagctacgcctcgccatccaggagatggtctcgctcacctcgccctcagcccccgcctcctcccgcacttccacaggaaacgtgtggatgacacacgaggagatggagtcccttacggccacgaccaagcccgagaccaaggagatcagctgggagcagatcctggcatatggcgacatgaaccacgagtgggtggggaacgactggctgcccagcctggggctgccccaataccgcagctacttcatggagtcgctggtggacgctcgaatgttagatcaccttaacaagaaggagctccggggccaactcaagatggtggacagctttcacagggtgagtctacattatgggattatgtgcctgaaacggctcaactatgaccggaaggacctggagcggaggcgggaagaaagtcagacccagatccgagacgtgatggtgtggtccaatgagcgggtcatgggttgggtgtccgggctgggcctgaaggaatttgccacgaacctcacggagagcggggtacacggggcactgctcgccctggacgagaccttcgactactccgacctggccttgctcctgcagatccccacgcagaatgcacaggcccggcagcttctggagaaggaattcagcaaccttatctccttaggcacagacaggcggctggacgaggacagcgccaagtctttcagccgctccccatcctggcggaagatgttccgggagaaggacctccgaggcgtaactcccgactcagctgagatgttgccccccaactttcgttcggctgcagcgggagccctgggctctccggggctccctctccgcaagctgcagccagaaggccagacttctgggagttcccgggcagacggcgtttcggtccggacctattcctgctagtgcaggcctccaggtgacctcactcggacggaagaatcttcccgaggctgggctgttccctctcctgcccggactgtggcctcgccggggagagcgggcgggggagctcgcgccgaggactggaccatctgtacagaccagcgggagtgcgcgcgcccgcctcgcacagggccggggcctggaccaaaccacatgaactggactgagagggggaagaagcggggaggaagaaatcccgccccaaacgtccgctttccttttctctactttgtaatttattgatcagtttctgttgggagacgggtgtcctttacccgcgggaagggggcggggcttccctcccgggccgcatgcggggagaggctgctccctcccctttttcctgcccagtcgcggggcccaagtcttccttcttcgtccgaaaggaggggaggggggactcgctgctacaagcctcgccccctgtgccactcagctccgccccgccgcgtccggtcgccggtcccccgggtcatctgcgggcgggttcccctctccctcccccgtgtctcgtgtccccggggcctcaccgccccccgtgctgtggccgtgtccgtgccccgggggtagggggcgcagaatggcgcttccccttctcctctggctccggggtttgcatgggagaatcctctttccacgatgccgctgggcgacgtggcgtgggggcagggggacggtgggggagccctcgcccccgactctcggtcggcctccccgccccaggcgtcactcagtgatcacgggtaaagagaactgtttcaaaaagcttaaaaaaaaaaaaaa

SEQ ID NO: 18 - DNA, 8733 bp, Homo sapiens
gctcccggcttagaggacagcggggaaggcgggcggtggggcagggggcctgaagcggcggtaccggtgctggcggcggcagctgaggccttggccgaagccgcgcgaacctcagggcaagatgcttggaaccggacctgccgccgccaccaccgctgccaccacatctagcaatgtgagcgtcctgcagcagtttgccagtggcctaaagagccggaatgaggaaaccagggccaaagccgccaaggagctccagcactatgtcaccatggaactccgagagatgagtcaagaggagtctactcgcttctatgaccaactgaaccatcacatttttgaattggtttccagctcagatgccaatgagaggaaaggtggcatcttggccatagctagcctcataggagtggaaggtgggaatgccacccgaattggcagatttgccaactatcttcggaacctcctcccctccaatgacccagttgtcatggaaatggcatccaaggccattggccgtcttgccatggcaggggacacttttaccgctgagtacgtggaatttgaggtgaagcgagccctggaatggctgggtgctgaccgcaatgagggccggagacatgcagctgtcctggttctccgtgagctggccatcagcgtccctaccttcttcttccagcaagtgcaacccttctttgacaacatttttgtggccgtgtgggaccccaaacaggccatccgtgagggagctgtagccgcccttcgtgcctgtctgattctcacaacccagcgtgagccgaaggagatgcagaagcctcagtggtacaggcacacatttgaagaagcagagaagggatttgatgagaccttggccaaagagaagggcatgaatcgggatgatcggatccatggagccttgttgatccttaacgagctggtccgaatcagcagcatggagggagagcgtctgagagaagaaatggaagaaatcacacagcagcagctggtacacgacaagtactgcaaagatctcatgggcttcggaacaaaacctcgtcacattacccccttcaccagtttccaggctgtacagccccagcagtcaaatgccttggtggggctgctggggtacagctctcaccaaggcctcatgggatttgggacctcccccagtccagctaagtccaccctggtggagagccggtgttgcagagacttgatggaggagaaatttgatcaggtgtgccagtgggtgctgaaatgcaggaatagcaagaactcgctgatccaaatgacaatccttaatttgttgccccgcttggctgcattccgaccttctgccttcacagatacccagtatctccaagataccatgaaccatgtcctaagctgtgtcaagaaggagaaggaacgtacagcggccttccaagccctggggctactttctgtggctgtgaggtctgagtttaaggtctatttgcctcgcgtgctggacatcatccgagcggccctgcccccaaaggacttcgcccataagaggcagaaggcaatgcaggtggatgccacagtcttcacttgcatcagcatgctggctcgagcaatggggccaggcatccagcaggatatcaaggagctgctggagcccatgctggcagtgggactaagccctgccctcactgcagtgctctacgacctgagccgtcagattccacagctaaagaaggacattcaagatgggctactgaaaatgctgtccctggtccttatgcacaaaccccttcgccacccaggcatgcccaagggcctggcccatcagctggcctctcctggcctcacgaccctccctgaggccagcgatgtgggcagcatcactcttgccctccgaacgcttggcagctttgaatttgaaggccactctctgacccaatttgttcgccactgtgcggatcatttcctgaacagtgagcacaaggagatccgcatggaggctgcccgcacctgctcccgcctgctcacaccctccatccacctcatcagtggccatgctcatgtggttagccagaccgcagtgcaagtggtggcagatgtgcttagcaaactgctcgtagttgggataacagatcctgaccctgacattcgctactgtgtcttggcgtccctggacgagcgctttgatgcacacctggcccaggcggagaacttgcaggccttgtttgtggctctgaatgaccaggtgtttgagatccgggagctggccatctgcactgtgggccgactcagtagcatgaaccctgcctttgtcatgcctttcctgcgcaagatgctcatccagattttgacagagttggagcacagtgggattggaagaatcaaagagcagagtgcccgcatgctggggcacctggtctccaatgccccccgactcatccgcccctacatggagcctattctgaaggcattaattttgaaactgaaagatccagaccctgatccaaacccaggtgtgatcaataatgtcctggcaacaataggagaattggcacaggttagtggcctggaaatgaggaaatgggttgatgaactttttattatcatcatggacatgctccaggattcctctttgttggccaaaaggcaggtggctctgtggaccctgggacagttggtggccagcactggctatgtagtagagccctacaggaagtaccctactttgcttgaggtgctactgaattttctgaagactgagcagaaccagggtacacgcagagaggccatccgtgtgttagggcttttaggggctttggatccttacaagcacaaagtgaacattggcatgatagaccagtcccgggatgcctctgctgtcagcctgtcagaatccaagtcaagtcaggattcctctgactatagcactagtgaaatgctggtcaacatgggaaacttgcctctggatgagttctacccagctgtgtccatggtggccctgatgcggatcttccgagaccagtcactctctcatcatcacaccatggttgtccaggccatcaccttcatcttcaagtccctgggactcaaatgtgtgcagttcctgccccaggtcatgcccacgttccttaacgtcattcgagtctgtgatggggccatccgggaatttttgttccagcagctgggaatgttggtgtcctttgtgaagagccacatcagaccttatatggatgaaatagtcaccctcatgagagaattctgggtcatgaacacctcaattcagagcacgatcattcttctcattgagcaaattgtggtagctcttgggggtgaatttaagctctacctgccccagctgatcccacacatgctgcgtgtcttcatgcatgacaacagcccaggccgcattgtctctatcaagttactggctgcaatccagctgtttggcgccaacctggatgactacctgcatttactgctgcctcctattgttaagttgtttgatgcccctgaagctccactgccatctcgaaaggcagcgctagagactgtggaccgcctgacggagtccctggatttcactgactatgcctcccggatcattcaccctattgttcgaacactggaccagagcccagaactgcgctccacagccatggacacgctgtcttcacttgtttttcagctggggaagaagtaccaaattttcattccaatggtgaataaagttctggtgcgacaccgaatcaatcatcagcgctatgatgtgctcatctgcagaattgtcaagggatacacacttgctgatgaagaggaggatcctttgatttaccagcatcggatgcttaggagtggccaaggggatgcattggctagtggaccagtggaaacaggacccatgaagaaactgcacgtcagcaccatcaacctccaaaaggcctggggcgctgccaggagggtctccaaagatgactggctggaatggctgagacggctgagcctggagctgctgaaggactcatcatcgccctccctgcgctcctgctgggccctggcacaggcctacaacccgatggccagggatctcttcaatgctgcatttgtgtcctgctggtctgaactgaatgaagatcaacaggatgagctcatcagaagcatcgagttggccctcacctcacaagacatcgctgaagtcacacagaccctcttaaacttggctgaattcatggaacacagtgacaagggccccctgccactgagagatgacaatggcattgttctgctgggtgagagagctgccaagtgccgagcatatgccaaagcactacactacaaagaactggagttccagaaaggccccacccctgccattctagaatctctcatcagcattaataataagctacagcagccggaggcagcggccggagtgttagaatatgccatgaaacactttggagagctggagatccaggctacctggtatgagaaactgcacgagtgggaggatgcccttgtggcctatgacaagaaaatggacaccaacaaggacgacccagagctgatgctgggccgcatgcgctgcctcgaggccttgggggaatggggtcaactccaccagcagtgctgtgaaaagtggaccctggttaatgatgagacccaagccaagatggcccggatggctgctgcagctgcatggggtttaggtcagtgggacagcatggaagaatacacctgtatgatccctcgggacacccatgatggggcattttatagagctgtgctggcactgcatcaggacctcttctccttggcacaacagtgcattgacaaggccagggacctgctggatgctgaattaactgcgatggcaggagagagttacagtcgggcatatggggccatggtttcttgccacatgctgtccgagctggaggaggttatccagtacaaacttgtccccgagcgacgagagatcatccgccagatctggtgggagagactgcagggctgccagcgtatcgtagaggactggcagaaaatccttatggtgcggtcccttgtggtcagccctcatgaagacatgagaacctggctcaagtatgcaagcctgtgcggcaagagtggcaggctggctcttgctcataaaactttagtgttgctcctgggagttgatccgtctcggcaacttgaccatcctctgccaacagttcaccctcaggtgacctatgcctacatgaaaaacatgtggaagagtgcccgcaagatcgatgccttccagcacatgcagcattttgtccagaccatgcagcaacaggcccagcatgccatcgctactgaggaccagcagcataagcaggaactgcacaagctcatggcccgatgcttcctgaaacttggagagtggcagctgaatctacagggcatcaatgagagcacaatccccaaagtgctgcagtactacagcgccgccacagagcacgaccgcagctggtacaaggcctggcatgcgtgggcagtgatgaacttcgaagctgtgctacactacaaacatcagaaccaagcccgcgatgagaagaagaaactgcgtcatgccagcggggccaacatcaccaacgccaccactgccgccaccacggccgccactgccaccaccactgccagcaccgagggcagcaacagtgagagcgaggccgagagcaccgagaacagccccaccccatcgccgctgcagaagaaggtcactgaggatctgtccaaaaccctcctgatgtacacggtgcctgccgtccagggcttcttccgttccatctccttgtcacgaggcaacaacctccaggatacactcagagttctcaccttatggtttgattatggtcactggccagatgtcaatgaggccttagtggagggggtgaaagccatccagattgatacctggctacaggttatacctcagctcattgcaagaattgatacgcccagacccttggtgggacgtctcattcaccagcttctcacagacattggtcggtaccacccccaggccctcatctacccactgacagtggcttctaagtctaccacgacagcccggcacaatgcagccaacaagattctgaagaacatgtgtgagcacagcaacaccctggtccagcaggccatgatggtgagcgaggagctgatccgagtggccatcctctggcatgagatgtggcatgaaggcctggaagaggcatctcgtttgtactttggggaaaggaacgtgaaaggcatgtttgaggtgctggagcccttgcatgctatgatggaacggggcccccagactctgaaggaaacatcctttaatcaggcctatggtcgagatttaatggaggcccaagagtggtgcaggaagtacatgaaatcagggaatgtcaaggacctcacccaagcctgggacctctattatcatgtgttccgacgaatctcaaagcagctgcctcagctcacatccttagagctgcaatatgtttccccaaaacttctgatgtgccgggaccttgaattggctgtgccaggaacatatgaccccaaccagccaatcattcgcattcagtccatagcaccgtctttgcaagtcatcacatccaagcagaggccccggaaattgacacttatgggcagcaacggacatgagtttgttttccttctaaaaggccatgaagatctgcgccaggatgagcgtgtgatgcagctcttcggcctggttaacacccttctggccaatgacccaacatctcttcggaaaaacctcagcatccagagatacgctgtcatccctttatcgaccaactcgggcctcattggctgggttccccactgtgacacactgcacgccctcatccgggactacagggagaagaagaagatccttctcaacatcgagcatcgcatcatgttgcggatggctccggactatgaccacttgactctgatgcagaaggtggaggtgtttgagcatgccgtcaataatacagctggggacgacctggccaagctgctgtggctgaaaagccccagctccgaggtgtggtttgaccgaagaaccaattatacccgttctttagcggtcatgtcaatggttgggtatattttaggcctgggagatagacacccatccaacctgatgctggaccgtctgagtgggaagatcctgcacattgactttggggactgctttgaggttgctatgacccgagagaagtttccagagaagattccatttagactaacaagaatgttgaccaatgctatggaggttacaggcctggatggcaactacagaatcacatgccacacagtgatggaggtgctgcgagagcacaaggacagtgtcatggccgtgctggaagcctttgtctatgaccccttgctgaactggaggctgatggacacaaataccaaaggcaacaagcgatcccgaacgaggacggattcctactctgctggccagtcagtcgaaattttggacggtgtggaacttggagagccagcccataagaaaacggggaccacagtgccagaatctattcattctttcattggagacggtttggtgaaaccagaggccctaaataagaaagctatccagattattaacagggttcgagataagctcactggtcgggacttctctcatgatgacactttggatgttccaacgcaagttgagctgctcatcaaacaagcgacatcccatgaaaacctctgccagtgctatattggctggtgccctttctggtaactggaggcccagatgtgcccatcacgttttttctgaggcttttgtactttagtaaatgcttccactaaactgaaaccatggtgagaaagtttgactttgttaaatattttgaaatgtaaatgaaaagaactactgtatattaaaagttggtttgaaccaactttctagctgctgttgaagaatatattgtcagaaacacaaggcttgatttggttcccaggacagtgaaacatagtaataccacgtaaatcaagccattcattttggggaacagaagatccataactttagaaatacgggttttgacttaactcacaagagaactcatcataagtacttgctgatggaagaatgacctagttgctcctctcaacatgggtacagcaaactcagcacagccaagaagcctcaggtcgtggagaacatggattaggatcctagactgtaaagacacagaagatgctgacctcacccctgccacctatcccaagacctcactggtctgtggacagcagcagaaatgtttgcaagataggccaaaatgagtacaaaaggtctgtcttccatcagacccagtgatgctgcgactcacacgcttcaattcaagacctgaccgctagtagggaggtttattcagatcgctggcagcctcggctgagcagatgcacagaggggatcactgtgcagtgggaccaccctcactggccttctgcagcagggttctgggatgttttcagtggtcaaaatactctgtttagagcaagggctcagaaaacagaaatactgtcatggaggtgctgaacacagggaaggtctggtacatattggaaattatgagcagaacaaatactcaactaaatgcacaaagtataaagtgtagccatgtctagacaccatgttgtatcagaataatttttgtgccaataaatgacatcagaattttaaacatatgtaaaaaaaaa

SEQ ID NO: 19 - DNA, 4571 bp, Homo sapiens
gggggtcgggggtcgggggctgggggctgaggactgagtcgagccagcagcccagggcatctgtccacgctgtcagaggagcctctgggcgtggggctggcccttagagggctactgcgctgcttaacttgcctttcacagaaaaccactggaggagatactcacaaaaatgaaggggaagaacaggaaacaggaagacatgagatgaaggaaacaggagattcaacatggatttcacaccctttggagagtttctttcttggataattcaggaagatgagagactgcttaggcgccaccactagtaccatgagtccctgcactggttaaagccatcgccacaacctggacaggcagcaagggctctgggtttgcagagagccgaaatgaccatgactgccaacaagaattccagcatcacccacggagctggtggcactaaagcccctcgggggactctgagcaggtctcagtcagtctctccacctccagttctctccccaccaaggagtcccatctacccgctcagtgatagtgaaacctcagcctgcaggtaccccagccactccagctcccgggtgctcctcaaggaccggcaccccccagctccttcaccccagaatcctcaagatccctccccagatacttccccacccacctgtcccttcaagaccgccagcttcggttatttggacagaagcccttcggcgtgcaagagagacgcccaaaaggaaagtgtccaaggcgcagcccaggatgtagcaggggtcgctgcctgcctcccccttgcccagagcacgccattcccggggccagcagctggcccccggggcgtcttgctgacccgtaccggtacccgcgcccacagcctgggcatccgggagaagatatcagcatgggaaggtcgccgagaggcgtcgcccaggatgagcatgtgtggagagaagcgggagggctctgggagcgagtgggcggccagtgagggctgccccagcctgggctgtcccagcgtggtgccgtccccctgcagctctgaaaagacctttgatttcaagggcctccggaggatgagcaggaccttctccgagtgttcctacccagagactgaggaggagggagaggcgctccctgtccgggactctttctaccggctggagaaacggctgggccggagtgagcccagcgccttcctcagggggcatggcagcaggaaggagagctcagcagtgctgagccggatccagaaaattgaacaggtcctgaaggagcagccgggccgggggctcccccagctccccagcagctgctacagcgtggaccgggggaaaaggaagactggaaccttgggctccttggaggagccggcagggggcgcgagtgtgagcgctggcagccgggcagtcggagtggctggtgttgcgggggaggcgggcccacccccagagagggaaggcagtggttccactaagcccgggacccctggaaatagccctagctcccagcggctgccatcgaagagttccctcgatcccgctgtgaaccctgtccccaaacccaagcgcacctttgaatacgaggctgacaagaaccccaagagtaagcccagtaatggtctacctccttcacccacacctgctgctccacctcccttgccctccaccccagccccgccagtcacccggagacccaagaaggacatgcgtggtcaccgcaagtcccagagcagaaaatcctttgagtttgaggatgcatccagtctccagtccctgtacccctcttctcccactgagaatggtactgagaaccaacccaagtttggatccaaaagcactttagaagaaaatgcctatgaagatattgtgggagatctgcccaaggagaatccatatgaggatgtggacttaaagagccgaagagcaggacgaaaatcccagcaactgtctgagaactccttggactctttgcacaggatgtggagtcctcaggacaggaagtacaacagcccgcccacacagctttccctgaaacccaacagccagtccctgcgcagtgggaactggtcagaaaggaagagccaccggctgccacgattacccaagaggcacagccatgacgacatgctgctgctggctcagctgagtctgccgtcctcaccctccagcctcaatgaagacagcctcagcaccaccagcgagctgctgtccagccgccgggcccgccgcattcccaagcttgtccaaagaattaactccatctacaatgccaagagaggaaagaagagattaaaaaagttgtctatgtccagcattgaaacagcatcactgagagatgaaaacagtgagagcgagagcgactctgatgacaggttcaaagcccacacacagcgcctggtccacatccagtcgatgctgaagcgcgcccccagctatcgcacgctggagctggagctgctggagtggcaggagcgggagctttttgagtactttgtggtggtgtccctcaagaagaagccatcgcgaaacacctacctccccgaagtctcctaccagtttcccaagctggaccgacccaccaagcagatgcgagaggcagaggaaaggctcaaagccattccccagttttgcttccctgatgccaaggactggcttcctgtgtcagagtatagcagtgagaccttttctttcatgctgactggggaagatggcagcagacgctttggctactgcaggcgcttactgccaagtgggaaagggccccggttgccagaggtgtactgtgtcatcagccgccttggctgcttcggcttgttttccaaggtcctagatgaggtggagcgccggcgtgggatctccgctgcattggtctatcctttcatgagaagtctcatggagtcgcccttcccagccccagggaagaccatcaaagtgaagacattcctgccaggtgctggcaatgaggtgttagagctgcggcggcccatggactcaaggctggagcacgtggactttgagtgcctttttacctgcctcagtgtgcgccagctcatccgaatctttgcctcactgctgctggagcgccgggtcatttttgtggcagataagctcagtaccctctccagctgctcccacgcggtggtggccttgctctaccccttctcctggcagcacaccttcattcctgtcctcccggcctccatgattgacatcgtctgctgtcccacccccttcctggttggcctgctctccagctccctccccaaactgaaggagctgcctgtggaggaggcgctgatggtgaatctgggatctgaccgattcatccgacagatggacgacgaagacacgttgttacctaggaagttacaggcagctctggagcaggctctggagaggaagaatgagctgatctcccaggactctgacagcgactccgacgatgaatgtaataccctcaatgggctggtgtcggaggtgtttatccggttctttgtggagaccgttgggcactactccctctttctgacacagagtgagaagggagagagggcctttcagcgagaggccttccgcaaatctgtggcctccaaaagcatccgccgctttcttgaggtttttatggagtctcagatgtttgctggcttcatccaagacagggagctaagaaagtgtcgggcaaagggcctttttgagcagcgagtggagcagtacttagaagaactcccagacactgagcagagtggaatgaataagtttctccgaggtttgggcaacaaaatgaagtttctccacaagaagaattaagcctccttctcagtagcagagtccagtgccttgcagagcctgaagcctggggagaaggcccagcctgggaccctctgggctgctgtggctcctctgcccccacagatcctatcctccaagccagcccacctctgccttcatcatatcccaggatactgtttgtaaataatctgctgtaagctttcttaactgttttttgtaacaagcaaagagaatatggcaaatatttgtatattcccaaggggccgggtgctttcctgtcctgccagagcatggatgaagtttcgctgggtgctcgtgactggccagttttgtgcagctgactgtctcagccaaaccactgatcttccctggaggccttcggcctgcctgcctgcctgaggtccccgctgccagtcccgggccctggagagcagatgctgtcttgttatgtacaggaggaccttttaaaaaaatcaagtttctattttttgctggtagtccgcatacccataccctctgtttttgaaaggcaaaggccaatcagtccccatttgtagcatggcaccagggtcttaggcctagtcctctcattcctcccaccctccgagatggtcagtgtgtcatgggaagcccacccccagctctgccagtgctctctgggcctggctcccagtcagtggtggccacgatgcggtacagggcatccctccttcccatctacgggtgttctcaataaacaatgtacagttgtttgggcccagaaaaaaaaaaaaaaaaaaaaaaaaaaaa

SEQ ID NO: 20 - DNA, 2561 bp, Homo sapiens
attcatatcatttttcttctccggccccatggaggaagtgagaaagttggcacagtcacgccgggcttcgcaggaccaggtcactcagtgacagatggacaatgcaagaatgaactccttcctggaataccccatacttagcagtggcgactcggggacctgctcagcccgagcctacccctcggaccataggattacaactttccagtcgtgcgcggtcagcgccaacagttgcggcggcgacgaccgcttcctagtgggcaggggggtgcagatcggttcgccccaccaccaccaccaccaccaccatcaccacccccagccggctacctaccagacttccgggaacctgggggtgtcctactcccactcaagttgtggtccaagctatggctcacagaacttcagtgcgccttacagcccctacgcgttaaatcaggaagcagacgtaagtggtgggtacccccagtgcgctcccgctgtttactctggaaatctctcatctcccatggtccagcatcaccaccaccaccagggttatgctgggggcgcggtgggctcgcctcaatacattcaccactcatatggacaggagcaccagagcctggccctggctacgtataataactccttgtcccctctccacgccagccaccaagaagcctgtcgctcccccgcatcggagacatcttctccagcgcagacttttgactggatgaaagtcaaaagaaaccctcccaaaacagggaaagttggagagtacggctacctgggtcaacccaacgcggtgcgcaccaacttcactaccaagcagctcacggaactggagaaggagttccacttcaacaagtacctgacgcgcgcccgcagggtggagatcgctgcatccctgcagctcaacgagacccaagtgaagatctggttccagaaccgccgaatgaagcaaaagaaacgtgagaaggagggtctcttgcccatctctccggccaccccgccaggaaacgacgagaaggccgaggaatcctcagagaagtccagctcttcgccctgcgttccttccccggggtcttctacctcagacactctgactacctcccactgaggcggctccagccccagacaacagcccaggcatctccttgggctgggacttcttacccaaagcacatgcttagcttatctttctttccatttacagtctctttcttcctttctaatcctatctggggagctcctggccaggataatatatttgcagataattctggaccagagacttggtgcggggttaacaccttcatccagattgggtgccagcatacattttctggtgggccttaacatccctcctgcttttaggagaattcacagaacctactgttcctttcagatgaccttttggaaaatagttccctttgccaacagaaacatgccagaaggaatcttctcatcttttatctaactatatgtacagctctcccctcccttgtccttgaaagtaggatatagcgaaaggcgagtccaggagctcaggaagaagagatgcactatatgtttacacaattaattcatcccttaatttaagtcattttcatgtgtgtgagtttgctggttgtaaatactttgtcctaagagatttatctttatacagattttctagaaatgtttaggttactaaaacagggtgggcaaactctctaaactggtacaattttataggtgaaagaaaaaattccctcatttaaacccaatcagatgcctcagagggtagccttgatttgttcttacagttaagaagccctgcagagcacaaacttcagaaacccggcttcctgtgctaagtctttcccaatctctacccctttcttctcgggccaccctctgtttaaaatttgtgctgggttattcagaacctaaaagtattattcaaaccaatttcttccttccacagttatcttagctggatataatgtattttcagctcaattgttaatgtgatggatggcacaatgaatgtatattttgtgttattcgtgaatagtcttttgcatgtcgcacaatgtttgatgtccccaaagtaccacactgagttctatcagttatcctttgtgagcctatgatattccccatttcctgtacaatcatgaacagctctgagatcctggagtgatatgatccagagcagagtttacgggtcttaggatgtctgtaataaataaatatactcaagtttcaggtatgcttaagcatccgtgtatttggctgggctacaatttgttaattcctatgaagttggcacatttcatgaggggaaagggagaagggtggtaaatattttcaaagagatgggccttttcttgaataaaagttaataacagctcctttattataatcaaagctcataatggaaaaaaagactgatgaagaaatttatgaagcagatttatttttgaaacaaacatggatacttcctgggtcaagtgctaaccttttcacctccaactggatgttgacgtatatataaacagaactcccttcaaaagccaaaaaaaaaaaaaaaa

SEQ ID NO: 21 - DNA, 2032 bp, Homo sapiens
gtggccagggcgcgagagtgcaacgtcctcctggccccgagcgcgtcgtcgcgccccgggagcagaccctcgcccagcagttaccgccgtcccgactttccgttccagttgcagctcctgccgggcaacatgtcaagagccgccgccgctacagctgccgccgccacctggggaagagcagcagcagcagcggcggccgcgggcacacgggggcaataaaccgagccacccgggcgtccagcgtgccggggaaccctctctgcgctcactgcccggcgggacccacgccatgtgctgagccatgtccctggccgcgcccgcgggcagcgcatggggcagcgcctgagtggcggcagatcttgcctcgatgtccccggccggctcctaccgcagccgccgccgcccccgccgccggtgaggaggaagctcgcgctgctcttcgccatgctctgcgtctggctctatatgttcctgtactcgtgcgccggctcctgcgccgccgcgccggggctgctgctcctgggctctgggtcccgcgccgcacacgacccgccagccctggccacagctccggacgggacgccccccaggctgccgttccgggcgccgccagccaccccactggcttcaggcaaggagatggccgagggcgctgcgagcccggaggagcagagtcccgaggtgccggactccccaagccccatctccagctttttcagtgggtctgggagcaagcagctgccgcaggccatcatcatcggcgtgaagaagggcggcacgcgggcgctgctggagtttctgcgcgtgcaccccgacgtgcgcgccgtgggcgccgagccccatttcttcgatcgcagctacgacaagggcctcgcttggtaccgggacctgatgcccagaaccctggacgggcagatcaccatggagaagacgcccagttacttcgtcacgcgggaggcccccgcgcgcatctcggccatgtccaaggacaccaagctcatcgtggtggtgcgggacccggtgaccagggccatctcggactacacgcagacgctgtccaagcggcccgacatccccaccttcgagagcttgacgttcaaaaacaggacagcgggcctcatcgacacgtcgtggagcgccatccagatcggcatctacgccaagcacctggagcactggctgcgccacttccccatccgccagatgctcttcgtgagcggcgagcggctcatcagcgacccggccggggagctgggccgcgtgcaagacttcctgggcctcaagaggatcatcacggacaagcacttctacttcaacaagaccaagggcttcccctgcctgaagaaggcggagggcagcagccggccccattgcctgggcaagaccaagggcaggacccatcctgagatcgaccgcgaggtggtgcgcaggctgcgcgagttctaccggcctttcaacctcaagttctaccagatgaccgggcacgactttggctgggattgagcagacccgggctatgtaccttacccacgtggcttatctattgacagagattatatgtatgtaaaatgtacagaaatctattttataataatttatttttaattcataagcaattaattcactaagctgcctagccacactctttagagagttagcttcataatctgttaacattccaaagtgtttaactctagtatttcgttttcttcttcacaattgatggtgcttctattttttcttctcccctacctgttatatttaaaacaaagaaaagcacaacttgagatttttgttgttacgggtattcagccttcagtcaccgtctgagttctccagttgctgcctccttgtcttgtcttgggtctcccattccagcttccctgtctcttcctgcctgtgtacctcgtaggaacgctgagctgcctcaacagggctgtattctgaagggcaggcctcatgcagcagcctccttgcagatgtggtgtcccgtccaatgatgtagcctgaaagccacagccctagggttctg

SEQ ID NO: 22 - DNA, 1968 bp, Homo sapiens
cgcagggccacagcagctcagccgccggtgccccctcggaaaccatgacccccggcgcgggcccatggagccatggcctatagggtcctgggccgcgcggggccacctcagccgcggagggcgcgcaggctgctcttcgccttcacgctctcgctctcctgcacttacctgtgttacagcttcctgtgctgctgcgacgacctgggtcggagccgcctcctcggcgcgcctcgctgcctccgcggccccagcgcgggcggccagaaacttctccagaagtcccgcccctgtgatccctccgggccgacgcccagcgagcccagcgctcccagcgcgcccgccgccgccgtgcccgcccctcgcctctccggttccaaccactccggctcacccaagctgggtaccaagcggttgccccaagccctcattgtgggcgtgaagaaggggggcacccgggccgtgctggagtttatccgagtacacccggacgtgcgggccttgggcacggaaccccacttctttgacaggaactacggccgcgggctggattggtacaggagcctgatgcccaggaccctcgagagccagatcacgctggagaagacgcccagctactttgtcactcaagaggctcctcgacgcatcttcaacatgtcccgagacaccaagctgatcgtggttgtgcggaaccctgtgacccgtgccatctctgattacacgcagacactctccaagaagcccgacatcccgacctttgagggcctctccttccgcaaccgcaccctgggcctggtggacgtgtcatggaacgccatccgcatcggcatgtacgtgctgcacctggagagctggctgcagtacttcccgctagctcagattcacttcgtcagtggcgagcgactcatcactgacccggccggcgagatggggcgagtccaggacttcctgggcattaagagattcatcacggacaagcacttctatttcaacaagaccaaaggattcccttgcttgaaaaaaacagaatcgagcctcctgcctcgatgcttgggcaaatcaaaagggagaactcatgtacagattgatcctgaagtgatagaccagctccgagaattttatagaccgtataatatcaaattttatgaaaccgttgggcaggacttcaggtgggaataagcccacgaaaggaaagggctctcaagggctcttctgctcatctcttccgtgagatttgctcccagaccctctgatctccctccaacaaaccctggctccagccccctttcccaacttgagttgcatcatcttggaaccaggaagcccagctaaagccaagagaccagagagtccctgccactagttttcatcagtctgttcaagcaaagttgatctgctcctggcacgtccagtaaattccagaatcattctcctttctgcccataaagggccttggagaattgctttaagaagagtgaatgttccaatgatgatagatattataagcgatgatggttctgttgctatgaacacagcagtcggtccctgtcattgtccacccaggagtggccttgttaattccaagtggcatgtatcttccctctgagcttcatttcttcaagatgctctgggtggtgggatgggagaccatcctcagccctcctcagaccttatcaattcattgagagattgcaaagctgaaagcacctccggccactcctgggagacagaccctttggtgatgaaataaaccagtgacttcagagcctatggtctcaactgtgcttgaaaaacactgtctctgaaaacaactttgtgattctccctgctccctgtggacaaaagcacataattctgctgttacgggtactttgctcatacgagctttcatgttcagcatgcaatggaatcatgcttgtccatgtgaaataaatatggctctctcgtgtccttaaaaaaaaaaaaaaaaaa

SEQ ID NO: 23 - DNA, 4815 bp, Homo sapiens
tgcgcaggcgcagccggcgcgtttctccgggctacagccggcgccgccgcccgctagtccgccgcccggcgccatggcgggctgcgcggcgcgggctccgccgggctctgaggcgcgtctcagcctcgccaccttcctgctgggcgcctcggtgctcgcgctgccgctgctcacgcgcgccggcctgcagggccgcaccgggctggcgctctacgtggccgggctcaacgcgctgctgctgctgctctatcggccgcctcgctaccagatagccatccgagcttgtttcctggggtttgtgttcggctgcggcacgctgctaagttttagccagtcttcttggagtcactttggctggtacatgtgctccctgtcattgttccactattctgaatacttggtgacagcagtcaataatcccaaaagtctgtccttggattcctttctcctgaatcacagcctggagtatacagtagctgctctttcttcttggttagagttcacacttgaaaatatcttttggccagaactgaagcagattacctggctcagtgtcacagggctgctgatggtggtcttcggagaatgtctgaggaaggcggccatgtttacagctggctccaatttcaaccacgtggtacagaatgaaaaatcagatacacatactctggtgaccagtggagtgtacgcttggtttcggcatccttcttacgtcgggtggttttactggagtattggaactcaggtgatgctgtgtaaccccatctgcggcgtcagctatgccctgacagtgtggcgattcttccgcgatcgaacagaagaagaagaaatctcactaattcacttttttggagaggagtacctggagtataagaagagggtgcccacgggcctgcctttcataaagggggtcaaggtggacctgtgacgggcagtggccccggtgaccttggggcctccgaccctgtgcagcctgggacaaaactgtttccggttggccgctgccacatggattttcttaatcgttttatgtcattagtcactcttctggaatgtcactcaagaccaagcggtcagaaggcctgaggacccaaggccccactggagcagtctgtccttatgccgaatcaaggcggaacatgggtgaaagacgagtaaggggcaaatcacagcaatattccacagcgccctccagagttacctggggaggaccgaggccacacgccactgcccccgaggccagagtgtaagtaaaggataaccaggactcgctgggagagatggactctgtcctcagcaacactccacagcagaaaggggtagcaggtaccccttcttatcagcggtaaaaatgcatttacaacctttcatttaaccgaaaaacacagaccgctttaacctctttatttctgtcccccactgcatgaacatctatacaattttaaaaatacttcctcataggatgctttggcccttcatctatttaatcatagctacatacctattttttataagtagcagtacacattcaaaggggtattcctagctcaatgcttggtgttctagttcaacttttatcctgcagcaagtaagcctagataactctacacgatttggctgagtggctttgtgtgaccgtggccccaggccaaggggatcatggccctggctggctttcccgggggtctcagctcctgttgtcagtgataggcggctcaaaggagcatcagtttcttttgatccaagaagtgcttactgaatgcctgccctgtgcgtggccttaaacattgagaagtgctgctctccgtttatttgggatttgattctcattttaccatagcttatattctcaatttcaatgccagtctcagaactcttgttttctgtgttctgttctcaaaattacattgtccctcatgtcatttcaaactgttttccaaagggatttgagcatatacaactacaaatccaagcagattgactctcaaaaataatcttaaatactgcaaatagtcccaactaagattcagtcagtatgtttgttttgcaagtttgggagagtaagttggctttgagtcacacatcgaagctttaagaggtgagacgctggcttcattctggactagacaggaacttggcctcagcgtgagatcctgccatgcagtgttgcggtggcactgaagaagtgtgaatgtgaaggcggcgtcggcgcggggccagagcaccactctgctgccccaccacgcggcctgtgaggagccactaaacctttccgtgcctagacctccccatctgtggaatggggtcaataccacctacctcacaggggtgttgtgaggactgagaagaacaatgtcaaatgtttttaatactcagatgtgggagcgacatcaatgaaatctgtactgtatgaaagctacacaaaaatgggcagacatttggttaattgtgccagatacctaaaatgtatgttcagaaaagcattttatcaactcagaaatatgacttatttctagatttcatggcttaatgaattttttcattgttatatataccaaagaggcttacgggttcattgattggtttgaaaaccagacagacggccgggcgcggtggctcacgcctgtaatcccagcaatttgggaggccaaggcgggtggatcatgaggtcaggcgttcgagaccagcctggccaacatgataaaaccccgtctctactaaaaatacaaaaaaatagctgggcgtgctggcgggtgcctgtaatcccagctactcaggaggctgagacaggagaatcctttgaacccaggaggcggaggttgcagtgagttgagatcgggcctttgcacttcagtctgggcaacagggcgagactccatctcaaaaaacaacaacaacaacaaaaaaaaccggacggacttgcccatcggccctcacgacacgcgtgcagtgggactctagccaaggcggtggccgagccatcattacaatttttctggagtaaaggatccacggtgggacatcaactggcacttactctgtttaggaacttgagttgaatcatttctaaacttgtcctttagaccacgcctagggcagcaaattccacttcctagaactgcaaaccgggagaggatgtagttagattctggcatcctgccccggctctttgagggaaaagttctttcccctgctctaagtagggcgggcccagcctccattcccattgggagccatgaagttgtcttgttgataggtctagggcagctgttggcagctgctggccttgtggatggtaagctgactgtgttggcatttaatgccatcctccatctgccagaggcccaggaagcccaccttcacaccaggcccaccagctggaaggagcccaggaggcaggtcttagggtttcatggtgaaatgctgtctgacaccagggaaaacttgacgtactctgctttggagaggaattccaggggtagggatggtgggagaacattcccaccctgtttataatcccagagcagaagtcagcaattacttagggataaaagatgaactccattttttttattttcttaagacagtcttgctctgtggcccaggctggaggctggagtgcagtggcaccatttcggctcaccgcaacctctgcctcccgggttcaagcgattctcctgcctcagcctcctgagtagctgggattacaggcttgggccaccatgcccagctaatttttttgtatttttagtagagacggggtttcaccatgatggccaggctggtctcgaactcctgacctcaagtgatccacgcgcctcggcctcccaaagtgctgggattacaggcgtgagccaccacgcccagccaagatgaactccttaaggacaggatttggtaagtgattgacttctttttagttccatgatcttgagattatttttagctttataaatttagcagtggcagggcccgtggagaatcaggttaatgaggtaaaggctttctgggtatttgctgccaaggccacatcaccaattttctcgatttaaaaaactgtcaagagatttatttttccattgcaggttttaaagtggagattctgaagtggaaaataggtactgtcagaacaaagctacctggaaacagcatagagtgaagcctttcgtgagggcttgcaggccgctgctgagtggcagtttacagaagaggtcgcggggtgagcctcttagcaggacagaaaacaaggcagcagcgcacctgccaccccttcacgagctgctccttgagcctaaaaagtaggctttattcatcccttctgttcatttaccaacctgggggattgatacgaccggggaaaatgttcctaaaccaggaagctgcgttagccgatcaggctttgtaagatctcgccaacagctagctgcttaggagtacccccacgatacgcacagcacaccactgtcccttcactgcactttcttcctgccttaggtagttgggcttgcccaccctagtttgcttttgtagtggtttggcaaggttagaaggcctcggcctctctgtcatgctgggaagtgcctactctctgggccactgctgcagaggccgtggcacttgtcatgggtttggaagacccagccatctgcagcagaggcagcctatcccattgcaaggagaggaactgaacggagtaattattctactcttctttttacataaatgtttatttaaatattctaaattggattttctttcacagatactgattattctttccagttcttaaataaaactgcacttgatttcactcaa

SEQ ID NO: 24 - DNA, 8934 bp, Homo sapiens
agtctgtcacacagggacatcaccctacagcagttcaggctgtgtggttcgcaggaagcatacactggctttttgattcttgctagttcccagctcacagtttgggaggatccaacaccaacctttacgtgaagtggaggcccaaggacagtgaggagctgggtggtcccagcctggagctgtgccagcctgacatggaaatggaggcaaacgaccattttaactttactggccttccccctgcacctgctgcctcaggactgaaaccctctccttcctcaggggagggcctctacactaacgggtctcccatgaacttcccccagcaagggaaaagtttgaatggggatgtgaatgttaatggcttatctactgtatctcacactactacttcagggattttgaactctgctccccactcctccagcacctcacacctccatcaccccagcgtggcctacgactgtctctggaactactcacagtacccatctgccaatcctggcagcaacctcaaggacccaccccttctctcccagttctcggggggacaatacccactcaacggcatccttgggggcagccggcaaccttcatccccaagtcataacactaaccttcgggctgggagccaagagttctgggccaacggtacccagagtcccatggggcttaactttgattcacaagaactgtatgattcctttcctgaccagaattttgaggtgatgcccaatggaccccctagttttttcacctccccacagacttctcctatgttgggatctagcattcaaacctttgcaccctcccaggaggtaggcagtggtatccatcctgatgaggcagcagaaaaggagatgacttcagttgtggcagagaatggcactggcttggtaggcagcttggagctggaagaagagcagccagaactgaagatgtgtggctacaatggctctgtcccttctgtggaatcgttacaccaagaggtctcagtcctggtccctgaccccacagtgagctgtttagatgatccttcacatcttcctgatcaactggaagacactccaatcctcagtgaagactctctggagcccttcaactctctggcaccagagccagtgagtggaggactatatggtattgatgacacggagctgatgggtgcagaggacaagctgcctcttgaggacagccctgtgatttctgcccttgattgcccttccctcaataatgctactgccttcagtctcctggcagatgatagtcaaacatcaacctctatctttgccagtcccacctctccacctgtcctaggggagtctgtcctgcaagataacagctttgacctgaataatggtagtgacgctgaacaggaagaaatggaaactcaatcttcagacttcccaccatccctgacccagccagctcctgatcagtcatccactattcagctacatccagcaacctcaccagcagtctcgccaacaacctccccagcagtctccctagtggtttctccagcagcctccccagaaatctctccagaagtttgtcccgcagcttctacagttgtctctccagcagtcttctcagtggtctctccagcttcctcagcagtcctcccagcagtctccttagaagtcccgttgacggcttcagtgacatccccaaaagcctctcccgtaacttccccagcagctgcctttccaacagcctccccagcaaataaggatgtcagcagctttctagaaaccactgctgacgtggaagagatcactggagaaggactcactgcttctggtagtggtgatgtcatgaggagacgtattgctaccccagaagaagttcgtcttcccctccaacatgggtggcggagagaggtgcgcatcaagaagggcagccaccgatggcagggggagacctggtattatggcccctgtgggaagaggatgaagcaatttccagaagtgatcaagtacctgagccgcaacgtggtacacagtgtccgccgagagcacttcagcttcagtccccgtatgcctgttggagatttctttgaagaaagagacacgccagagggcttgcagtgggtgcagctctcagcagaggagatcccgtcgaggattcaggcaattactggcaaacggggtcgacctcgaaacactgagaaggctaagactaaggaagtccccaaggtgaaacggggtcgaggtcggccacctaaggtcaaaatcactgagctattgaacaagacagacaaccgccccctaaagaaactggaggcccaagaaacattgaatgaggaggataaagcaaagattgctaaaagcaagaagaagatgaggcagaaggttcaacggggagagtgtcagactactatccaagggcaggccagaaataagcggaaacaagagaccaagagcttaaagcagaaggaagctaagaagaaatccaaggctgagaaagaaaaaggaaagacaaagcaggaaaaactgaaggaaaaagtcaagagggaaaagaaggagaaggtaaaaatgaaggaaaaggaggaggtgaccaaagccaagccagcctgtaaagcagataagaccctggccacacagaggcgcttggaggaacggcagaggcagcagatgatcttggaggaaatgaagaagccgacagaggatatgtgtctgactgaccaccagcccctgcctgacttctcacgagtccctggtctgacattgcccagtggagccttctcagactgcttgaccattgtggagttcctgcatagctttggcaaggtgctgggctttgatcctgccaaagatgtgcctagcctgggggtcctgcaggagggactcctgtgtcaaggtgacagcttgggtgaggtgcaagacctgctggtcaggctgctgaaggctgcactccatgatcctggctttccctcctactgtcagtccctaaagatcttgggggagaaggtgtctgagatcccactgacaagagacaatgtgtcagagatcctgcgctgcttccttatggcatatggagtagagccagccctctgtgaccgcctgcgcacccagccttttcaggcccagccaccccagcagaaggctgctgtcctggccttccttgtgcatgagctcaatggctccaccctcatcatcaatgagattgacaagactctggagagtatgtccagctacaggaaaaacaagtggattgttgaaggccggctccggaggctgaaaactgttctggccaagcgaactgggcggtctgaagtagagatggaagggccagaggaatgcctgggacggaggcgcagttctcggatcatggaggagaccagtggcatggaagaagaggaagaagaggagtctatagcagctgtccctggccgcaggggtcgaagagatggagaggttgatgccacagcatctagcatcccagagctagagcgccagatagaaaaactcagcaagcgtcagcttttctttcgcaaaaagctgcttcactcatcccagatgcttcgggcggtctccctgggtcaggaccgctacagacgtcgctactgggtattgccgtatttggctggtatctttgtagaaggaacagaggggaacttagttcctgaggaggtgataaagaaggaaactgactccttaaaagtggcagcccatgcgtcactcaaccctgccctcttctctatgaagatggagttagctggctccaacaccactgccagttctcctgcccgggcccgaggccgacctcgaaaaactaagcccgggtctatgcaacctaggcatcttaagtcccctgtcaggggtcaggattcagaacagccccaggcccagcttcagcctgaggctcagcttcatgctcctgcccagccccagcctcagcttcagcttcagcttcagtcccataaggggttcctggagcaagaaggctcccctttgtcactgggtcagagccagcatgacctcagccagtcagccttcctgtcttggctgagccagactcagagccatagctccctgttgagcagctcagtcctcacacctgatagcagtccgggaaaactagacccagctccatcacaacccccggaggagccagagcctgatgaggcagaatccagccctgatcctcaagcactctggtttaacatctcagcccagatgccctgcaatgctgcccccacaccgccccctgcagtttctgaggaccaacccactccctcccctcagcagcttgcctcctccaagccaatgaatagacctagtgctgccaacccttgttctccagtgcagttctcttccacgcccttggctgggttggcccctaagaggcgagcaggagaccctggagaaatgccacagagtcccacagggctgggacagcccaaacggagagggagacctcccagtaagttcttcaaacagatggaacagcgttacctaacccagctgacagcccagcctgtcccacctgagatgtgctcaggctggtggtggatacgagatcctgagatgttggatgccatgctcaaggccctacacccccgaggtatccgggagaaggcacttcacaaacaccttaacaagcacagggacttcttgcaggaagtctgcctgcggccctcagctgaccccatctttgagcccaggcaactacctgcctttcaagaagggattatgagctggtcccccaaagagaagacatacgagacagacctagcagtgcttcaatgggtagaggagctggagcagcgggttatcatgtctgatctgcagattcggggctggacatgtcctagcccagactctacccgtgaagacttggcctactgtgagcacctctccgactcccaggaggatatcacctggcgaggtcggggcagggagggactggcacctcagcgtaaaactaccaaccctttggacctggctgtgatgcggctggctgccctggaacagaatgtagaacggcggtacctgcgggagcccctctggccaactcatgaggttgtgctggagaaggccctgcttagcacacctaatggtgcccctgagggcaccactacagagatatcatatgagatcacccctcgcattcgtgtctggcgccagaccctcgagcggtgccggagcgcagcccaggtgtgcttgtgcctgggccagctggagaggtccattgcctgggagaagtctgtcaacaaagtgacatgtctagtctgccggaagggtgacaatgatgagtttcttctgctttgtgatgggtgtgaccgtggctgccacatttactgccatcgtcccaagatggaggctgtcccagaaggagattggttctgtactgtctgtttggctcagcaggtggagggagaattcactcagaagcctggtttcccaaagcgtggccagaagcggaaaagtggttattcgctgaacttctcagagggtgatggccgccgacgccgggtactgttgaggggccgagaaagcccagcagcagggcctcggtactcggaagaagggctctccccctccaagcggcggcgactctctatgcggaaccaccacagtgatctcacattttgcgagattatcctgatggagatggagtcccatgatgcagcctggcctttcctagagcctgtgaacccacgtttggtgagtgggtaccggcgcatcatcaaaaatcctatggatttttccaccatgcgggagcggctgctcaggggagggtacaccagctcagaggagtttgcggctgatgccctcctggtatttgacaactgccagactttcaacgaggatgactctgaagtaggcaaggctgggcacatcatgcgccgcttcttcgagagccgctgggaggagttttatcagggaaaacaggccaatctgtgaggcaagggaggtggggagtcaccttgtggcatctccccccaccttccaaacaaaaacctgccattttcacctgctgatgctgccctgggtccagactcaagtcagatacaaccctgatttttgaccttgcccttggcagtgccccacatcctcttattcctacatccctttctcccttccctcctcttgctcctcaagtaagaggtgcagagatgaggtccttctggactaaaagccaaaaaaagaaagaaaaaaataatttttcttttctgttttatttgctaattaaaaatggggagggggaaagtcgtccctacttcctcctccctgcttcctctcctcccctgtacgtgccccagcattctggggttatttaacaatagcaatagttctagtgaatgtgtgaaaccaagaaacactctgtactgtgtgcggacccgcagtgacggccagtaaagtggacttaactcccaagtgtgtcgcgccggacaccgggccctggacatgctgcttccatgttcagtcccttccctgcttctcgctgtctttcttttcccacctcccaccccccagttttcagattttctctcatccaataatgtaaaactatcgtgtacgggttcctccctccttttctcttctcccaaatcttttcccttcaaaggaaaaaaaaatgttcagaggtccctgtcttctgtccccatcttcctgccgatagctatcccctgtatgatgttggatgctcctcacatgctgagtttccagccttttctgaaactcagtagctggggagagggcagggaggcttcctgggccttccagcctccttccccacctccttcccaaaccctcttgggaactcctcagggacaactactgctgagtttgggtgcaccctaagatggaggccaggtagcaatggggccggcctcagagagagcgctgtgtgtgtgtgtgtgtgtgtgtgtgtgtgtgtgtgtcggcctcagagcgcgctgtgtgtgtgtgtgtgtgtgtcagcctcagagcgcgcgctgtgtgtgtgtgtgtgtgtgcgtgcttgtgaccctgtattgtttgataggatccattcagtttccccaagtacctgttttcattcccatttttcccattgtttaaaaccatcacttttttgtctttgggaaaccacaggaacaatttctctggagacaaggctgtgtctctctcctggtcatttttgttccagcctcttcagactgtgcaatctttcagcaggaactccctctcttctcggtagctttgaatcttaagcttctacgggagagtggtagaactggatcatttcctaatcccatttagttgtgcttttcttcatttacttcataccccaggaccccttccccagcagcagagaccctggagcacaggagagtagggaggaggggttctgggtccatcactgccctacatgtgactatgtccaagttaagcccccaacacgagaggaaagctgctgactcccagctatagccatgggcacttggccccctgcttttcctgctcagcagagcccctcccttcagagattacgggtacttgcactggggaggtggctgctggctggcccaagcagagagctgaggcatccaagaaatgttccattggggggtgggggtgccaggtgaggtggagcattccttgtattctggcagcactgaagagccactgaagggggtaggggcagtgtaggtcctggggcagcccctttattcctttatgccccttctccctcatagcctatttctaaagtcgccttttctgtcagataaacctcaaaacttttaattttatttgagatttttttttgcttttaagaggtggattgaagaatatttgaattgactttatattatgcataaatatttatattttatctaaataactgcgctgtaacaaactttgtgttagacagttgaaactgttagagttgggggctctgctttttccccctggcaattttcccctggtataagatgtgctagattaatttcattgtgaggtggatgggggagtgaaattgtgaggtggatgggggagtgaaatctccatggttcctgctttgtgttcctctcccagctccatctctttccctagggaccaggcactcatatggcggggtggggtcctagcctcagtttgaagaagtgggggctggagcggggttgggggtggtagggatagggcatgatcaaaggggccatttcttgcttttctttcctcatcttcactgcccccttgagctaggtggattttctcttcatgacaagagtatttggtagggaaagcaggtttaaaataaaaagacaacccaccccctgcccttttgcttccctcccatcagtctggttgacaggaagaaaccacaccatcaacaccaacaagtttctgtgttccttttacagcaaaagggactttttatataaccaaatgtggtgttttagtgactttttgataatgtacagttttttgtgaatttaaatttatttctttctatatttttaggaccaatctcatttttaataaggttaaaaagaaaaaaaaagtctagcgaaaaaactcctgtttttgccatgtgatgttccacaagtgcagctgtagaaaagtgcttgtcagttgttgaataaaaaaaaccacatttgatagagattcaaaagactctgtgtattcatcttcccttctacacacctgagggggagacggcgttgggataggtatgactggcttaagagaccacaggcaagggaacaacaggggctcctgttccataccctctgtgtggatggaaagggtcattagtgctcctgcctaaatgtctggctgagttgctggagcaaagggggattcagtgcatccaggtcctgccttgtgagatgtggccccagcttcctaagctgccacctctgtgttcctgtcatagcaaatatgggaccatcaccagcttaccacttcccactcacggataagacaccaagacgtagac

SEQ ID NO: 25 - DNA, 11412 bp, Homo sapiens
gacaggtcgaggcggggaggcggcggcggcggctgcagagccaggcgcccaagacggagaccccatggggaacgctccgagtcacagcagtgaagacgaagcggcagctgccggtggcgagggctggggcccacaccaggactgggccgcggtctcgggcacgacccccggcccgggcgtcgcggctccagcgctaccacccgccgcggcgctgctggagccggccaggctgcgagaggctgctgcagcgttgctgcccacacccccctgcgagtcgctggtgtcgaggcatcgcggcgcgttgtttcgctggctggaagagcggctgggccgcggcgaagagtctgtcactctggagcagttccgggagctgctggaggctcgcggcgccggctgctctagcgagcagttcgaggaggcctttgcccagtttgatgctgagggtgatgggacagttgatgccgagaacatgttggaggccctcaagaattccagtggagctaatcttcagggggagctgagccacatcatcagacaactacaggcctgctctctggttccaggtttcacagacatattttcagagtcgaaggagggccttgatattcactcgtcaatgatactgcgcttcctgcaccgcaatcggctctccagcgcggtgatgccctacccgatgctggagcactgcaataacatgtgcaccatgcggtcttccgtcctgaaggagtctctggatcagctggtacaaaaggaaaaggaaagccctggagatctaactagaagtccagagatggataaactcaagtcagtagcaaagtgctatgcttatatagaaacatcctccaactcggcagacattgacaagatgacaaatggagaaacctcatcctactggcagtcagatggcagtgcctgttcacactggattcgtttaaaaatgaagccagatgttgtgcttaggcacctgtccattgcagtggctgccactgaccagagctacatgccacagcaggtgacagtagctgtagggaggaatgccagcgatcttcaggaagtccgagatgtgcacatccccagcaatgtcactggctatgtgacgctgctggaaaatgccaacgtcagtcagctctatgtccagattaacataaagcgttgtcttagcgatggctgcgacactagaattcatggtctcagggctgttggctttcagagagttaagaagtctggggtctcagtctcagatgcttctgcaatatggtattggtctctgctgacatctctggtgacggcttctatggagacaaatcccgcctttgtccagacagtgctgcacaatactcagaaggcgctgcggcacatgcctccactctctctctcaccaggatctacagatttctcaactttcctctcccctaatgtgctggaagaagtggacagtttcctcataaggataactagctgctgttctaccccagaggtagaactgactcttctggcttttgctctcgcaagaggaagtgttgccaaagtcatgagctctctatgcaccatcactgaccatctggacacgcagtatgatgcctcatccctcatcttgtccatggcgtcagtcagacagaacctgctcctcaaatatggtaaacctctccagttgactcttcaggcatgtgatgtcaaaggaaaagaagataagtctggacccgaaaacctccttgttgaaccgtggacaagggatggttttcttacggaaactggaaaaaccagagccagcactattttttctaccggaactgaatctgccttccaagttacacagataagaattatggttcgacgtggtggcattggtgcccagtgtgggttggtgtttgcctataactcatcttcagataaattttgtgcggaagaacacttcaaaaggtttgaaaaatatgacaaatggaagcttcaggagctcaggcaatttgtaaaaagcaggattggttgctcatctgatgaccttggagaggatgatcctattggctggtttgaactggaagaagaatgggatgaagcagatgtgaagctgcaacagtgcagagttgccaaatatttgatggtgaagttcctctgcacccgtcaggagtcagcagagcgcttgggagtgcaaggcttgaccatcagtgggtacctccggcctgcaagagcagaagcagaacagagcgtcacctgtgcacactgcagaaaggacacagaggagagtgtctgtggggccacgttgctcctcaggacccttcagtttatccagcagctcgcccatgacctggtgcagcagaaggaaagtggcttaaaatataaatcttttctggacttcgcgggtcttgatttgcagatcttctggaatttttacagtaaattaaagcaaaacccgagggaagaatgcgtctctgcccaaaccctgcttctgcagctactccagagctgcttctctgtgctgcagggagatgtactggctgcttctgaggaggaaaaggctccaatccaaagccctaaaggagtagaggctgccaaggagctgtacacacacttgtgtgatgtggtggacaaggtggatggagactctgtgcccatggagatactaaaacaagaagtcaggaatacccttctcaatggggctgccatcttctttcctaatcgacagacccgacggaaccatctcttcaccatgatgaatgtcaccgagcaggagcacaagcagtccctgcagctcactttccgttcactgtgcacgtattttagtgacaaggatccaggcggccttcttcttttacctgagaagaacgacctggccaagatgaacatcagtgaagtcctggcggtcatggacactctcgtctctgttgctgctcgagagtgcgagctgttaatgctcagtggggccccaggggaggtgggctctgtgctcttctccctgttctggtccgtccaaggcagcctgctatcctggtgctacctgcagctgaagagcacggactctggagccaaagatcttgccgtggaccttattgaaaaatatgtgggccagtttctggcaagcatgagagcgattttggaatcccttttctcacagtacagtggaaaaaccatagtagaaagattatgtaactcagtgttttcaatggcagctcgtcaactggttatcttcctgctggacttctgcactttagacatcccacactgcgtgctcttgagagagttcagcgtcctcacagaactcctgaagaagctctgtagtggccccgaaggaggactgaggaagctggatgttgagacctggcaacaggaacagcctgtggtgttacatacgtggacgaaggaatctgcccacaactatgaaaataattgccatgaggtatccgtctttgttagcccaggggcaacctattttgaagtggaattcgatgacaggtgtgaaactgaaaaaaggtatgattatctggaatttaccgacgctagaggtcggaaaacacgctatgacacaaaagttggcactgataaatggcccaagaaagtgaccttcaaggccggtcctcggttgcagttcctctttcactctgacagcagtcacaacgaatggggctacaaattcactgtcactgcctgtgggctgcccgatgttgccgtgtcttgggggctggatttacagctcctcgtctcccggctgatgggacgcctggcttcccagtgcatggcgctcaagtctgtgcgccagttaggaagtaacatggtagtacctcaggcaaaaatggcattagtcctaagctccccactgtggaaacctgtcttcaggcatcaggtttgtccagagttggaattagaagcaagctggcccactcacccacaccggaatagtaaggaggttaagaacattcctgacgacccctgccgccattttcttcttgattttgcccagtcagagcctgctcagaacttctgtgggccatattcagaacttttcaaaggattcatacaggcatgtagaaaacaggccccaaagacagatatagttgctggttccactattgatcaagctgtgaacgccacctttgctgctctggtgtatcgcactccagatttatatgagaagctgcaaaaatatgtcaacagtgggggcaaaatagccctgagtgaagagtttgcccaggtttattccttggcagatgggattcgaatatggatgttagagatgaagcagaagtccctgatgagcctggggaatgaagcagaagaaaaacatagttcagaagctactgaggtgaaccctgagagcctggcaaaagagtgcattgagaagagtcttctattactaaaatttctgcccacgggcataagttcaaaagaaagctgcgaaaagttggagactgctgatgaaaccagtcatctccagccactcaacaagcgtcagaggacaagctctgtggtggaagagcatttccaagcctcagtatctcccactgaagccgcaccccctgccacaggagaccagagtcctggcctgggcacccagccaaagctgccatccagcagtggccttcctgctgcagacgtgtcccctgccacagctgaagagcccttgtcaccttccacacccacccgccggcctcccttcacccgagggcgactccggctgctctcctttcgatccatggaggaggccagactggtgcccacagtgaaagagaaataccctgtgctgaaggacgtcatggacttcattaaggatcagtcgctctcgcacaggagtgttgtgaaggttctttccctgaggaaagcccaggcccagagcatcctggaagtcctgaagataactcagcactgtgcagaatcccttgggcagccccactgcttccatccacctttcatacttttcctgttggaacttctgacctgtcagaaagattttaccaattattttggacacctggaaggctgtggtgctgatctacacaaagaaattcgagacacttactatcaacttgttctgtttttggtcaaagcagttaaaggatttagtagcctaaatgacaggtccttgctccctgccttatcctgtgttcagacagccctgcttcatcttttggatatgggctgggaacccaatgatctcgccttctttgttgatattcagttaccagatctcctcatgaaaatgtcacaggagaatataagtgtccatgacagtgtgatcagccaatggagtgaagaagatgagcttgctgatgccaagcagaattcagaatggatggatgagtgtcaggatggcatgtttgaggcctggtatgaaaaaatagcccaggaagatccagagaagcagaggaaaatgcacatgttcattgctcgctactgtgacctgttaaatgtggacatctcttgtgatgggtgtgatgagattgccccctggcatcgataccgctgtctgcagtgcagcgacatggatctctgcaaaacttgcttcctaggtggggtgaagcctgagggccacggagacgaccatgaaatggtcaacatggagtttacctgtgaccactgccagggtttgatcataggccggaggatgaactgcaatgtttgcgatgactttgatctttgctacggatgctatgcagcgaagaaatactcctacggccatttgcctacccacagcatcacggcccacccaatggtaaccattcggatcagtgaccggcagaggctcatccagccatatatccataactactcctggctgctctttgctgccctggctctctatagcgcccacctggccagtgcagaggatgtggatggggagaagctggacccccagacgcgcagcagtgccaccaccctgcggagccagtgcatgcagctcgtcggggactgtctgatgaaggctcatcagggaaaaggccttaaagctctagctttgctgggtgtattgccagatggggactcgagcctagaagatcaggccctaccagtcactgtgcccaccggagcgtcagaggagcagctagagaagaaagctgtccagggtgctgagctgtcagaagcaggcaatggaaagagagctgttcatgaggaaatcagacctgtagatttcaagcagagaaataaggcagataaaggtgtatcattatcgaaggatccttcatgccagacccaaatttcagattcacctgcagatgctagcccacctacaggacttccagatgctgaagattcagaagtgtcatctcagaagcccatagaggaaaaagcagttactccaagccctgagcaagtgtttgctgagtgttcccagaagaggattttgggattactagcagccatgttacctcccttaaagtcgggccccacggttcccctgatagacctggagcacgtccttccactcatgtttcaggttgtcatctcaaacgcaggccacctgaatgaaacctaccatctcaccctgggtcttctcggccagttaattatccgtcttttgccagcagaggtagacgccgcagtgatcaaagtcctctcagccaaacacaacctgtttgctgcaggggacagttccattgtgccagatggctggaaaaccacccacctgctctttagcctgggagctgtgtgtctggacagccgggtgggcttggactgggcgtgctccatggcagagatcctgcggtcactcaacagtgccccactgtggcgtgatgtcattgccaccttcacagaccactgcatcaagcagctgccattccagctgaagcacaccaacatcttcaccctgctcgtgctggttggcttcccccaggtcctctgtgtgggaacccgctgcgtttatatggataatgccaatgaaccccataatgtgatcatcttgaagcactttactgagaagaacagggctgtgattgttgatgtcaaaactcggaagaggaaaacagtgaaggactaccagctggtccagaagggaggaggacaagagtgtggtgactctcgggcccagctgagccagtactcccagcactttgcctttatcgccagtcaccttctgcaaagcagcatggacagccattgtcccgaggcagtagaagcaacttgggtcctgtccctggccctgaaaggattgtataaaacactaaaggctcacggttttgaggagatccgtgctactttccttcagaccgatttgctgaagttgctggtgaaaaagtgcagcaaagggactggctttagtaaaacgtggctcctccgggacctggaaattttgtccatcatgctgtactcctcaaaaaaggagatcaacgctttggctgagcacggagacctagagctggatgagcgaggggaccgagaggaagaggtggaacggccagtcagcagccctggcgacccagagcagaaaaagctggacccccttgagggcctggatgagcccaccagaatatgtttcttgatggctcatgatgccctcaatgcccctctgcacattctccgggccatatacgaactgcagatgaaaaagaccgattatttcttcctggaggttcagaagaggtttgatggtgatgagctcaccacagatgaaaggatacggtccctggctcagcggtggcagcccagtaagagtctgaggctggaagaacagagcgccaaagctgtggatacagacatgattatcctgccatgcttgtcccggcctgcacgctgtgaccaagccactgctgaatcgaaccctgtgacccagaagctgatctccagcacagagagcgaactgcagcagagctatgccaagcagcgccgtagcaagagcgccgccctcctgcacaaggagctgaactgcaagagtaagagggctgtccgggactacctcttccgagtgaacgaggccacagctgtcctgtacgcccgccacgtgcttgcatccctgctcgccgagtggcctagccacgtgccagtgagcgaggacatcctggagctcagtggccctgcccatatgacctacattttggatatgttcatgcagctggaagaaaagcatgagtgggagaagatcctgcagaaagtgctccagggctgccgagaggacatgctggggaccatggccctggctgcatgccagttcatggaggagccaggaatggaggtgcaagtgagggagtcgaaacacccgtataacaacaacaccaacttcgaggataaagttcacattcctggtgccatctacctctcaatcaaattcgactctcagtgcaacacagaggagggctgtgacgagttagccatgtccagcagcagtgacttccagcaagaccgacacagcttcagcgggtctcagcagaagtggaaagattttgaacttccaggagacactctgtattaccgcttcacctccgacatgagcaacaccgagtggggctacagattcaccgtgacggccggacacctggggcggttccagacaggattcgagattttgaagcagatgttgtcagaagaaagggtcgtgcctcatctcccattggcaaaaatttgggaatggctggtgggcgtggcctgtcgccagactggccatcaacgattaaaagccatccacttacttctgaggattgtgcgatgctgcggccacagtgacctgtgtgaccttgcgctgttgaagcccctgtggcagctctttacccacatggagtacggcctgtttgaggacgtgacgcagcccggcatcctccttcccctgcatcgtgccctcactgagctcttcttcgtcaccgagaaccgtgcccaggagcttggcgtgctgcaggattacctgctggccctaaccacggacgaccaccttctccgctgtgcggcacaggctctgcagaacattgctgccatcagcctggccatcaactacccaaacaaggccacccgcctctggaatgtggagtgttagcccttggtggggcgtgcatgggactagttcatctgccacagggattttagagcagacatctaacctcattcaggaaaactcctgtagcgccagtgcccagctctccttgagctgaccactccagttaggatgccaagcagccacgtctccaagagctcccgtgcgtaggctggacacaagcacaggctgtagcatggtgaaaataagccaagcagtgcagaatgcctcagaaagggtgggcagggggcccttaagaaggttcagagaccagccttctccagaggctgtcactgcaggagccgtgggcctgggaagacttggaagcggcctctctcaactggtttctgtctccgtggagctggaactgcctgcacttgccttcagagggaggcacagtccacccagatccacctttccagcaagacccccagtggctgcccagcctgggagcacctctttgcttttcacaccaaaccaaaactggcgagagcccctcctagccaccagtgatccccaagcatccagtacagaaccaggcatcgagctagctccctgcacggccgcaccctcccagagaactccttgaggagaacaagtgcccttggggacagccggcaggcgcccctgtacgtctgctcatgcaccaggcagcacagccgcagttcctcagttgttgttttgacatatttcagtttccacctcacgtttttagagcagaaccacactgtctccctggaggggctcgagggcatgaccggggactgaccattctgtgaaaggagcagaatgtgaggagcacgcgtgagcttatgtaccgtgaagatgatcagaggatatcttattttaagagtaaaaacccacataattttatttctgcttgatagtcatggtagtctgtcatacccacctctgggactctgcgtggctgtttggctgtcacttgtagcaataacgacattagttctagtcagtgctgttttacatttttcttttgatgggtttagtcttgccctggagtgccgatgatgattctccctccagagccacgcttgggaacatgaagcaagtctggcgtgtgggctgcgtgccggccttagtgggacccgtggggttggagcatgcctttaggggcagtgtctgggccgaagcacgtcccaccacacagtgccagagccagagaaggggccccaccaccaaggccaagcttgaccaggtcagcattgccatggcccagtgtgccccgtggcctctgaagatccctctgtgcagggtctgcagggatctggattgcaagggcccaagtctgcaggtctggaagcatcttcctataagagcactttcgccttctgggtcaggactccaaggtgcagcgggcttcacagccctacaattgggttctcagctaagccccagagttctggtagaaccatcccggggcgggtggagggtgggatttaagggagacgggaacacatggggcaggtcctggaacttggtggcctgaggactgaggccattgccctggtggaaaggcctggcctggttcctgtggcttgggacctgaataggcaggtgctgctggctccgtagaaacccttttcccatcttttgctctttgccaaacctaccttgctttgggagctgcctgcaccaccccagagaaggccccaccttcttcatccctcagacccgaggaggcctcccagtaaggagtttcccaagaggggactcacaggaaacaagtcttagtgcttgggagggaggccccgctgcgtgctcagactcacagccaacctggaaggtagacgagatagcgccacccacgcccctccacaccccagactccgagtaaagcgggcggtagggccggagtcacctcccctatggcagtggccgccgctgtactccatcctcccgtcaggaagatcagctgtaaataaacgctgggctccccagagcacctgtccgcccactgcccttgctgttctgggatcttcgctgcagttcacgggaaacaagcctgagtccgctcgcacccgcggctgctctcccggctcggcccggccgcctctgtctccggccaccgggtggcgctgccgagccagagccgccgcgtcccggcgctttccaggagccccaggcccggaggaggcgaagcccgcagagcaaaggtggaaacacgtgcctacgctgtaaagaaatcctgttccagagcatacctgttgtacaaacagacactgttcctaacgagaggagtgacgtattttcatcaccgtttttaatttgttttcttacgggtttacgattttgaatttttcttatttggttgaaagaattttgattctatcagcctgagtgagttcagcctgtaaaaaggatgttaagctgtgggtaaaatatgcaaacgaaaagaaatatattgtacaaattctatataataaggtaaaaaaaaaaaaaaaaaa

SEQ ID NO: 26 - DNA, 10389 bp, Homo sapiens
tccggtcggcattttgttctgagagggagagacggaacgagagagagacacacacagggctccttccccccgccctcccccccctccctccgtcggtaccgactcacccgacaccaccaagccgcagggagggacgcccccgccgacaggagaattggttcccgggcccgcggcgatgcccccccggtagctcgggcccgtggtcgggtgtttgtgagtgtttctatgtgggagaaggaggaggaggaggaagaagaagcaacgatttgtcttctcggctggtctccccccggctctacatgttccccgcactgaggagacggaagaggagccgtagccaccccccctcccggcccggattatagtctctcgccacagcggcctcggcctccccttggattcagacgccgattcgcccagtgtttgggaaatgggaagtaatgacagctggcacctgaactaagtacttttataggcaacaccattccagaaattcaggatgaatggggatatgccccatgtccccattactactcttgcggggattgctagtctcacagacctcctgaaccagctgcctcttccatctcctttacctgctacaactacaaagagccttctctttaatgcacgaatagcagaagaggtgaactgccttttggcttgtagggatgacaatttggtttcacagcttgtccatagcctcaaccaggtatcaacagatcacatagagttgaaagataaccttggcagtgatgacccagaaggtgacataccagtcttgttgcaggccgtcctggcaaggagtcctaatgttttcagggagaaaagcatgcagaacagatatgtacaaagtggaatgatgatgtctcagtataaactttctcagaattccatgcacagtagtcctgcatcttccaattatcaacaaaccactatctcacatagcccctccagccggtttgtgccaccacagacaagctctgggaacagatttatgccacagcaaaatagcccagtgcctagtccatacgccccacaaagccctgcaggatacatgccatattcccatccttcaagttacacaacacatccacagatgcaacaagcatcggtatcaagtcccattgttgcaggtggtttgagaaacatacatgataataaagtttctggtccgttgtctggcaattcagctaatcatcatgctgataatcctagacatggttcaagtgaggactacctacacatggtgcacaggctaagtagtgacgatggagattcttcaacaatgaggaatgctgcatcttttcccttgagatctccacagccagtatgctcccctgctggaagtgaaggaactcctaaaggctcaagaccacctttaatcctacaatctcagtctctaccttgttcatcacctcgagatgttccaccagatatcttgctagattctccagaaagaaaacaaaagaagcagaagaaaatgaaattaggcaaggatgaaaaagagcagagtgagaaagcggcaatgtatgatataattagttctccatccaaggactctactaaacttacattaagactttctcgtgtaaggtcttcagacatggaccagcaagaggatatgatttctggtgtggaaaatagcaatgtttcagaaaatgatattccttttaatgtgcagtacccaggacagacttcaaaaacacccattactccacaagatataaaccgcccactaaatgctgctcaatgtttgtcgcagcaagaacaaacagcattccttccagcaaatcaagtgcctgttttacaacagaacacttcagttgctgcaaaacaaccccagacttctgtggtacagaatcaacaacagatatcacaacagggacctatatatgatgaagtggaattggatgcattggctgaaattgagcgaatagagagagaatcagctattgaaagggagcgcttctcaaaagaagttcaagataaagataagcctttgaaaaaaagaaaacaagattcttacccacaggaggctgggggtgctacaggaggtaatagaccagcttctcaggagacgggttctacgggaaatgggtcaaggccagcattaatggttagcattgatcttcatcaggcaggaagagtggactctcaggcttctataactcaggattcagactccataaaaaagcctgaagaaatcaaacaatgtaatgatgcacctgtttctgttcttcaggaagatattgttggaagtcttaaatctacaccagaaaaccatcctgagacacctaaaaaaaagtctgatcctgagctttcaaagagtgaaatgaaacaaagtgaaagtagattagcagaatctaaaccaaatgaaaaccgattggtggagacaaaatcaagtgaaaataagttagaaactaaagttgagacccaaacagaagaacttaaacagaatgagagcagaacaactgaatgcaaacaaaacgagagcaccatagttgagcctaaacaaaatgaaaatagactgtctgacacaaaaccaaatgacaacaaacaaaataatggcagatcagaaacaacaaaatcaaggcctgaaaccccaaagcaaaagggtgaaagccggcctgagactccaaaacaaaagagtgatgggcatcctgaaaccccaaaacagaagggtgatggaaggcctgaaactccaaagcaaaaaggtgagagccgccctgaaactccaaagcaaaaaaatgaagggcgacctgaaacaccaaaacacaggcatgacaataggagggattctggaaagccatctacagagaaaaaacctgaagtgtctaaacataaacaagatactaaatctgactcacctcggttaaaatcagaacgagctgaagccttaaagcagagacctgatgggcgatctgtttctgagtcactaagacgtgaccatgataataaacaaaaatcagatgacaggggtgaatcagagcgacatcgaggggatcagtctagggttcgaagaccagaaacattgagatcctctagtagaaatgaacatggcattaaatctgatagttcaaaaactgataaactagaacgaaaacacaggcatgaatcaggggactcaagggaaagaccatcttctggggaacaaaaatcaagacctgacagtcctcgtgttaaacaaggagattctaataaatcaagatctgataaacttggttttaaatcaccaactagtaaagatgacaaaaggacagagggtaacaagagtaaagtagacactaataaagcacaccctgacaataaggcagaatttccaagttatttgttggggggcaggtctggtgcgttgaaaaattttgtcattccgaaaatcaagagggataaagatggcaatgttactcaggagacaaagaaaatggaaatgaaaggagagccgaaagacaaagtagaaaaaataggattagttgaagatctaaataaaggagctaagcctgtagttgtgctacaaaaactgtctttggatgatgttcagaaacttattaaagatagagaggacaaatcaagaagttcccttaaacctatcaagaataaaccatcaaagtcaaataaaggtagtatagatcaatcagtgttaaaagaattaccccctgaactcctggcagaaattgagtccaccatgccactttgtgaacgtgtgaaaatgaacaaacgcaagcgtagcacagttaatgaaaagccaaaatatgctgaaatcagttcagatgaagataatgatagtgatgaagcttttgaatcctctaggaaacgacataaaaaagatgatgataaagcttgggaatatgaagagcgtgacagaagaagctctggggatcataggagaagtggccactctcatgaaggaagaaggagttcaggtggtggtcgttatcgaaaccgaagtccgtcagattctgacatggaagattattctcctcctcccagccttagtgaggttgctaggaaaatgaagaaaaaagaaaaacagaagaaaaggaaagcatatgaaccaaaactaacacctgaagaaatgatggactcttcaacttttaagagattcacagcctcaatagagaatattttggataatttggaagatatggattttactgcgtttggtgatgatgatgaaattcctcaggaactgctcttaggaaaacatcagcttaatgaacttggcagtgaatctgctaaaataaaagcaatgggtataatggataagctttcaactgacaaaactgtgaaagtcttaaatatcttggagaagaatattcaggatgggtcaaagctttccactttgttaaatcataataacgatactgaagaagaagaaaggttatggagagaccttattatggagagagttacaaaatcagcggatgcttgtcttacaactatcaacattatgacatcccctaacatgccaaaagctgtgtacattgaggatgtaattgaaagagttatacagtacactaaatttcatttgcagaatacactttatcctcagtatgatcctgtttacagattagatcctcatggaggaggcttattaagttcaaaagcaaaacgggctaaatgttctacccataagcagagagtaatagtaatgctttataacaaagtttgtgacattgttagcagcttatcagaattgctagagatacaacttcttacagacacaacaattcttcaggtttcatctatgggaataacaccattttttgtggaaaatgtcagtgaactacagttgtgtgccattaagttagtcactgcagtattctcaagatatgaaaaacataggcagttaattttggaagaaatttttacttcacttgcaagattaccaaccagcaagaggagtttaaggaacttcaggttaaacagtagtgatatggatggagaacctatgtatattcagatggttacagcactggttttacaacttattcagtgtgtggtacacttaccatcatcagagaaggactctaatgcagaagaagattcaaataaaaaaattgaccaggatgttgtcattactaactcttatgaaacagctatgcgaacagcccaaaacttcctctccatcttccttaaaaaatgtggtagtaagcaaggtgaagaagattacagaccactgtttgaaaattttgttcaagaccttctttcaacagtcaataagcctgaatggccagctgctgaactactccttagtttgttagggagactgttggttcatcagttcagtaacaagtcaacagagatggctttaagagtggcatctcttgattaccttggaactgttgctgcacggctaagaaaagatgctgttacaagcaaaatggatcaaggatctatagaacgcattttaaaacaggtttcaggaggggaagatgaaatccaacaattacaaaaagcattgcttgattacttggatgaaaacactgagactgatccttcactagtgttttctcgtaaattctatatagcccagtggtttcgagacacaactctggaaacagaaaaagcaatgaaatcacaaaaagatgaagaatcatctgaaggaacacatcatgcaaaggaaattgagacaactggccaaattatgcatcgagctgaaaaccgaaaaaagtttcttagaagcattatcaaaaccacaccttctcagtttagcacattaaagatgaactctgatactgtggactatgatgatgcttgcttgattgttcgatacttggcctccatgaggccgtttgcccagagctttgatatttatttgacacagatcctacgagttcttggtgaaaatgcaattgctgttcgaacaaaagccatgaagtgtttgtctgaggttgttgctgtagaccccagtattctagcaaggcttgatatgcaacgaggtgttcatggacgattgatggataattcgactagtgtccgagaagcagcagtagaattactaggtcgatttgtcctttgtcgacctcagcttgctgaacagtattatgatatgctgattgaaagaatattggatactggtatcagtgtcaggaaaagagtaataaagattctcagagacatttgtattgaacaaccaacatttccaaaaatcacagaaatgtgtgtaaaaatgattcgcagagtcaatgatgaagagggcattaagaaattagtaaatgaaacattccagaaactctggtttactccaactccacacaatgacaaagaagcaatgacaaggaaaattttaaacattaccgatgtggttgcagcatgcagagatactggatatgactggtttgagcaactgcttcaaaacttgttgaagtccgaagaggattcctcatataaacctgtgaagaaagcttgtactcaacttgttgataacctagttgagcacattcttaaatatgaggaatctctagctgactctgacaataaaggtgtgaattctggaagattggtagcttgcataaccactttgttcttattcagcaaaataagaccccagctcatggttaaacatgcaatgactatgcaaccataccttaccactaaatgtagtacgcaaaatgatttcatggttatctgcaatgttgcaaaaatcctagagctagttgtaccactgatggagcatccaagtgaaacttttcttgccactattgaggaagatctaatgaagctcatcatcaaatatggcatgactgtagtgcaacattgtgtgagctgtcttggagctgttgtaaataaagtgacacaaaattttaaatttgtgtgggcttgtttcaatagatactatggtgccatttcaaaattaaaaagtcaacaccaagaggacccaaataacacttcacttctaacaaacaaaccagcacttcttagatcccttttcaccgttggagcactatgtcggcattttgattttgatctggaagattttaaaggcaacagcaaggttaacataaaagataaagtacttgaactattgatgtattttacaaaacactcagatgaagaagtacaaacaaaagctatcattggtctaggatttgcctttattcagcatccaagtctaatgttcgagcaagaagtgaagaatctatataataatattttatctgataagaactcctcagtcaatttaaaaatacaagtgttaaaaaacctccagacctacctacaagaagaagatacacgtatgcagcaggcagatagagactggaagaaagttgcaaaacaggaagacttaaaagaaatgggtgatgtttcctcagggatgagtagttccatcatgcagctttatctcaaacaggtgcttgaggcattttttcacacccagtcaagtgtacgccactttgccctaaatgtcattgcattgactctaaatcaaggtcttattcatccagttcagtgtgtgccatatttaattgctatgggcacagacccagaacctgctatgcggaacaaggctgatcagcaacttgtggaaatagacaaaaaatatgctggattcattcatatgaaagcagtggctggtatgaagatgtcttaccaggtacaacaggcaatcaacacatgcctaaaagatcctgtaaggggtttcagacaagacgagtcctctagcgctttgtgttcacacctttactccatgatccgtggaaaccgccaacacagacgagcctttcttatttctttactcaacctctttgatgacacagcaaaaacagacgtgactatgctcttgtatatagcagacaatctagcctgttttccataccagacacaggaagagccgttgtttataatgcatcatatagacattacactctcagtttctggtagtaacctactgcagtcattcaaggagtctatggtaaaggacaaaaggaaagagagaaaatcatcacctagtaaggaaaatgagtcaagcgacagtgaagaagaagtttccaggcctcggaagtcacggaaacgtgtagattcagattcagattcagattcagaagacgatataaattcagtgatgaaatgtttgccagaaaattcagctcctttaatcgaatttgcaaatgtgtcccagggtattttattacttctcatgttaaaacaacatttgaagaatctttgtggattttctgatagtaaaattcagaagtactctccatctgaatctgcaaaagtatatgataaagcgataaaccgaaaaacaggagttcattttcatccaaaacaaacactggacttcctgcggagtgacatggctaattccaaaatcacagaagaggtgaaaaggagtatagtaaaacagtatctagatttcaaacttctcatggaacatctggaccctgatgaagaagaagaagaaggggaggtttcagctagcacaaatgctcggaacaaagcaattacctcactgcttggaggaggcagccctaaaaataatacagcagcagagacagaagatgatgaaagtgatggggaggatagaggaggaggcacttcaggggtgaggcggaggaggagtcaacgtatttcgcagcgtattacgtaaaatgatttttatgtgcttatatatgtcagtctattaaatgtacaccaagtaatgtaatacttaaaagagaaaacattttgtagatagagattctctacttacccgtttatacatccttttgtagaaagtttaacataaaagacaataaaaaaacagaaatgagatttatccagcataaagggttaatttttctttgaattgtattaatgtgtgttatttttattgttgctaagttttatgtagctatatggttcatatgtatatataattttatatatcaataagagtaaagacacgggtacaaattaagagttatatggttttacaagtatatgttaaccccttggcgctggcggtcacggtgcgtctcattgccggcaatggaagtgtgccgggaaatcccaactcccggcgtcaagggattaaaagcaataaaaacaataatttcactaaaattcttttgtgtaacacttggtcttttttcccccctcccaatgttttagtcattgagaaggtcaaaacgaaattcagactctacggagttggcagcacagatgaatgaaagtgttgacgtcatggatgtcatcgctatttgctgtccaaagtacaaagatcgaccacaaattgcaagagtagtgcagaaaaccagcagtggcttcagtgttcagtggatggcaggctcctacagtggctcctggactgaggctaagcgccgtgatggccgcaaactggtgccttgggtagacactattaaagagtcagacattatttacaaaaaaattgctctaacgagtgctaataagctgactaataaagttgttcagactttacgatccctgtatgccgccaaggatgggacttccagctaatgaatttgtacatgcagccaaatttacaggaatttttttaaaaggcagaaaaacttgaaataccaacattctggcaaaaaaaaatcagttttatgaagagtaagtggaacctgggatgcaggaacaaaagaaggaaatgttgggcaaacatttttgtgggagctcccttcgctgttgtgcagcagaaacagattctcagttcatttttactcccactgtattatagtttaacaaaaattgtttatatcttggaaaaaaaactttctgtttaaaaaaaataaacaagtgaatgttggaaattagtctgttaatgttcttaataaagtgttcttggagtttaacctagcagcggatggctttctttagcttagcccagtttccagggaagcattgttttttccaggctgtaaaatggcagaatctcctggatatataatttattctgttgaaaaaaaaaaaagcatgcagtatctatgacctatctgcagaaggagtttttgtaaatgtagattttgatgtattaggtcaccctgaaaacaatacaagaaaagggatccccaggtaatctggtggagcgaatactgcaataaatttttttacttctctttgttacttgtctgtttccatttgaatttcttattgtaaaaatctgtttaaatccatttatattattttacagtcttttatgtaaaatttattatatcactggttttcaaagcaaaacataaaatattgtttatacagtttgtataggctgacttctgaataattggtatctattattttcattcccataagagggtgtaaacaattaactccagggttttattgtatcctgcaatatttagtattaactatatatgatttagcactgtgccaaacacattttcaagagtacattttgatataaaaagaaactatagttta

SEQ ID NO: 27 - DNA, 6732 bp, Homo sapiens
agcattcaaaccttgcagagctttgctctcagagagtttgtaaaaagacacactcctcttacaagagttcatgctaccacatagcaaagaaccttaaatttttggaagaacaatatattcattttggcattgtgcagagcaaagtaaactcggtggcctcttcttctccacccctcaaaatgatagcaatctctgccgtcagcagtgcactcctgttctcccttctctgtgaagcaagtaccgtcgtcctactcaattccactgactcatccccgccaaccaataatttcactgatattgaagcagctctgaaagcacaattagattcagcggatatccccaaagccaggcggaagcgctacatttcgcagaatgacatgatcgccattcttgattatcataatcaagttcggggcaaagtgttcccaccggcagcaaatatggaatatatggtttgggatgaaaatcttgcaaaatcggcagaggcttgggcggctacttgcatttgggaccatggaccttcttacttactgagatttttgggccaaaatctatctgtacgcactggaagatatcgctctattctccagttggtcaagccatggtatgatgaagtgaaagattatgcttttccatatccccaggattgcaaccccagatgtcctatgagatgttttggtcccatgtgcacacattatacgcagatggtttgggccacttccaatcggataggatgcgcaattcatacttgccaaaacatgaatgtttggggatctgtgtggcgacgtgcagtttacttggtatgcaactatgccccaaagggcaattggattggagaagcaccatataaagtaggggtaccatgttcatcttgtcctccaagttatgggggatcttgtactgacaatctgtgttttccaggagttacgtcaaactacctgtactggtttaaataagtttaccttttcctccaggaaatataatgatttctgggaacatgggcatgtatatatatatatggagagagaattttgcacatattatacatattttgtgctaatcttgttttcctcttagtattcctttgtataaattagtgtttgtctagcatgtttgtttaatcctttgaaatatttgaaacatcaatttctattttctgacctctaagcctaaattaagatattgtatatgtaatgatgacatagttgatgcatccaatcctaaaacttacattccaaaggaattatatcattatgttcctaaggagtaaatatatatttgacctgtaagtgtgtgtatgtatacatatacatatgtatgtgtatggatttatatatgcacacaaacatataatatgtgatgtaacatgtagatgataatatgattcagtagtcaacttgagggaaatttttaaaaaactattctcaattatatacgaggtgatgggacttcttaacacacatttctataatacccatgaaatgataatttgtaaaataacacttagtgatatctggaaataataattcaattaagcaaccacgaatttcaccctggagatattttttcttatttgagtccaccaaaggataatgccaacttatataagttctcaaatcatgccttccgcttagtctcattttattcattcagtcgtcatgagttgagtgcttactacatgcaaggcactctgctagttatattctaataatgcagagataattagacatggttcccgccctcaagaagctcacaaaagtattcaggaaataatgcagactagtgattttgctataaaattatttttgaaggaagcagacacagcagtatttacctgtaggtggagcaagtaataagccatgctgtgcaatatatacataaagcttctgcttctcatgggaatttagttacagtgcttggaatgagaaggggaaggaaagaattaacaaatgccaagatttctggagcagattgtacagctgtgactttggaaaacagaaagtaagaccctcagaaaaccaatgaagtctaagagaaataaaatttagtggacaggtatgaaaagtgtaattgcgcctaactaccagatggagagcttcagaatgggctatccttagagtctagtacatcttgaggcctctcagcaggagacaaaggattccaaaaagagatgtggaggtgctgagggcacctctatctctttgttgtttagtctgtcattgaatcaatctacttatcatcttgggtctttgagtattgtatgaaagatccttcgtgcacaccacacacagtcatgattttgttaaagtagccttcttcagatgcttttctaagggctagttaccaactttatttctgtgtttctgtagaagaaacattttcagttcttcattgagtttgattatggaaatccattcaaagtcactatgaaaattttactcatgtagtttggaaatgcaacattttcctatcatgaaatctctttcagagaggagaatacaacatcttagtccagacatttaacatactgcatttcaagtacatgtgtgtgtgttttattcaggttgtgtaatgctcccgtagaattatagaacaattaaatatggttagttccagagtgcaaattacagaaggaagctacttgtttaaaattccatacacgtttgcagtttcttgtacacatttggatactttgaaagatgacagattgttaaatccattcaatggtaaagaaactcaccatctggagattgagtctacttgttaatgaatgactagcccaattatccttataaattgaatatggtgaccaaatgctttgatatcatactactctgcctttgtgggcacatatgtagacactactaaaaataaatatttttggagattaaaatggagaatagaagtaattacattatttaggtcttaatccaacttttttctaatatatctaaacaattgaaagggaagcttattcatggaatattggcttgatttatctagaaagtttttccttcttcaattttactatattcattctacaggaacagcaataagtactattaaacagaagatggctacactaagttccaattttgttgctgaattgcttctgtgagttcacttttcagttctaaggaagaataatatttgctacatatttcacaggggttcttatgaaggtaaatttaccagattaataaaaatttatgaatattaaaattatcattaataatataaaacacttatttgagattaaattaaatttttcatgagcccctctttggcaggaactctgtttaattctttgtatttatcccagcttcttaaatggtggctgtaacataataaatgtttaataaatgcttatatgaatggatttttagaattaactaagaagccaaaaatggcaacaatttacagaaatcccacctttccatgcttaagacaaaaatgtcttaaatataaagctgtgattatatcaaaaatccagataaatcatcaaatatatcagattaagaccagggtttacacacttaggcaatagtcctttccaaaccatgacaaaaactacaagtttatttataatttaacaactcagctgaaaatataacgggtatatttgttattctaactctattttttaaagttaataatataaagtggccatgtaaaatattttattttccaggctaaagcaaatgaaagtttgctggtatcaacacagcctgccatatttttcacagcatgcaacaatggtgctaggatagctatttcttactgtaattgccagaggcagaaatggtctgggtataagctatttcataaaagcagctttaaattgtcagtattaaggttttcatgtggaaaggtgtcattcaaaaaaaaagtaattggcatacatattccacatcatcgatcctctctgtggtgttaatttttttatatgaccagtagaaaaattttaatattctcacaatataggttttggggcttccatatcatcaaaagactgaaaaattataattttagaattaaactgatggatttcattatagaattatctgtgagttgtgtagacacagtcttaatgtttctggttatgacagataagtttgctcaaaaaatgtggatgaagccattattgttattattgttattgcttctgttcagttgtctaagtatcatcccttctgtggcccatcacgcagcagagttgccctacaaatttcatttggcagcgccataacattcatttaaaaagtttatgaaaacattcatttgaaagttccatgcagctttagcacagagttgaccaaacactggcgtaagttcaatttacacagaatatttgaattgaaacaatagaaatttttctcataatatatacctatgtgaaaccaacttatctgcataattaaatctaatacatatttaagccagtttaagtgctttgtgttgatgccatgcttatcaaatacatgcacaagctaaacataatttgaatgggtctatgaaggaaaaataatgcttagactttggtgtaggttcttcctgtgtagccatatacccaggctctgcagtatcgaaggatgcaaatgttgacatagatggaagctcttacctaccaaagtgtttaggaaggataaagttacatttgtcttaatttctaacattatctttgcttttatgtttcataaaaatttgtcattatttatgctggtgaaacgtataatcacatccaattatttgaacacatgcaaaataattttttaaattatgttattgtttaaatttgacttatgggagatcagtcaaaaacttagaaggtttaacacttcactgattaatggtgctgaaaacacgttacaattaccacatatccttgctataagttttgaagtttcttagcaattaaagtttttttattcagtgtgaactgtcagtatctattctggtgctaaatgtatggtgctaaatgaattgttagtgttgatggctttagtaatgctccttttattcattgctaaatttagtgttatccatttgattcctgattcagaaatatcaataaaatcctatgttaaattaatctttaccaaaaacaggcaagttaactctgttgttttaattcaacagtccaacattatttaggtgttacagagtgtaaatatatttctttgggagttattttctttttaaaatctttttatagcttggcaatgtccaaagtcaaatatcacctaaactggttagattacttctacagctaataatattgcaggcactggcgccctctggtggttatgaagacaaattcttaatggctacttgacctacagcaaaagccatttctgtaccataaaaatttgttgtgcaatattagaattatcatatgtttcctacatctgacagcacctaaaatgtttgataatattaacatgtatctaagaggaaaaaagagttaatatattctggcacccactttcctagtaatgttttccatgattttccagttctgaggcacttattaaagtgcttttttttttctgaattaattaggtattggtaaaatatatttttaaatttagttagctttataaacacaattagaattacaattaattaacagaggtataattgtctcactttcagaagtgatcatttatttttatttagcacaggtcataagaaaaatatatagaaaaataatcaatttcatatataaaaggattatttctccacctttaattattggcctatcatttgttagtgttatttggtcatattattgaactaatgtattattccattcaaagtctttctagatttaaaaatgtatgcaaaagcttaggattatatcatgtgtaactattatagataacatcctaaaccttcagtttagatatataattgactgggtgtaatctcttttgtaatctgttttgacagatttcttaaattatgttagcataatcaaggaagatttaccttgaagcactttccaaattgatactttcaaacttattttaaagcagtagaaccttttctatgaactaaatcacatgcaaaactccaacctgtagtatacataaaatggacttacttattcctctcaccttctccagtgcctaggaatattcttctctgagccctaggattgattctatcacacagagcaacattaatctaaatggtttagctccctcttttttctctaaaaacaatcagctaataaaaaaaaaatttgagggcctaaattatttcaatggttgtttgaaatattcagttcagtttgtacctgttagcagtctttcagtttgggggagaattaaatactgtgctaagctggtgcttggatacatattacagcatcttgtgttttatttgacaaacagaattttggtgccataatattttgagaattagagaagattgtgatgcatatatataaacactatttttaaaaaatatctaaatatgtctcacatatttatataatcctcaaatatactgtaccattttagatattttttaaacagattaatttggagaagttttattcattacctaattctgtggcaaaaatggtgcctctgatgttgtgatatagtattgtcagtgtgtacatatataaaacctgtgtaaacctctgtccttatgaaccataacaaatgtagctttttaaagtccattgtattgttttttctttcaataaaagagtataattaa

SEQ ID NO: 28 - DNA, 4456 bp, Homo sapiens
cgccgccgcgcgagggagcgaccagggcagcgcgacgcgggcagagcgagcgccgcggaccccggaggcgagcggccgagggagcccagtcccaacttcgggccccggccccgcgcgccccggcccggccccgcgaggtctcggcgcggaagatggccggcggcgtggacggccccatcgggatcccgttccccgaccacagcagcgacatcctgagtgggctgaacgagcagcggacgcagggcctgctgtgcgacgtggtgatcctggtggagggccgcgagttccccacgcaccgctcggtgctggccgcctgcagccagtacttcaagaagctgttcacgtcgggcgccgtggtggaccagcagaacgtgtacgagatcgacttcgtcagcgccgaggcgctcaccgcgctcatggacttcgcctacacggccacgctcaccgtcagcacagccaacgtgggtgacatcctcagcgccgcccgcctgctggagatccccgccgtgagccacgtgtgcgccgacctcctggaccggcagatcctggcggccgacgcgggcgccgacgccgggcagctggaccttgtagatcaaattgatcagcgcaacctcctccgcgccaaggagtacctcgagttcttccagagcaaccccatgaacagcctgccccccgcggccgccgccgccgctgccagcttcccgtggtccgcctttggggcgtccgatgatgacctggatgccaccaaggaggccgtggccgccgctgtggccgccgtggccgcgggcgactgcaacggcttagacttctatgggccgggccccccggccgagcggcccccgacgggggacggggacgagggcgacagcaacccgggtctgtggccagagcgggatgaggacgcccccaccgggggtctctttccgccgccggtggccccgccggccgccacgcagaacggccactacggccgcggcggagaggaggaggccgcctcgctgtcggaggcggcccccgagccgggcgactctccgggcttcctgtcgggagcggccgagggcgaggacggggacgggcccgacgtggacgggctggcggccagcacgctgctgcagcagatgatgtcatcggtgggccgggcgggggccgcggcgggggacagcgacgaggagtcgcgggccgacgacaagggcgtcatggactactacctgaagtacttcagcggcgcccacgacggcgacgtctacccggcctggtcgcagaaggtggagaagaagatccgagccaaggccttccagaagtgccccatctgcgagaaggtcatccagggcgccggcaagctgccgcgacacatccgcacccacacgggcgagaagccctacgagtgcaacatctgcaaggtccgcttcaccaggcaggacaagctgaaggtgcacatgcggaagcacacgggcgagaagccgtacctgtgccagcagtgcggcgccgcctttgcccacaactacgacctgaagaaccacatgcgcgtgcacacgggcctgcgcccctaccagtgcgacagctgctgcaagaccttcgtccgctccgaccacctgcacagacacctcaagaaagacggctgcaacggcgtcccctcgcgccgcggccgcaagccccgcgtccggggcggggcgcccgaccccagcccgggggccaccgcgacccccggcgcccccgcccagcccagctcccccgacgcccggcgcaacggccaggagaagcactttaaggacgaggacgaggacgaggacgtggccagccccgacggcttgggccggttgaatgtagcgggcgccggtggaggaggtgacagcggaggtggccccggggccgccaccgacggtaacttcacagccggactcgcctaaaaaccaaaaagagaaaacagaaacccgagaaagagagagacagagagagagaaaaaaaatcacccaccacccccccaaaaacacaaaaaaagaaaatctatctatatacagatatctatatctatatatatatatacagatatatatatatgacgcgtcacagaatctagggtagcgctttctcagatttccctcctttctgacgtttttctccctccgcaggggccccggccctccctggctccccttccccccaccaccccatcgctgggtttcggggcttggtttggggttttttgtaggacacaaggaatccgagaccccgcacagccccctgggcacccggcatggggcctggggcccgatccgaggccctgggctggggggagggtagacgtgggggcgctggggggggactggggtgggcttttaatttcctcccctcgctggtttctatgagtctttcagacaagaccttaaatgatttctgtctgctctgagcggacgttaaaatgggcccccgtcccccgacccgcaccctccttcctcagggcacttactaagggaggggtctccctctccatctccccagtggcctccccgcctccaaccctgcctgcggcctccccccgtcgcccaccccacgtctcctggccactgagacacaaacctatttatttctaggcctggagaaaggagatcggactggggttcccggtggggcgccaggatggctcctgggggtgctcctgccgccttccttcacggcacttacaaccggcgggacccccagggaccacccctcagggcgcccccccacccccgcccggtccacctagacccccacgtttggagattcaaaacttctgtcttcgtcctctcccccgagccccctctcccaaatttttaaagcactttttagatttttttttctctttcctccttaaaaacaaaatttatatatagatatatatatatatataaataatatacttttcctcagaggagcaggcaacagtgtgggataaacagagtcacgatcagaggaaccccagggtctggtgatggcagggatggggggagagagagaaaatccacaaattccaatgtcacaaaagcaataaaacaaactagaaaaaaaaaaggttttacaaaatgaaaggaaggaaaaaaaaaaaggcaaccaaccacattagaagtcttggcactttgtaacggaacgggtactacactttatcttaattcttaatttaaaaacatgtttacaagttacaaccaacttctatgaaaagttgaaaagacaaaaaaaaaaaaaaaaagcgagcgagagagagagcgagagagagagcgagagcagaagaaattcctaaaagtcgatttatttttgtacaaaataataaaaaaaaaaacccaccacaaacgtagaatccacttctgttccccaaaaagcgagaaggggggttcaggaggaagccatcgcaggggacctgggagacgccccgaggtgtttgtgcttcacccccagacgtcagcctcgaaggcaggactgtggggtgttcgtgctgtgttccccccgctccccctttctgtccccttttttggttctgacgtgaagaggtcttagcgcccgcttctgtccacggggtctctccttcctcctccctagctcagggatgggccttccagccggagcaccccgatccccatccggcaccccccaatcccccaacacgcctgtccctcccgcatggccaccaaggagctggaccttggatgcgcctaccctgctgaggtgggtgacaggggccccccacctccagggccttagaaccaccgcccctctccccaccccaggcacccctctttttactcaaaggcactgactgtaatccagggggactgggacctgcctccccccaacctctggctcccacaaggcccggtgttgaccgagccacaggccacggacaggggccggggttggggagactatgtcgccagatgccaggacgccctcaccccgtttgcatatgcaatgctagcatgggaccccgaaaatagacgctctgctgcactgagacttcttgtcaatgcccaaccggcgggggggtgtctccctgcccccgacccccccatacccccttctctgtgacacacacatcttctcgtctctttttctttcattgttaaagggaagctttttaagaaggcaattttcatattgtttctacgggatggttttggttcccttcccttcccacccccccttaagcctgtcagccccctccaaatgtctcaggatcccccctctcccctggggctgggtgacagcaccccggctgcgttcacaccccagtgtcacagggcgagctgttctggagagaaaaccatctgtcgtggctgagcggggagcttgaacacccaggccagggacacccctccccagctcccagagaggccccctgaggggtgagccctctttccaccttcccctatccatgcaccccctcgcaataaaaccaactctaaaatcaaaaaaaaaaaaaaaa

SEQ ID NO: 29 - DNA, 4093 bp, Homo sapiens
ctttccccacgtgtctgccgcctaggggaggtgcctcatccggagcgggccgccaacggtccggccccgtccgcacagacgctcctgtcggcggcgcccgggagcggctcggctgcccgatgcttccgccccggctgccgcgggccgggctgtacgcttagtgcccggctcaggccccctgaagcgcccgcgggggtgagagcggcctccggccccgcggagacggagcggcttgaggacgaggcggcggccgcggggaggaggatgggggctaaccagttagtggtgctcaacgtgtacgacatgtattggatgaacgaatatacctcatccattggaattggagtttttcattcaggaattgaagtctatggcagagaatttgcttatggtggccatccttaccccttttctggaatatttgaaatttccccaggaaatgcttctgaactaggagaaacatttaaatttaaagaagctgttgttttagggagcacggacttcctagaagatgatatagaaaaaattgtagaagaactgggaaaagaatacaaaggcaatgcttatcatttaatgcataaaaactgcaatcatttttcttcagctttatcagagattctttgtgggaaagagattcctcgctggatcaatcgacttgcctacttcagctcctgtataccctttctacagagttgcctcccgaaggagtggctcacgcccgcagccctgcagtctagtgtcagccaagaactccaggatgaactggaggaagcagaggatgctgccgcatccgcttccgtggcaagcactgcagcaggctccagacccgggcgccacactaaactataaatgtctccaaagtcacacattcagaactgtctctggcagtcgaatatcactagagaaaagtaaacagagaagcatcctttagatattttgtatgcaaagatggctctcccccaaatcccagtttttcagctcaggattatatttgtaatcaaaaaaaaaaaatcacttggcgcaggagggagaactttgtaagaagctgccctctgttttttttatccactcgtaaatctggatttatttcttctgttttatacaagctctgttaagttatgtttacagtatcttgtatcgctgtttacaaatcttgcatggactcctgccacagtgaaagaagaaaatcttcatgtcttcaaaaattaggcaggtaatctttgtatacttctgacaattgccagatctatggcataaataggcacacaaaaaggtacttaaacagttatagtcaccatcacctgcttcagaatggtcttttagatttgtgtttgttttgttaaagttgttggcaccaggatgcagagaatcagactggcctgaggtgaaggagcacacagccctgagggcttggaaccctgggtccagttcctcttcacacccccttccactctgagtagcacatctccccaggtgcccatggaacacctgctttcatcccaaatatccgtccacctaggcggggtggtatgttcttacgtctctctgactttgatgccactcattctatagtttagctggttttcgttcaagatattcttggtagtaactgacaagtatgttgcacatgtattgggggaggcgcttcatttttattttaatacacatgtatttcctccttgcacaggattttgatggtgtgggaatatcctaagtggtagccttccaagtagcagtgagttgacattcagctgcttttaactattcaggctaccttttatactaaaccttgaaaactagaatctaatgtctaccccaaaaaagtagttctttgatattttatactttttatgtaccatgtcagaaagagtatgttggcgtttgtcatgggactcatttcacataatagaatgcctagtctcattgaccaatcgttaaaaaatcatatttgtgtgtcttaagattcatatttatatgttctctcaaatgtatgtctcttacgtaacatactctaagaatgaaactgtcaccacaggtaaatccttgttagcaaggaatctgtctgctccagtctactcctagtttgatccttggatgtaagaaccaagtcattacatgtcaaattcaatttttctgccttaagaatgaatgtccttcataaaatattggatgcagtgtaacactatccaaggcagtgacttcagctttatatacatataaaatatagttagttttaaaattattgacatttatttaaacttttagattggattgtttgctattgctctgtgtgaggatacataatctttcagtaaactgtatttttaacttttccataagctgattttggttcattttatcaacgtaagcacaccctgttcatagggaaaataaaccttgggttataagcattagcctgaggacaatgaagccacttaacctaatttatgctttcgactgttctgtttccagagaggaaagcctttacaaattactctcagttctttaggggcagaaggcttgtttcaagaggtttgacagaagaaaggaatatatgaacttaatgagatgtcgacttggttcaggtctaaaaatgagggcaaaacactaaggctctagcagtgacttgttcactaaaaagagagagtcctgtccccagacggttagtacaaagccttggatacagtttgcttgtaatatttttaataatgtgaggagtacagtgttttctaattcattcaagtatatatgatttaaacctgggctactgacacacacacagtagccattagttagactcttcttagtgaatatcaggaacatcccatctgtgcttaaccagaatccagcaagtcagcacacaagtgattttattgttattttgttgtatttacttgcatttgttgtatttactttcatctgcagcatttggagtttaaaaataatgtaaagggttctagtagaaatagtgtcctaaggccaattacctaccatactaacaatcagcagataaaattctggacgtgagattccttataatctaattatacctgaggttgagcaagaaatgtcttcctttagaaaatctcattcaagtcaggttcttctctacagttcaaaattgagaatggatttaattaactagcatttagccagctttttcttgcccttggagaaaaagaatcattctcaacctgataatctgttaagaaaaatcccatatgaacaatctggtcattaacatacatatgatacggagtctctttgttgtcaccaagtgaacatacttctcatggtgggttggacagtaatacatgttagagggtcagaagcttctggtttctgctgtttgctttaaatacccttggggtttttttttaaacccttacaaggggagcatcagctttggaaagtgtgactctgtaggagtgtagaaggcagtggtgtatgatcttagcctcgtcctgatgcctgaatccagccagctgttgctctgacccacagcaatagagcaagttacccatcaccagcatttgtacagagcagggaattctggttttagtccattggtagcattgtgtgtatgaggagattcaacaccacagacagctgcaggactcgatatccatggcttctttccatcacaaaacgggtagaaacacattcactgcttcagggttctaatctgtgtgtctccttatgactccatttctgtaagctactctgtaactttgatatatgctgtattttctttctttaaaagatttagatgttttttcagcaagctagccatacaaccattgtatctctttctcttcagtatggtttagagcccagatcagttagtaggctttcgttgtcttctctttcaatacatgtacatctttactgtttgaaaagtgttacagctgtcaaagaatcttcatggacctgaagataatttcttgtgaagttgaatgcaagtgtactgtcattcatagtgtttatatcaaaataccaggaatcttcacttttgctaccttgatatagcattgggctatcatgttacaacattgaaatacattgatttattaaaaaatacttttataagaaa

SEQ ID NO: 30 - DNA, 2614 bp, Homo sapiens
tcccccctcttaaaacacgatgcctcccaggatgctagtggcaccactgccactgcatttcctgttggcagcagtgagcagtgaaaaccgaagcggcagaaggcagtggcagcaggcagtggcagcaggcagtggcccaggcagaaatagctcccgcgcgattcactggagccttccccgggccctggtcccggctaccgggactcgcgcgtccggatctcaaaagcggcagaggccaccgaagggacaggaagcactttggtccagaccacactcccggcacagtgcggaaagagccggcgggagccactctgatcccggacgcctcagcgcccccttgggcttgggcttgccctcgggccggggaaggctgaccgcgatgccaggacgcgctcccctccgcaccgtcccgggcgccctgggtgcctggctgctgggcggcctctgggcctggaccctgtgcggcctgtgcagcctgggggcggtgggagccccgcgcccgtgccaggcgccgcagcagtgggaggggcgccaggttatgtaccagcaaagtagcgggcgcaacagccgcgccctgctctcctacgacgggctcaaccagcgcgtgcgggtgctggacgagaggaaggcgctgatcccctgcaagagattatttgaatatattttgctgtataaggatggagtgatgtttcagattgaccaagccaccaagcagtgctcaaagatgaccctgacacagccctgggatcctcttgacattcctcaaaactccacctttgaagaccagtactccatcggggggcctcaggagcagatcaccgtccaggagtggtcggacagaaagtcagctagatcctatgaaacctggattggcatctatacagtcaaggattgctatcctgtccaggaaacctttaccataaactacagtgtgatattgtctacgcggttttttgacatccagctgggtattaaagacccctcggtgtttacccctccaagcacgtgccagatggcccaactggagaagatgagcgaagactgctcctggtgagcctgtgcatagggaagcggcagcatcggatgtcagccccctgcggccccagctggagatggatatgagactagtcaagatgtgaatgctaattggagagaaatataattttaggaagatgcacattgatgtggggttttgatgtgtctgattttgactactcaagctctgtttacagaagaaaattgaatggcgagggtgtggccatatgaactgactagatggctaatatggacactttgggtatttctaatgcctgttcagggctggttttctgcatgcacgggtatacacataatgcagtgccatgcacatagggaagggtcagtaagagaagtttgccttggcagcaagtatttattgttgacattattcagaattagtgataataaaaagcagagtgattttggtcaattttattattaattcttaaattccctgcagagaatgccccctttattgctgcaccagggttggcattgctcccactgagccctactccaccctgtccctgcactcccttggttgccaaaaaaatgataacttaaatcccttccagacttaagaattttatggcatggcccaattgatataaacatttagaaggaaatgaaaagctaaaataggaagtaattattcctctaaagaaacattttgagcaaggcagtttagagaatcctaatgtctacactggcatagcacgagccatgtaagcttcttttttttctatgcaagagtattgatgtatgtgctgaatcttcacagacttgtcaatacacaggcagtattctaaaatagcactgaacagggagtcaggagactattgtctcctaaacccaggactagagttccctcgtactgtcactcctttggtcattaaatgcactgggcttgcccgcactttggccttcctagaacactgcttcataacctctctgtctgacttctgcatctccttccaggtcagctcattcacaagagttgctcccaagcctggatgagttgcaccttgcatcttgagcatgcatttctcacaataattattaagctgtgtgataatttctgctttcaggacactcatccattatcttggctgtgagctccttgggtacgggtaccttgtatgtttacttttatatccctagcacaaagcaagtgcctggcacatagtcagtgccctaagtattcgtagagtgaagaatgccagcctctcttgtccctggtttccttatgtgttgaatgtggttgagtttgtccattgctagggagagacttccagtaataaaatttactattctagatgcttctactgttatgttttatctgcccatttatctttcttagttaccaggagaaatgtgtgacacctatattataatgaaaacaatctcattacttatagtttatctatattaaacaaatttaattgcattttaaagcattctttgatactgttgcttttgcaataaatatggataatcttggttataagggagttaaaacaatgctgtaataaataaagtgcttcatgtgatcaaaatcaaaaaaaaaaaaaaaaaa

SEQ ID NO: 31 - DNA, 4376 bp, Homo sapiens
cccgggcctcctcccgctttctctctccgcttcccctggagcctccgaggagtccgcagccgctgggcgcccgggaagatggcggcggcggcgggagacggcggcggcgaggggggcgcgggcctgggcagcgcggcggggctggggccggggccggggctgcgcgggcagggcccctcagccgaagcgcacgagggcgccccggacccgatgcccgccgcgctgcaccctgaggaggtcgccgcgcgactgcagcggatgcagcgggagctgagcaaccgcaggaaaatcctggtgaaaaacctgccccaggacagcaactgccaggaagttcatgatttgttaaaagactatgacttaaaatattgttatgtggacagaaataaacgaacagcttttgttaccttattgaatggggaacaagcccagaacgcaattcagatgtttcatcaatattcttttagaggaaaagacttaatagtccagcttcagccaacagatgctttgttgtgtattaccaacgtgcccatttcttttacatcagaagagtttgaagaacttgttcgtgcttatggaaatattgagagatgttttctggtctatagtgaagttactggccattccaaaggctatggatttgtggaatacatgaaaaaggactttgctgcaaaggctagactggagctattgggtagacagttgggagcatcagcactctttgcacaatggatggatgttaatctattggcttcagagctcattcattctaagtgcctttgtattgataaactccccagtgactacagggattcagaagagctgttgcaaattttttccagtgtccataaacctgtgttttgccagcttgcacaggatgaaggtagttacgttggtggctttgcagtggttgaatatagcactgcggagcaggctgaagaggtccagcaggcagcagacggtatgaccatcaagggcagcaaagtccaggtttccttctgtgctcctggagcgccagggcgaagtacattagcagcattgatagcggctcaacgtgtgatgcacagtaatcaaaagggcttacttccagagccaaatccagtacaaattatgaaaagtttaaacaaccctgccatgttgcaagttcttctacagccccagttatgtggacgagctgttaaaccagccgttcttggaacacctcacagcttgccacatctgatgaatccatccatctctcctgcatttttacatttgaataaagcacatcagaatctttctcatataccactggcacaacaacaattaatgaagtttgagaatattcatactaataataaacccggcttacttggagagcccccagctgtggtacttcagactgcactagggatagggtcagtgcttccattgaaaaaggagttgggacatcatcatggagaagcacataaaacatctagcctgattccaactcaaacaacgataacagctggaatgggcatgttaccattctttccaaatcagcacattgctggacaggctgggccagggcacagtaatactcaggagaaacagccagccacggtgggaatggcagaaggaaatttctcagggtcgcagccttatcttcagagctttccaaaccttgctgctggaagcttgctggtgggacaccataagcagcagcaaagccagccaaaaggcacagagataagttcaggggctgcctctaagaatcaaacttcactcttgggagaaccaccaaaagaaattcggctcagtaaaaatccatacttgaatttggcaagtgtgttgcccagtgtgtgcttatcatcccctgcaagtaaaaccactcttcataagactggaattgcaagcagcattctggatgcaatctctcagggaagtgaatcacaacacgcattggaaaagtgcattgcttattctccaccttttggtgattatgcacaggtgtcatctttaagaaatgaaaagcgaggctcatcatatctcatctctgccccagaaggtggttcagtggaatgtgttgaccagcattctcagggcacaggagcatattacatggaaacttacttaaaaaagaagcgagtatactgagttaagctctctcctaataaccccctaaggttctctgcagtatctctgctgttcatcgctgccttaacttcattcaaactagccatatcctttaaatacgggtttatagtttcccagaaggaactgtgttgtgcagcaggcagaaatgccaaataaaaaatagcaataagaagagacatcaattgaggacattttccactagagtcagatgcatcttaatcagtgtgctaacttacaatccattggagaaactaacaatgttccaatattccttgatttaggactgggaataattctgacaccatatataaaagaagtttgaagcaataaatgggaaacagtgttgtttcctgagccttagaagaatgagtttcttataagccaatgtgcatttcaatttactttccctagaagtaattgcatttatagatttttaggacttttcctagaactacaagggtgcaagtaccaaatgtgctgatggtaatattataaagatgctctacatgcacactcaattacgcccacaccagccatgcaaaattaaacccggtaagagagtgacagtgatatccaaggtatccactactaccgatgctttaagatgttgtttaccatttataccttctgtgaaaaatagaaggtattttaagaaaagtaactttggtgatctaataaaagggtttggcaaactacaccctgggtccacatttggtctaccacccgcttttgtgctgcctgcaagctaagactaatgtttacatttttaaatggttggaggaaaaaagaaaacttatgacatgaaatttatatgaaattcagatttcagtgtccataaataaacttttattgggacgttgccatgctcattcatttacgtgttgtctgtggcactcttacgctacaagggcagaactgattagcttcaacagagactgtatggcctacaaagaccatatggcctaaaatttcaagtatctggccatttatatatagtttgctgatccctgatctaatagcactaattctaatagcaactattcctttcaattcacctaaagacagacctttagcctttagacagacttgtaagtggaaaggaacatgggtttctgtgctcatttcatagcgtagactagtaatgatctaatgactagaatggggcctattttgatcactaaatgccctattatttccacaatatagtatagtaaagcagtcaatactgcactttctgatggagtcttaaggagtcacagtatttataaccattttgagctaataagctatacctcactctctgctttctctctcactctttttgatagtgtgttagggtgaaaaatcagttatttaacccaatttacttgtgaaagaagttttatctttatggactatgatgacttttgacatcaccatttcttgaagaccttggtattaaatgcatgagaaaccttttgccatctagaaatttctaagtttgtttatgttataagactgtaattaattgatagggaatttgggatctcaatccggggctttttgaaatcagatcattaaatatctcgtcactttggggacttgttatttttaactatgatgtggatatcctgttttaattatgaagtctagaattggtacatatgttgtatgctttgtaaagaatttcacttggtctaatttattgcatatactagcttctgttggaaaatgactgacagctagaaagtttaaggtaatttctaagtatactacctataagtaactgataagaattaggcatcattcagtgatatagcagatgactaatgggtttttcaggccctgcacttctctttcccattttcctgttgcattcagcctcttcaatgcttagtcacacctccactatagtacaaacaaacaaacaaacagaagaaaggaaagatggtgaattttgcaacagagctgcaaaaagtcagtcagtcaaagcaggaagaggttgaaggaactaaaacaaacaaacaaaggtgtctggactacagcacagtggacatgccatccatactggcctgtgccccgttatcaatcactgggcacaacagtgaagaagtgcaaatcaagtggtgtttgtttgtttgttagtagtaaggaccgtaacccaccccttcctccccccaaaactatactgttatttttctatgtaagcaaattgtttgaaatgctttgaaaatgaaatcttaatattaaaaggcatatgcatgtaaaaaaaaaaaaaaaaa

SEQ ID NO: 32 - DNA, 4567 bp, Homo sapiens
acagccaatcccccgagcggccgccaacatgctctttgagggcttggatctggtgtcggcgctggccaccctcgccgcgtgcctggtgtccgtgacgctgctgctggccgtgtcgcagcagctgtggcagctgcgctgggccgccactcgcgacaagagctgcaagctgcccatccccaagggatccatgggcttcccgctcatcggagagaccggccactggctgctgcagggttctggcttccagtcgtcgcggagggagaagtatggcaacgtgttcaagacgcatttgttggggcggccgctgatacgcgtgaccggcgcggagaacgtgcgcaagatcctcatgggcgagcaccacctcgtgagcaccgagtggcctcgcagcacccgcatgttgctgggccccaacacggtgtccaattccattggcgacatccaccgcaacaagcgcaaggtcttctccaagatcttcagccacgaggccctggagagttacctgcccaagatccagctggtgatccaggacacactgcgcgcctggagcagccaccccgaggccatcaacgtgtaccaggaggcgcagaagctgaccttccgcatggccatccgggtgctgctgggcttcagcatccctgaggaggaccttgggcacctctttgaggtctaccagcagtttgtggacaatgtcttctccctgcctgtcgacctgcccttcagtggctaccggcggggcattcaggctcggcagatcctgcagaaggggctggagaaggccatccgggagaagctgcagtgcacacagggcaaggactacttggacgccctggacctcctcattgagagcagcaaggagcacgggaaggagatgaccatgcaggagctgaaggacgggaccctggagctgatctttgcggcctatgccaccacggccagcgccagcacctcactcatcatgcagctgctgaagcaccccactgtgctggagaagctgcgggatgagctgcgggctcatggcatcctgcacagtggcggctgcccctgcgagggcacactgcgcctggacacgctcagtgggctgcgctacctggactgcgtcatcaaggaggtcatgcgcctgttcacgcccatttccggcggctaccgcactgtgctgcagaccttcgagcttgatggtttccagatccccaaaggctggagtgtcatgtatagcatccgggacacccatgacacagcgcccgtgttcaaagacgtgaacgtgttcgaccccgatcgcttcagccaggcgcggagcgaggacaaggatggccgcttccattacctcccgttcggtggcggtgtccggacctgcctgggcaagcacctggccaagctgttcctgaaggtgctggcggtggagctggctagcaccagccgctttgagctggccacacggaccttcccccgcatcaccttggtccccgtcctgcaccccgtggatggcctcagcgtcaagttctttggcctggactccaaccagaacgagatcctgccggagacggaggccatgctgagcgccacagtctaacccaagacccacccgcctcagcccagcccaggcagcggggtggtggttgtgggaggtagaaacctgtgtgtgggagggggccggaacggggagggcgagtggcccccatacttgccctcccttgctccccctccctggcaaaccctacccaaagccagtgggccccattcctagggctgggctccccttctggctccagcttccctccagccactccccatttaccatcagctcagcccctgggaagggcgtggcaggggctctgcatgcccgtgacagtgttaggtgtcagcgcgtgctacagtgtttttgtgatgttctgaactgctcccttccctccgttcctttcggacccttttagctggggttgggggacgggaagagccgtgcccccttgggcgcactcttcagcgtctcctcctcctgcgcccccactgcgtctgcccaggaacagcatcctgggtagcagaacaggagtcaaccttggcggggcgggggctgcgtccaacctggagattgcccttccctatgccacggttcccaccctccctcaccagtttggacaatttgaaattacctattgctgctacttgttctgtcctctgaccttggggcaaaggagccccaggccctgtctccccagcatcctccctggtggccctgggcaggtgcactgacacccccaccttcccatcccctgctgaaccaggccctgttacacacagccgcctaaggcccgcggctcatgtgctgcccgcccccatatttattcactgatagagaatcttggggatgctggggtctggagtgaacatctcctccccttcatgccctagcctgtgttctagctgtcctggcgagacttctgtgagtgaagaggaaggggtctctggtcaaacccagcccccagggcctagggttgaaagccttccccggctccgggcattatttgggtttaatctcggagcctcactcctggactgaagtccggtgcctctgccttatccctggtggagatggaatgtggcccattgcctcctccctctcctgtcaaaaaccctgatcaggtagatttggaggcggccacgatttcctgtttggcccctgttcaccccagtgcactggccctgactccaggcgtgagtatggggaaggatacgggttcttctgacggggagcaagggcctccgtcttcccttccttaactctccccctttgccctccgccctgaaaaaggtgtccttgaagtcccttccacctctatgccactgtctgcttagcccagctcaggggtggggaagaggcgaaagcgtgggggaggtgagcgcagcggcagttctgcctcggagctgattgcagggccctgtgtggtctccggacagctgcgggaaggctgccgcagctgaagctgaagaggcggctacgtgcggtttgtcagggggattgggttgaaaactggccagtcgggatgactgggtgaaagaggagtagctcctgccactggcgttttgagtgttggcaatttgggatgcctcctggggaaggtttccgggcgtttggtgagtctctagatttttccttgctttctgtgtttattggtttttgatgttgtaaaagcaatgaatcccctttacaagaaaatcgaaaacacagaagaatgaaggacatgccagtccccgatcgctgctgtgagcacctcagtggctccctcagaccagatcccgtaggcagccccacagaccgaccctgaccccactcacagccaccctgaagatagactataggaacgggcccataccacacagactgctctccaatccctgagtctcagatgtttcatttatttcctacttttccactactaaaaaacagtgtggaatagacattattggcaaaattgctcatccctaatcctgaaaaacaggccagaatgggtaaagacttgtcaaagcttgcaacatagctacatggtgcacccggacctgtaccccctccccccaacacaaaaccagtgtctgggaggttcattttcctttaaactgatccagctggccctgaaccaattgtttttgactgagtatctaggagagcagtaagtggaacttcagacaagcccactgggtctggtccaggtgaggggcagggggcatggggctgggaggtctcaggggccttccctgggggtggccagcctggtagggggcagagaaggaaaagctgaggggggtccctgtgagggaggaaagaaggatcatttgccccgctgggtctcaaaggcagtgagaagagagctgaagaaagctctggctggctgacaggatccctgtgttgtaattggtccctcctttcagctctctagtgagatgcccgtgtctgtgcgtgtgcgtgtgtgtttcatacagctagcattagatgggtgatgtttcttacttatcatccctaactattgcaacttgaccttaaaaagacaaaaccccacaaaactcttcctgccacgggcttgcagattgaagcactttcgatgttgggcgctggcgtttgtgttctgggcaccaccgtgaccctgcccagatggctataatattattttatacacaaaccttttttttcataaatgttataattttgtgtctgtctttataaactattataagtactatttttgttataattcaaaatagatatttagtataaagtttttgctgttaaatatttgttatttagtaaaatatgaattttgctctattgtaaacatggttcaaaatattaatatgtttttatcacagtcgttttaatattgaaaaagcacttgtgtgttttgttttgatatgaaactggtaccgtgtgagtgtttttgctgtcgtggttttaatctgtatataatattccatgttgcatattaaaaacatgaatgttgtgcattttgtgattttggaaatactcaatgtggctcttctataggcttctagaataaaccgtggggacccgcaaaaaaaaaaa

SEQ ID NO: 33 - DNA, 12096 bp, Homo sapiens
cccctcctcctcctcactcctcaccctccagggtagcggctaccggagcgctgcagggggctgcgcctgcctgctccgccccagacctgtcggcgaaaggtagtttatgccaacgtgacttcattcatacagatgaaccaaggatcgggatagcagtataaaattagaatcaagacagctgactgctcagcaggatgccatcaactaacagagcaggcagcctgaaggaccctgaaattgcagagctcttcttcaaagaagatccagagaagctcttcacagatctcagagaaattggccatggaagctttggagcagtgtattttgcacgagatgtgcgtaccaatgaagtggtggccatcaagaaaatgtcttatagtggaaagcagtctactgagaaatggcaggatattattaaggaagtcaagtttctacaaagaataaaacatcccaacagtatagaatacaaaggctgttatttacgtgaacacacagcatggcttgtaatggaatattgtttaggatctgcttcggatttactagaagttcacaaaaagccattacaagaagtggaaatagcagcaattacacatggtgctcttcagggattagcctacttacattctcatactatgattcatagagatatcaaagcaggaaatatccttctgacagaaccaggccaggtgaaacttgctgactttggctctgcttccatggcatcacctgccaattcctttgtgggaacgccgtattggatggccccagaagtaattttagccatggatgaaggacaatatgatggcaaagtagatgtgtggtctcttggaataacatgtattgaactagcggaaaggaagcctcctttatttaatatgaatgcaatgagtgccttatatcacatagcccaaaatgaatcccctacactacagtctaatgaatggtctgattattttcgcaactttgtagattcttgcctccagaaaatccctcaagatcgacctacatcagaggaacttttaaagcacatatttgttcttcgggagcgccctgaaaccgtgttaatagatctcattcagaggacaaaggatgcagtaagagagctggacaatctgcagtatcgaaagatgaagaaactccttttccaggaggcacataatggaccagcagtagaagcacaggaagaagaagaggaacaagatcatggtgttggccggacaggaacagttaatagtgttggaagtaatcaatccattcccagcatgtccatcagtgccagcagccaaagcagtagtgttaacagtcttccagatgtctcagatgacaagagtgagctagacatgatggagggagaccacacagtgatgtctaacagttctgttatccatttaaaaccagaggaagaaaattacagagaagagggagatcctagaacaagagcatcagatccacaatctccaccccaagtatctcgtcacaaatcacactatcgtaatcgagaacactttgctactatacggacagcatcactggttacgaggcaaatgcaagaacatgagcaggactctgagcttagagaacaaatgtctggctataagcgaatgaggcgacaacatcaaaagcaactgatgactctggaaaacaagctaaaggctgagatggatgaacatcgcctcagattagacaaagatcttgaaactcagcgtaacaattttgctgcagaaatggagaaacttatcaagaaacaccaggctgccatggagaaagaggctaaagtgatgtccaatgaagagaaaaaatttcagcaacatattcaggcccaacagaagaaagaactgaatagttttctcgagtcccagaaaagagagtataaacttcgaaaagagcagcttaaagaggagctaaatgaaaaccagagtacccccaaaaaagaaaaacaggagtggctttcaaagcagaaggagaatatacagcatttccaagcagaagaagaagctaaccttcttcgacgtcaaagacaatacctagagctggaatgccgtcgcttcaagagaagaatgttacttgggcgtcataacttagagcaggaccttgtcagggaggagttaaacaaaagacagactcagaaggacttagagcatgccatgctactccgacagcatgaatctatgcaagaactggagttccgccacctcaacacaattcagaagatgcgctgtgagttgatcagattacagcatcaaactgagctcactaaccagctggaatataataagcgaagagaacgagaactaagacgaaagcatgtcatggaagttcgacaacagcctaagagtttgaagtctaaagaactccaaataaaaaagcagtttcaggatacctgcaaaatccaaaccagacagtacaaagcattaagaaatcacctgctggagactacaccaaagagtgagcacaaagctgttctgaaacggctcaaggaggaacagacccggaaattagctatcttggctgagcagtatgatcacagcattaatgaaatgctctccacacaagccctgcgtttggatgaagcacaggaagcagagtgccaggttttgaagatgcagctgcagcaggaactggagctgttgaatgcgtatcagagcaaaatcaagatgcaagctgaggcacaacatgatcgagagcttcgcgagcttgaacagagggtctccctccggagggcactcttagaacaaaagattgaagaagagatgttggctttgcagaatgagcgcacagaacgaatacgaagcctgttggaacgtcaagccagagagattgaagcttttgactctgaaagcatgagactaggttttagtaatatggtcctttctaatctctcccctgaggcattcagccacagctacccgggagcttctggttggtcacacaaccctactgggggtccaggacctcactggggtcatcccatgggtggcccaccacaagcttggggccatccaatgcaaggtggaccccagccatggggtcacccttcagggccaatgcaaggggtacctcgaggtagcagtatgggagtccgcaatagcccccaggctctgaggcggacagcttctgggggacggacggagcagggcatgagcagaagcacgagtgtcacttcacaaatatccaatgggtcacacatgtcttatacataacttaataattgagagtggcaattccgctggagctgtctgccaaaagaaactgcctacagacatcatcacagcagcctcctcacttgggtactacagtgtggaagctgagtgcatatggtatattttattcatttttgtaaagcgttctgttttgtgtttactaattgggatgtcatagtacttggctgccgggtttgtttgtttttggggaaattttgaaaagtggagttgatattaaaaataaatgtgtatgtgtgtacatatatatacacacacatacacatatattatgcatgtggtgaaaagaattggctagataggggatttttctgaacactgcaaaaatagaacgtagcaaaatggcttcagttatcacttttgggtgtctgtatcctaagaagtttctgaaaagatctaaagcctttttatcccatatcccaaattcttatgagccactcacagcaggcagcatatgttgaaataagttattactggtacacacctgcattgcctcaccagtgtatttatttgttattaaattgatctgacttctcagcctcatttggactaaaaaaagaaagcagaaatccatgaacacattgcttctcggccttttggctaagatcaagtgtagaaatccatgaacactaaaggacttcattgattttttcagagagtagaaaacaacttagtttttcttttttcctgaatgcgtcataggcttgtgagtgatttttgtccattcaattgtgccttctttgtattatgataagatgggggtacttaaggagatcacaagttgtgtgaggattgcattaacaaacctatgagccttcaatggggaagaccagaagggtgagaggggccctgaaagttcatatggtgggtatgtcccgcagcagagtgaggagatgaagcttacgtgtcctgacgttttgttgcttatactgtgatatctcatcctagctaagctctataatgcccaagaccccaaacagtacttttactttgtttgtacaaaaacaaagacatatagccaatacaaatcaaatgccggaggtgtttgatgccatatttgcaaattgccatctattgaaattctcgtcacactacatagacataattgttatctccttttggcttatgtgattttctgtttacaagtagaatagccaattatttaaatgtttagttgccacagtgaaccaggagtcactgagccaatgactttaccagctgctgactaatcttcatcaccactgtagattttgctgcatgtgcaggtcctctatttttaattgctgttttcgttgctgcagtactttacaaacttctagttcgttgagacttagtgaccatttggcatcaagttaacatcacacaataggaaacaccacttccacaagtctcaagcctcagtgctaaagtactactgaaaaggaactaggaagtttggccaattaaaaaaaaaaagtaaaataagttatagtggtcagggaatctcttgacgaaagctaactcttatttttcagggggcacatgttttgttttgttatgttttgttgtacaatgaaggatgaacccaatgctaaaaagtcagttattttcttggttttccatttcttgtatataaattgtgttggaggtgggtaggaagctgtgagtatgacttgaagaaaaatatccttttcagtgacaaatcagagtttcttacaagttattgtcctgctcccttccaagttgtcttgaagaatccttgctgctaactctggatcctgcttttcctatagtcagagggctccaaggtagaactctctaagtccctctcaatggcactctttgcctagaccaaactaatgaccaaacagtaatcaatctatcactgttgaagtcctggttttctcaaccaaattttaagtctttcccaggtatgtcagtcgagttgccatgaatcctcacctgtaggagtttctgggattcattttaaggaaactggaagaaaattaatgttttaatgtaaatgtttttaaaaccaagatcaccatagagttcacacaaaattttaggcagtgtttcaagaagcactcttatgtgttgttctttcagcccatgctccaggtcaccggtttttaggtaaacatgacatgacatgtacttgtaatatcagtgaaaggggcttttagtcgtctcagtatcttttttgcattcaggtattatagcgtttccaacaaattgagaaattacttatttggtgtaaaatgacgagagagctttagaatttaataaaatgtcaaaaatacaatttgatacccttaaaaattattcatagatctggctgctctgtactactggatgggtggaatagggaagcagatcacttttgcatacaaaaactctttcaaacccaaaatattattggtggtacattttaaagtccaattgtggacttaaattagtcaaattgagagttactgagtccattcagatctccagtagggttttgtatctaatgtatttggccaccagttttacatgtaggtcatgactatacctggattttatcattaagttaactttaaagtatatacagtttgcaaaaaatgattcaaattaattggtttgtatatgtttgtgagatctagcttctgaggaatctcatacatagtaggaaccatcatagagtaaagcttgtagcagaaaaattggaagggttttgagatatcctagagaaagagcaagcactttctgaatcagtggggaaatatcaatatttgatcaaattaacactacctccttcccagtgttggtgttcactcactatatgtctttaagaaaattaaaactatggaaaatttgtctagcatatcagaagttgtaaatgctatatctggtatccagaggctggctgtaaaaagttccttggggtcactctatctcacattttttttggttagcattttaaaaatgcaaagccacatactttgaaatatattattccaaattgagctcccttccctttgcacatattttttcctccccttattgaagtcagctctaaccccaaattctagtatccaaaagtatttttatttgtataatgctatctgaaaaatgtgtttatattatattttcagagctgcaattcttattcgccatttcaatacctagagatagagagtcttgtatttgaagccacacacactggtgtaatatgcttagtactctaggtcaaggatttgttggtaaatggaacattttagcatagtcatgatttttggttgcctagacatcaggtaaacattcagtacactaaagaaactatcctggacactccctcctgcttccaccaatttttttctcacccccttttcaaaaattgaaaactctatgagtgtctttttgagaccataaagcagactttagtaactttctatttctgtaagtactaaatgtctggcattttaaacttttgtagaatacattatgttggacactggaataatactatttattttcacctgtgaaaaatgacttcattgtacttgaaacacctcctttgcatttctccatttgtgccattcactagtggaaataaattgtattataccatgatctactggctttttaaaactgtattaaatatgcacatttttggtatagctattatcatttgtatgtatatattgtatatacatatgagtgtctgtatgtgtgtatagatggatggatgtaactcatactgtacatttccatcagggcacttaaaagttctgttatttttgtttggttttgttatttcagtcctcagttaaggcaagaatgcatgtgtttcttaagaatgagtactctgcgttgatgtttatgagaaggtggtcattagatgcagtcttttcctttttaatcccctcttagcacttctgtgagtggagaggacattaagtaaaatttggaatcataagttgcaatgcagtaaaatggtgctggggaaggagccagttagtgtttctgtgagtttgtgttgtgatgcaataagagataagtaatgcagagagaaatgaaccatggaaagtaagaacactgatggtgattcctctgcaaagatgataagaaaaagaaccaataaatcacacaatctttatgtgctttctatatgtatttcttagtagtgataccattgatcctcttactttttttactccattaatactaataattatatactttgctgaggatcaaaacagccaagaaaggaattactgctaaagcatctaagattctcctgaactgtaaaatcaacaggaaatggccactgggagagaaggatttggtattgggtgaggggctttctccctttacctgcctcttcttgcttgctaatagtaagttctttgtgcaccttccaccacttctgagccactactattcaagtagagatttgccccaacacattaactttttccttggagatttatatggtcctgcattttgtcctgtgctcacaatgtgaagtgtcttctgtattcaaatcaaaaaataatatatttaaggtatataagtgtgaatctcctataatgatggaagaagaggttctcttgtcttagatagaaaagagccttctccaagagcaatgtcaaaacttgggctgtcatctttgagctgtttaccaaaatacagaccattattgaagaaaaacaaattatctattttgttttcccccatctaacatgatagtgcccccaaccaggttgtagcattgccttttaaaagagactcactcactcttagtttttaagaactggaaatttcccatcctcagatcccttaaaggatgaagagttggctgtacacttagcggacttgcctcttgtatgcaaggactactgattgaagtctgttttgctgtgtctggttatgttgtctgcacttttatgaaatcactacaataggtctgcattggaaatgactattaatttgtaaagaagtaagttttattaaacactgtctagaaaaagaaagtgaagctgagaactcttcctttattgtgcatttatattttctgctgaattccggtagttccctttaaagtcatgttgactaatgttttcctccttgtttgtattcagatttccaaaatttcactcatacaagggaagagactccatttagcttaacggtagtctttagatcataagaaatatataaattagtatgcaccttatctgcctgttgtgggtttcttaaacttgcacttcctacccacccaaagatagatatcctttaaagaaaataaaggcagagaattaaaactggggagccatttactatgtcaccatcactgttaactgtttcccagcaatctaaactttttgaagtttcagaggtgtattttttttttgtatatatgtctgtgtgattgtattgttttgtttctaaatatacaaggaattctttaaatagagaaaaaggttaatcctcactgaaacaccaggatgcccactggatatactaatctgaacatctgtaggtagtttgtcatgaaaaagtggagagaagatgagacttttgaatgaatgaaaaagggtatcttgatacccagaattccccccaaagtacgggtaattcaacctgcacagttttctttcactcaaagtgttcagcacttgtgagtgaaaaatcatgtaattatctgtaaatatgtagctaacaaattgacctagtttctgtatttttttgtttttgtactaaagtttataggtctgtgccagctagagagaagttgctgtcattaccagttgtggtcctagcatctaaccctgaaaccatcctaggtgacatttttagaattaatacttaaatgttaaacagggggaaatgaagcttaatcatggtcaggtttgagatcttttgcagtgaaataattttatttaatataaatgatcacatgtcctcaatcatgaatgaggtagggagcctctctcccccagtggccatgtttacaaaagtgtgttttgtctataaagtgcaagtgttttaatgtttatgtaaattatgcaggtgataacatggtttggaactgtttattgggctctttaactgaattttcaaatgaaatgaactatgcttattgctggcacattgatcccatttctggaacatttttcctatttccagagttacatatgttcttttgtcattacccaatttaacctccctttctctgatatgccttgtagccaaagtattaaaggctgatgaacatagacaagggaaatgcatttcttagaaatccgtgaaccctcagttgtatgctttcagtactcgtgttaatatgtttctatggcaactctgaggtcagtggtttagaaatgagataccagtgttaatgaaaagtgtgtgctctttgcttttgcatggcttggcttagtatccaaggtatattagggccacttgaaagcatgaagaccagttatatagggaacaggtttctctcagtggcacattttgctttttctgagccccaaatacattgcctgggcatgaacattgttaccgtaaattgcacatggtcatggactgaattatgtgactttaaaggatgtaactgcccaacatttgcagattctgggtggtctatgtgaccatttgtctcgtatccaaaaaccccggggctattggaacccttccaacactttttcctttgtcatagacaagtttatatataacttaccaagatgttggctgtcctggtgtattgccagacagctctcttttggttcccattccaaatgtgctgctgtccttctttgcatttcacaatatcaaagaaaccaccacccttcttcctaacagcattttatgccttttattccacattaaatgggaattgtgcctacttaggagtgcccctccaattaattacatgtgtccaagaataatccaagctagagacacaaggtgggaaaacatttcaaaaaaaaaaagtcctcttaaggccagtaatttatctgaaaaggtattttatcacaccttgacaccttatatatgagcctattaggagctgcaggtggtttcatagggtaaaatccaagaaaagagaaggatgtgtggggtttctattagaagataattttgttctcattttaccttttcttttatgatccttctctgctagaacaggttaattctccaaatttgttttgttttgttttgttattttttagggaactcttttgcaaaagcaatggtcggatgtaaataacatttaaagtatagtgcacataacttccccggactgttccaatctgataatttgtaaatgctttagagtttttttaattaacacttgtgttgctaaattctatttatgtaagtctgctaaagttttttagcccacttaaaacttaagacaaccatttaaaataatggatgggttactatgagcaatttcgctttcagaacccccttgttttagtatatgaaaaagcctaatgcgcattaatgaggttgaagagactatgagaaatatgtatagtgtatattttaaaacagctttgcttgtattgtgaagatttaaaaacaaacttgagatttttaacgtaactattaacacagttttaacataagttatcccactgggtttaagagcatcttgaatgtataatcctttttgtaacccaggttggtttctacttttaccagtcacccaaacatatttatgtttttagttttatgtactcatttccctttgttttcctcaaacagcatgatttttttgcacatgtagaaattttttaaaagaaagaaattagtacatcattttctctggattttcttcacttccctcttcctttctactaactccttccttaaaggccatatcactccatttgcattatttgtgcaaatgccagggttggtttttatttttatttttgctatttacctaaaaaaagaaaatgcttcagtcaattgcttttttatttaaaaaaaaaaagaaaaaaagctgtaaccttatcatttctgagtagaccattgagcgatgaatgcacacctgtagtagcccaggaccagctgtggtggctaaagggaatatgttaattaagcaagaggttcttttctaaaagtggtatctgttatccacaatgtattttagttattcccacaagtcaggggtccagataaaatgagggttatcagctaactgatatgctatcattgaggttcatcaatgaatttgtacatttctagttccctttggtgaagggaaaaatgatgattttgcaagacctagattttggcttggtttcttgcctccttttttggcagccttcatcttctcatctcccaaaccccctgagcccgtagggttttcatagtggacaaagaacttgtggtcttttaaaactgggactgatacttttttgagagagtatcgtgtcgaaagtgtgatgttctaccactttaccaataactaattttaaatacacattgtcctctcgatttttggaccaaacagacgctcacagtggaggcttatcaagggttgcattggggaagaagcctctccctctctgtcagcaccagctggtaaaggtgactgtacagatgtgcattttccttttggtataaatggtccacagcactaactggtaaggcttattgtacagtatattgtcagtattcttctggttcagcataccttatagttcatatataacctgtattaattgtatagattgtgcattaaaagctgttaccaagttgtcagaacataagagcgaaaacaaggtcatatgtaatattttgtttgtaagtatcctttgtatcatagcaaaggaaatgtttaaaaaaatcaactgtaataaagtaattttagtacacaaaaaaaaaaaaaaaa

SEQ ID NO: 34 - DNA, 6404 bp, Homo sapiens
ttacatcttatagcacccagtgaattatgatatggggctgcggtttatttgctctggcgacaatatggcttacttgccgtggaatatcccggtatttcagaagtaacatattatttttaaagagggagctttgctttctctaaatcacatggtgcaaagttgggaatacagtggcctgtaaattacaaatattatttacaaactagaaggaaagctgacatgtgtttgtgcctgtgtgacagtttcactaaggaattccaaaactgtggatagcctgttacttgagaaaaatacacggtggcagtcttgcagatgtttttcccgcctgttagccctccaggttcaaaaactgtttggtgcattttaaggcggcagtctcaccagatcgcaggattctagtctaattggcttctaaccttcaatctaaccttgccggcttccttgcaaagcccggtgcaagggcctctttcaaaatgaacccactggtgtgcctagcagtcggtagaagaagcgggagggcgtccggtctgcacgcccgccgcgaggttacaatgctgaacgcatgagatggaagataccaacgggaggccgaggggatccacggcgcccgcgcgggctccggcttcctcctgctctcggcgccgctgggcgaccgcccatgacccgctcttgcgggctctgtccggttgacaggcgaccctgtggcccggggaagcgcgggagggcgccggcggaaagttgaagagcgtttttctcgccgccgcgtgcattaggagctcgacgagtccgccctgggcttcctggtggggctgggcgggcgggggaggggccgcgcagcagcagcggaagccagacctcggcgataagaggctgcacagcgacatgcaacagtcttttcactgcagctgaatgagttgtggcgcccacaatgctcccatgacaaggagctgacaagttccattttccgtcgcgggcatcttggaatcatgactcccacaatgccttgggcacttggtcgacagtggggccgcctctgaaaaaaaaatgtgagaggttggtactaagaagtgcctttcctgacgtctctgctgcttggaaccgcttctagagcagtctctgcttttgccttgcttgctgccagctagactgtgacgacagcacatccaccctccacctctagcccagacacccccatttctacttataatcaagagaaaagctctaagtatctggcattgccctaggctgctttagtgttaaaagaaaagtttgctgaaaaagtaagatatcttctgccaggaaatcaaggaggaaaaaaaaaatcattttctcgattttgctctaaactgctgcatctgtctatgccaaactaatcaataccgattgcaccaccaaactccattgcaaattcagctgtgaggagattccctttcagacaactttgctgaaagcagcttggaaattcggtgtcgaagggtctgccacgttttcatgcttgcattttgggctccaaattggcactgggaaggggttactgagagcacaaggctgataccaggccctacttttaaacgttcatctacttacaatcctagtatttctctaaaaaccaaaacctctttgaattaacagtttcatgctgtgaatttctagtgggagatcttttccttgatattgacgacacaattttccatgtacttttaaagcagggagtggggaaaagtattttgaggggacattttcatcatcagttcagctttttttttttggttgttgctcttttttgggggggttgggtttgttggtttcactgaaacatttaactacctgtaaaatctaaacatggctgttagtgtcacaccaattcgggacacaaaatggctaacactggaagtatgtagagagttccagagggggacttgctcacggccagacacggaatgtaaatttgcacatccttcgaaaagctgccaagttgaaaatggacgagtaatcgcctgctttgattcattgaaaggccgttgctccagggagaactgcaaatatcttcatccacccccacatttaaaaacgcagttggagataaatggacgcaataacttgattcagcagaagaacatggccatgttggcccagcaaatgcaactagccaatgccatgatgcctggtgccccattacaacccgtgccaatgttttcagttgcaccaagcttagccaccaatgcatcagcagccgcctttaatccctatctgggacctgtttctccaagcctggtcccggcagagatcttgccgactgcaccaatgttggttacagggaatccgggtgtccctgtacctgcagctgctgcagctgctgcacagaaattaatgcgaacagacagacttgaggtatgtcgagagtaccaacgtggcaattgcaaccgaggagaaaatgattgtcggtttgctcatcctgctgacagcacaatgattgacaccaatgacaacacagtcactgtgtgtatggattacatcaaagggagatgctctcgggaaaagtgcaaatactttcatccccctgcacatttgcaagccaagatcaaggctgcccaataccaggtcaaccaggctgcagctgcacaggctgcagccaccgcagctgccatgggaattcctcaagctgtacttcccccattaccaaagaggcctgctcttgaaaaaaccaacggtgccaccgcagtctttaacactggtattttccaataccaacaggctctagccaacatgcagttacaacagcatacagcatttctcccaccaggctcaatattgtgcatgacacccgctacaagtgttgttcccatggtgcacggtgctacgccagccactgtgtccgcagcaacaacatctgccacaagtgttcccttcgctgcaacagccacagccaaccagatacccataatatctgccgaacatctgactagccacaagtatgttacccagatgtagaattttcatcactaaacaatcatgctaaagaggaaaggacagtgtgcttggttagagtaaaggacgaggtcattagccatattgtatatatcgtcaagcaacacacacaaaagttcctcagccacaagacatccacatattgcatgttaaccagaagaaaagacaacattttccggaaatccactgcacactgttgcctatacactttgtacatttaattgatatttgtgctgaggtgatattcctgtctaaaagaacaacattgtctttcttttctagcacagagttatgcattcaaagatgcatacctagttagtttcctatatattcatgccatcttgaaaagacagactatggtgtaaccatgattctattatgtattggtacgtctgtagaccaagatataattttttaaaaataagtttatttctttcaaggtttacaaataacaaaggtgcaccttgtatttaaaattgccattatagatgagagcgtgcatgcacagtcatttttgtttaagagtaatatttttaatgtaatagattgtaagacgtggtgagggagggatctgacagagatgaatgtgccaagcaaaaccacaactgtgtatattttaaagcacatcatggctttaagtaccatgttgttaaggattctcatgaagtgccatagactgtacatcaaattagagtattatttcttcagtgttattgttttcagagccacattttgttgcatatttgctagtactaatcagtcaaagggcaccattctttttttttttttttgaaaccaaagctgtctcagaaatggccaatttaactttacagtaacaatagacagcacaacacaaactctctcaatacagataaactcacacatactggagatatatatataatagatatatataaaattattttaatgcattgtagtgtaatatttatgcatactatactgtataacatgttattcaaaagggattgccatttctgagacacagtaacaaaaaaatgaggaaattattttgcttctatttatagcctctgtcaaaagtcaaaagactataaatgctttgcaaaaatggtttcacgtttgcttaaatgcttcatcacagtcacattcaaaatagtgactctaaacaaagaagaaagcagcactgtcatcagatgcatgataaaccaaaatatgaaaatgggaaatgtttaattaacctagtaattgggtgggttaagtacatgggtgaattttatatgtgatttttgttttgttttgttttgttcagattaactgcttatagccttagaaagccttttacaaaattaaaaaaaaaatagatgtgcattcagtttttaagaatggaatcatccaaaggaattcctttttttgaggtttggatgttgcagctagtaaaggatatttttgctctgttcagcagttctaaaaattgctgaagtaggggccaggtcactggtagttatagtatggaatgggagaagtgaaagttcagttatagaactttccatacttccaagtttactgcaagtttttatgcttgagagagatgctttctaatataagactgatgtgttgattttactgattgtactgtacatctattaaagccttagattattacattacgggttggaacccataccaatgtaatttcaatcgtgttaagaaagtaatggtgacttcacatgttattgtagttagttacattatagaatattacttatttttcttgttaaaatgtagtttttcatttcctacatttattagattttcattttctattaacaattgaataccatttcagtttatagacttgttttattagattttaccaatgaatttttcaaaatacaaaaaaaagtagtttttccttcataacatactcagttttgaattacatgtagtgtcacatgaatattcgtattgttaactaaatgatttatattttactgatttaatattacagtgtaagaatgtcagtcattgttagttcttgtctagttttcattaaaagaacaaagatcttttatatggatatcttataaatatataatcattgctaagtaagaagttaagttgttgctatcgcaacaatcctggcagacaattgagtaatattttgatgatttattttgtttgtaattagttattataagaagatctagatcctagatattagaataaaatttattttctactgtatccatttcaaatgttaaaatattgtttaatatttttgaaatccctgagtatcaggccttgttataaataagctgcataatcaataaatagaacaagggactttttgttgataatccaaatactcaaagtttacgtaatgaaaattatagcgtgtgtgcaaactcttgagggttgattatgctgcaatttagcatgttggaacgtctagggagaaggttgactttttgcacttctgtatatagtcaaaagagagaaacctgtataatagtaagatcttattttgaataaaaacgtctataattacaaggagttttgttaaggctaatacaatgacagactgagcaaaattgcttgcaaaagtggcacagagttagcactccataccccttcaaacatgttgctttgctttcttgtggacagcttgtagtttgccaggattttttcagctggaaagatacgccatcctttcaaaccctcatgactgacaaaaactccatggggccaaatctgcctgaagatcattaccaaaaatagcaggtacttctaccattaaggtgaaatcatggatcagatattccttacatttttcaaaactactgcatgtttaaaacttcaacaaaaaaagagagaaagaactatactaagaacatatattattcagatcagtttctgccaatttcagtggtttattgttcacaaaaaaatcttcaaaacaagtattgactttcacaaaatttaaatcataaacaggcaaaccaaacagcacactgtagctatagttgttatgtgattgttttttaattgctgtaggatcctgttctttcagcaggtgaaaaataaaacgcagttcaaatttcatggttttaattttcaactcagaagcactcaaaaatgcaaaatgtgataatgggcacttgtttaaaagaattagtgtatccagccttcactccagctggttaaaaatgttgcacttatcagcaaccctaccactttcatctgctgaaaggacaaatgtgcttggttttactattatgtaatcacaacttactttctgcttgtagttgcttaaaattatgtattttgtcttgggctgcaatttgttttatgcttattttattattactgcagtagttgactttgctgtatggaaaaataaagtgaaattgccctaataaaacttctctttcttaagt

SEQ ID NO: 35 - DNA, 9008 bp, Homo sapiens
agcgcgctctgtgtggccgctgccgccatgttgttgtggttgtgagaaggcggcggcggcggcggagtagcagccggacgagacgtcccagcggctcaggcgctgcccagcgccggccctggcagggagcctggtggggtggcggagggggagactgtgccgtggagggcctcgccatgtcctgctgcccgacttccttgtgaaacctcctagtagaaaaagttcttgggacaaacttcatttgacttcaccataagggaaagaagagagccttgttggacactgaagaagggacggggatttctcctcctaatctgggcctcttgtcatggatgaagagactcggcacagccttgagtgcatccaggccaatcagatctttcccaggaagcagctgatccgggaggatgagaatcttcaggttcctttccttgaacttcatggagagagcacagagtttgtgggccgtgccgaggatgccatcattgccctttccaattacagacttcacatcaagttcaaggagtctcttgttaatgttccattacagcttatagaaagtgttgaatgccgagatatatttcagcttcatttgacttgcaaagactgcaaagttatcaggtgtcagttttcaacctttgagcagtgtcaagagtggctgaagagactgaacaacgcaatccgaccacctgctaaaatagaagatctcttctcatttgcataccatgcttggtgcatggaggtctatgccagtgaaaaagagcaacatggagacctgtgcagaccaggggagcatgtaacttcaaggtttaaaaacgaggtggagaggatgggttttgatatgaacaacgcctggaggatttccaacatcaatgagaagtacaaattatgtggtagctatcctcaagagctcatagtgcctgcctggatcactgacaaagaactggaaagtgtatcaagtttcaggtcctggaagcgcatccctgccgtcatctacaggcaccagagcaatggagctgtcattgcccgctgtggacagccagaggttagctggtggggctggcgaaatgcagatgatgagcatctggtacagtcagtagccaaagcttgtgcctctgactcccgatcgagtggcagcaagctgtcaactaggaacacttctcgagactttcccaatgggggagacctttctgacgtggagttcgattcttctctgtcaaatgcttcaggagcagagagtttagccatccaaccgcagaagcttttgatcttggatgcacgctcctatgcagctgctgtggcaaaccgagccaaaggaggaggctgcgaatgcccagagtattacccaaactgtgaagttgtgtttatggggatggcaaacattcattctattcggaggagttttcagtctctgcggttgctgtgcactcagatgccagatccgggaaattggctatcagctcttgaaagcacaaaatggctccatcacttgtctgtgcttctgaaatcagcgcttctggtagtgcatgctgtggatcaggatcagcggccggtgctagtacactgctcagatggctgggaccgcaccccccagattgtggcattggctaagctcttgctggacccttattaccgaaccatagagggtttccaggtcctcgtggaaatggagtggctggattttggccataaatttgctgaccggtgtggtcatggggagaactcggatgatctgaatgaacgttgcccagtgtttctgcagtggcttgactgtgttcatcagcttcagaggcaatttccttgctcttttgagttcaatgaagcattccttgtgaaactggtgcagcatacctattcctgcctgtttggaacattcctgtgcaacaacgccaaggagagaggggaaaagcatactcaggaacggacatgttccgtgtggtcacttcttcgggcaggcaacaaggctttcaaaaacctactgtattcctctcagtcagaagccgtgctgtaccctgtgtgccatgtgcgtaacctgatgctgtggagtgcagtgtacctgccctgcccatccccaaccacccctgtggacgacagctgtgcaccatacccagccccaggcaccagccctgatgatccccccctgagccggctaccaaagactagatcatacgacaatctgaccacagcctgtgacaacacagtgcctctggccagccggcgctgcagcgaccccagcctgaacgagaagtggcaggagcaccggcgctcactagagctgagcagcctggctggccctggagaggatcccctttctgccgacagcctagggaagcccaccagagtgccggggggtgccgagctttctgttgcagccggagtagctgaggggcagatggagaacatcttgcaggaggccaccaaagaggagagtggagtagaggaacctgcccacagggcaggcattgagatacaggagggtaaagaggaccctctcttagaaaaggagagcaggaggaagacacctgaggcctcagccattggacttcaccaagacccagaactgggtgatgctgctctgaggagccatctggatatgagctggcctctgttctcacagggcatttctgaacagcagagtgggctcagtgttctcctcagttctctccaggtcccccccaggggagaggattccctggaggtccctgtggagcagtttcgaatagaagagattgcagagggtagggaggaagcagttcttccaatcccagtagatgcaaaagttggctatggtacctcacagtcatgttctctgctaccttcccaagtcccttttgagaccagaggaccaaacgtggacagttctacagacatgttagtggaagataaggtgaagtcagtaagtgggccccaaggtcatcatagatcttgccttgtaaatagtggcaaggacaggcttcctcagaccatggaacccagcccttcagagacaagcctggtcgagaggccccaagtggggtctgtggtgcataggacttcccttggcagcactctcagcctgacacgttccccttgtgccttgcctttagccgaatgtaaagaggggcttgtgtgcaatggtgccccagagactgaaaacagggcctcagagcagcccccaggtcttagcaccctccagatgtaccccacacccaatgggcattgcgccaatggggaggctggtaggagcaaggactcactgagccgtcagctgtctgctatgagctgcagctctgcccacttacactcaaggaacttgcaccacaagtggctgcatagccactcaggaaggccatctgcaaccagcagccccgaccagccttcccgcagccacctggacgatgatggcatgtcagtgtacacagacacgatccaacagcgcctgcgtcagattgagtcaggccaccagcaggaagtagaaactttgaagaaacaagtccaggagctgaagagtcgcctggagagccagtacctgaccagctccctacactttaatggagactttggggatgaggtgacttcaatccccgactcggaaagcaatctggatcagaactgtttgtctcgctgcagcacagagattttctctgaagccagctgggagcaggtggataaacaggacacagagatgacccgttggcttcctgaccacctggccgcccactgctatgcgtgcgacagtgccttctggcttgccagcaggaagcaccactgcaggaattgtgggaacgtattctgctccagttgttgtaaccagaaggttccagttcccagccagcagctctttgaacccagtcgagtatgcaagtcttgctatagcagcctacatcccacaagctccagcattgaccttgaactggataagcccattgctgccacttccaactgaagctcagtgacctgggtgggcagtggccaagctgctgttcctatgacaggcccactcaacctgggcagaccgagaggcccgtgcactttggaatgggagcgtggaaccacctgtacagagtgacagatttgggatgcaccactggattgtagattgatttttctttcctgtccccctactccctccctaccttttccatcctcctcctctgccttcaaaaaaggaaactttcccttggttgtcttaattttttttttttttgatggaagaccaagggttgccaggcccactgtaactgccgagctgcctgctgtcacgtgacactgagggatggcttgtttcttccgggtgggaggatggtggtcagagccaggagtatggagatctgagaccgtgagcagggaagaaagccagtgctaacatgcaaccattcctcacgccaccgccacatcagagctggttgggaaccctttgctgctggggaggctggaagcatattccccaagagcactgccctgggcatcatctccctcctgcgaggagctgagccagtcccctcacagatggataaatgaggctgatgtttggagggagaggcacacggtaaatggcatccccttaggcgcctctttgggaaaggaaagtggatgctcctttgaggcaggcgaggggctgggagtgggtagccgtcatgttgtcccccgtgggatcccatttttaacttgacccagattgtcttgggctccttttactttcagggggctgctttcctgggccaggctgtgtagcacttcccaccctcaggcatgagtacagactggtcaaaatgtttatgcagtcaaggccaaagcctgccctgagcccagacacacctgggtccccattctggggcctggtcccctaaacaatctcttcctcagccagcacagggaaatccagactcagggttccagaaatcccccgttcccaaaccaaaccaatcatggatcttccctttaaggggtagaatcagcctttagagttacaagcccctggaaaagggagcaggtcccatacaatcagcctttctcctcttctcttcttgggacaggaataactgctgagcagtccccctttgccactcctggctgtctgagtgggcacttgtctggctgctggccagcagtgaagggccacttggtgacttcgtagggttccttagagaagtgacatggccttgaggagattcagggcacctttcctcagtgagctttgatatggtccaaaaacagccttaaatcaagaatatttgtggaggtaggtgtggggaaggttggagaagagttaggtttgtgctttgtaatcttggcatccatgttttgtgcctgccctccctcttggggaggccatgcttgactctgctgaaagctgctaactggtgacagggtggatcatggtgaggactaggggtaaggtcagggaatgcttaagctctggccctgccctgtattcctcttccccttggtagcagttccctgaccaagggcaaggtgtgtctcaggaaggtggttctgtgcatgcctgggtgtggttaaggcgtggcccagaaggcttccctggtgctctcagtccaggcaaagcccagagcatctgagcacgtctctgacttccagtggcaacacagtttgaacgtggtgaaacagggtgtagttcttttccacattctgtgtcatctagtcgtgcaggtagggaaaaagttggtctaattgaagattgtgcatttcctagtgacaggtgccaagaggttatgatacgggtttcttgggtctgatgtacagtgtgaataaatgcttgcagctcttagctcttttttgatcgatgaagcacttttttattaatattttcctttgttaaaggaggaaccgtaactctccatagctgtacatataacccttttctcctaaagaggagtcagtcagtgctcctatatttttcattttttgtcaaagcaagaagtaaatactttagaattgttaaatatataaataaagcaaataaagttgagtgttccacatggtagcatttgctaacacttcctaattctttgccctgtggtttatcccctcttcgtcccttttccctctcacacagaagtgtttgagggcctgctgggaaactgacctttggcaaaggaaagctacagatagccttccgactctagaccttggcaaggagcctcaccatgatgttcaagcactgaacgcatttcctcagtgattttgctcctaaaatctcccaggctaaaagagggcaaagcagtcagggatctgacctggcagctattcctccttctctgaagagttcccatcagtagtcattacaactacctctcgcctcaaggctccatttttagctgctgctctgatttcagggcagccagtactctggccccttcagtcggggagtggaaggagatgtggggtgggggtgagaaaatgcttctgcctgttgttcttgaaggatagactatgggtgggcagagagaactgggggcagaaatggaattagatgtgattgggttatgcagtcaactagaggtctccttcccgccctctctccacacagagaggaacctctgctccttagctcttacagcaggactgtggcatctagtcacttcaatactagttcttgctcttcacagaggtagatttttctttaccctacagcactgttgggcatccctcccatcacatgggtctgtgggtgagatatgttatgctgttcctccctcgggaaggttggtattgaggggtgccttgctccagaggcgccagcccagcatctgtggtgagttggctaagatccagagtgacctgctcagagctccccagaggccttcactctttggggcagtctctctagggtcactttctgaatgtaccttctacctaaagtatacaaacacaaagagccagctgagctggttctagtgtgaaagccgtaagtgccacccagcaggcgtttgaaaacaagaaatcattcttctgtggaaggagaatgtgccatctcagctaccctcagtccgccaggcagcccagtctgtgtattcatatgaagttgtgaaaaccatgagtgtgtgccatggccatcgtgtctacacacagccactattgttcctgtgggctagtctccagcaaattaaaacactggcatggcctaggaagggcgttgcgagctcctaaatggaaagcttctctgggggtagggagatgaagagccaagatgctggtgaagcaggtgcagtgaggatccaaggcaaggaattgccctgagggaggtggctgcatatggagaaaggcagttctctgtgggcaaggccagcttgcttcaggctgtagagggaatttggtctgaagcaacagggcatgaactgtgactttgagctgccaggttgtcttcatctcagaactttcctatcctggcactctcgttacctttcttctataccttggcctctgtaactgcagtccaaaacaagttacagctgccttaatccactgagattctctatgaggatgtacagaaaagttttcctgtaataattttgcttatatgctaactcttttcatgttagcaaagaatattctatgaattagaatgttactgtggtagatctaaaggagaatgaacagaaggtgctggaggacctgttaaacaatctctggctattaaaaaacatcaagatgagaattaaaggcatatcctgatatacttgcctgcttgcacatgaggctgggagatcccatgcctgttgaagttaactctagccctgacctctattgatcttttgggaatgagggctgatttgaaggtgctgttgcaggatttcatttagctgctgccagttcaagtgacctgtccccagggctgcagctgtatccacctgattgcagtaggtgagggctaacagcagaatttaaagtggaccctgggctgtggagcaaagtgactatccatttggacttttggataatgtggcaggagtcccagctgtttaatttctagtcacattttccagaaagttgttctaagttgagattactgacaagatttctcaagggcaggaccagatatgtgagagacttctagttcagagctgacccctctaagcctctgacacttaaacacgagtcctgctgtccccagcacacaactgcactgaagccttgttcctctcggctggtgtagagctcatctgcatgttgtgtgcagataccagtagcctccctgcttgaacaggcctctcctaggctaggcaggtgttcagaggcatgaaggtctgggcaggggaagggcgtcttctgaaatgggagttaccaggtttttaaatgctgctattgttttatttaccatttaaggtcttttctattatatctgagtaactagtcagtttttcttacagtgctcatagcagttgtatttgaattgtattttcagtgaaatttgttttacattgccatttaaaattggcctttaacagcttcccaactagcttataagatttttttttttaatgaaaacataacccatgaggctcagatgctgttgaagaaataaatggtatgttgctgctgacagtagtgcttgcctattgtaacagcattggttctgctgtagcctcggtgaccatttaagttgaataaatctgtcattttcacccacaaacagttgttgagcccctggatttgggttgtcactgtggttctcctgccagtgctataatccagtgtcgtaggtgcagggtatgaatcagctcagcctcttaggagagaggggctctcagcgaggagggggcggggggggggtcactatttatcttccagaggcagggttcatggattcctgatgtttagaggcggaagggaccttaggtcacctacttccacggttttcatactgttctctggggcctcgtggagagggagcctccaggcccattcaaagctttattagatttaaaagtaagatctggtatgaagaaaggttttgtttgtttcttaaaataaaaagtctgaaaatcactaaaaaaaaaaaaaaaaaa

SEQ ID NO: 36 - DNA, 12499 bp, Homo sapiens
ccgctgcatggcgctgagatggcgggggcgccgcgcggcggaggcggcggcggaggcggcgcgggcgagcccgggggcgccgagcgggcggccgggacaagccgccggcgcgggctccgggcgtgcgacgaggagttcgcttgcccagagctggaggcgctgttccgcggctacacgctgcggctggagcaggcggccacgctgaaggcgctggccgttctcagcctgctggcgggcgcgctggcgctggccgagctgctgggcgcgccggggcccgcgcccggcctggccaagggctcacacccggtgcactgcgtcctcttcctggcgctgctcgtggtaaccaacgtccggtccctgcaggtgccccagctgcagcaggtcggccagctggcgctgctcttcagcctcaccttcgcgctgctctgctgtcctttcgcgctgggcggccccgcccggggttccgccggggccgctggggggccagcgaccgccgaacaaggggtttggcagctccttttggtcaccttcgtgtcctatgccttgctgcccgtgcgcagcctgctggccataggctttgggctcgtggtggctgcgtcgcacttgctggtcacagccaccttggtccccgccaagcgcccacgtctctggaggacgctcggtgccaatgccttgctcttcgtcggtgtgaacatgtatggggtctttgtgcggattctgactgagcgttcacagaggaaggcgttcctgcaggcccggagctgcattgaggaccgactgaggctggaggatgagaacgagaagcaggagcggctcctcatgagcctcctgccccggaacgttgccatggagatgaaggaggacttcctgaagccccctgagaggattttccacaagatttacatccagaggcacgacaatgtgagcatcctgtttgctgacatcgtgggtttcacgggcttggcatcccagtgcacagcccaggagctggtgaaactcctcaatgagctcttcggcaagttcgatgaattagccacggagaaccactgtcgccgcatcaagattctcggggactgctactactgcgtgtcgggcctcacccagcccaagactgaccatgcccactgctgtgtggagatgggactcgacatgattgataccatcacatctgtggctgaagccaccgaggtggatctgaacatgcgtgtgggtctgcacacgggcagggtcctctgtggtgtcctgggcttgcgcaagtggcagtacgacgtgtggtccaatgatgtgaccttggccaatgtcatggaagccgctggcctgccagggaaggttcatatcacaaagacgaccctagcgtgcttgaatggggactacgaggtagaaccgggttacggacatgagaggaacagtttcttgaaaactcataacatcgaaaccttttttattgtgccatcccatcgccgaaagatatttccaggcctgattctctcagatataaaaccggccaaaaggatgaagttcaagactgtctgctacctgctggtgcagctcatgcactgccggaaaatgttcaaggccgagatccccttctccaatgtcatgacctgcgaggacgatgacaagcggagggcattaagaacagcctcggaaaaactcagaaaccgctcatctttttctaccaacgttgtctacaccaccccgggcactcgcgtcaacaggtacatcagccgcctcttagaagcccgccagacagagctggagatggcagacctgaacttctttaccctgaagtacaaacatgtcgaacgggagcaaaagtaccaccagcttcaggacgagtatttcaccagcgccgttgtcctcaccctcatcctggctgccttatttggccttgtctaccttctaatattcccacagagtgtggtcgtcctgctcctgctagtattctgcatctgcttcctggtggcctgtgtcctgtacctgcacatcacccgggtccagtgttttccagggtgcctgacgattcagattcgcactgtcctgtgtattttcatagtggtcttaatctactcagtagcccaaggttgtgtggtgggctgcctgccttgggcctggagctccaagcccaacagttccctggtggtcctttcgtctgggggccagcgcacagccctgcccaccctgccctgcgagtctacacaccatgccctgctctgctgcctggtgggcaccctcccgctagccatatttttccgggtgtcctccttgccaaaaatgatcctgctctccgggctcaccacgtcctacatcctcgttctggagctcagcggatacaccaggactgggggtggtgccgtctccgggcgcagctacgagccgattgtggccatcctgctcttctcctgtgcgctggccctgcatgccaggcaggtggacatcaggctgaggctggactacctctgggccgcacaggcagaggaggagcgagaggacatggagaaggtgaagctggacaacaggcgcatcctcttcaacctcctgccggcccacgtcgcccagcacttcctcatgtccaaccctcggaacatggacctctactaccagtcctactcccaggtgggcgtcatgtttgcctccatccccaacttcaatgacttctacatcgagctggacggcaacaacatgggggtggagtgtctgcggcttctcaacgagatcatcgccgactttgacgagctcatggaaaaagacttttacaaggacatagagaagatcaagaccatcgggagcacctacatggccgctgtggggctagcgcccacctcggggaccaaggctaagaagtccatctcctcccacctgagcacgctggcggactttgccattgagatgtttgacgttctggatgaaatcaactaccagtcttacaacgactttgtcctccgagttggcatcaatgttggccctgtggtggctggagtgattggcgctcgcaggccccagtacgacatctggggaaacacagtcaacgtggccagtcggatggatagcacaggggtccagggcagaatccaggtgactgaggaagtccaccggctgctgagaaggtgcccctaccactttgtgtgccgaggcaaagtcagtgtcaagggcaaaggcgagatgttgacatactttctagaaggcaggactgatggaaacggctcccaaatcaggtccctgggcttggatcggaaaatgtgtccatttgggagagctggccttcagggcagacgtccccccgtgtgccccatgcctggcgtctcagtcagggctgggctccctccacactccccaggccagtacctgccctctgcagcagctgggaaggaggcttagtggagcccacgtgggcctctggggtgcacatggggtgggaatgctccgggggtgacacaggccacggtggctccagccaggaccagccagaccagcagagcagggagccacttgccagggtggaggaggagcattgtccaggcatggcctgtggcccgagggccaaccaccgagcaggcacagcacagcagtgactcggtgaggggaggacacccgactgtgcacacttccaggcctccctggagaggtgtccactccatccttccctccgtggcgtagggagcactgtttctttccagcaagcctgttcaggtttggccaggtcggcatcaatgtaaggaccttcagagcatcccagggttacagcaagagccactgaggtgtggctggcagagcaactgaggagctctgcgagagtgtgccctctgagacagccctgtccgccccgcccaggtgggacctgacatacaggcggctccagccctgggcagcggcttcaagagccagagtgggaagtcaggcctctctgggaaggtcacaaggcctggggttgttcacaccacaggcacaatacagagctgtccactcttgaactggaccgtctggggagaattgagaagctgcctctcactgcatggatagtggtggctgctggctttcaagcgtggttttttgctaagagccagaggcaggtcttctggagttctcaggggggccctgtgaccccctctccacaaccatggccagcatcggcttcttgctgcacctgtgcattctccacccctccgccaatggcttccagctcctaaaacacctggacattccccatcctgcaccggcactgtgtttgttcagagaaaacgaagggtgtcatttcttcttttccctgtggcatcgtggatcctttacatttagcaacaacagtgtgaggctccacttctgttgaatatgagcggctgtcacacccatgagcaagtttccttgatggaagatgctgtttctccggcagaaccaaccctccaggacgaagtttcagaattggctgatggtcgtgagtgcaggtgtccctgttgtaatttgcagggaaattgactgcaggtgatagtgttgacgtctgacgtctgacaacctcctatgtgcatgtctaaatagtcacaatgaagatgaaaataaggatgatggggacggggtccaggagggccactgggaaggcactatccagaaatagtggacagaggtctggcatgtggaaaccttggatctcggtcacagggaggaaggcagctagaaatgggagggaagcttctgggtaggcaccatagtaggggaatgtctaaagacccactgctctgagatgtggtcagagaggtttctgtggactgcagatgaggcctgagccctgcctatgctcaaagccagcagggttgggggtccgcctcctcactgctcctcaacagctgtaaccctttcctgagggccccgacttttcagaataggagcagagagaagcccagacttccttccctggagtgtagacctgtgtgtgggacctgctccaggctgatccctgtccgcacaggtgggtgatgtccttggctgctgccgtcagaggcagccccctgcacagggaggggctgatcctgcctcagctgtgtggccatgtgggggcagcaggggcctgggccatagctgggggaggccagaccctgagggctttgcagggcggccagtgcagtgatgcctggcgcttccagctgagacaggagtccggacagaggtgggcagggtggatggcttcgggcagggaaggcgggtagaggctgcatgtgggggcccctgtctgcctgtccttagggtgtggattaggctctggcttctgtgatggtgcaagaggcaggatggtctccagacaccttcttgcagagtgattttgaccaatgcctttccagcaccttcccctggttatgacagggagctcccaggccaggccacatgaccccacaggtaggctgaccccatggacccactggagactttgagggcagagctcgggcacctttcatcttccttgggtggtcctcatgtcgctgtccgctcatgttcctggtgttctggcatcaccttgtgccggtgggggctgggctcccgtgaggtcctagggcagaaggaggtgcttgcagggcctctcgctgctactgggacatccacaggacctaatgtttatgtggaatctccaggctgccatcgagggctcctgagctcatcctgaggacccagggtccatctgagctggctgtgggctgagatcctggctggggccctgctgtcaacctctcctccaggccctgccttgtccctgctcctgtgctttcctctcttcaggacaaatggtttgtccttatggtcccctttccactaggattttctcatcctcatctgtctatcccagccggatttaaagcagtcacttcagacaggagccacagggagcctgtgagggagtagtgcggtggtggtgagtgtggctgccctggctcccccagctcaccgtggtgctgtccttgacccacgagctgttgagaagggtgcagagcccctggcacagccaaccctgttgcccccagtgccgctgcccagcttcggccatccaggtggtgggtagacagaggagtgaaccccaaaggtgtccatgccccagttctaagccctgtggccaggtgctgtcacacagcaaaggggactttgcaggtggaattagggttagggatctaaggatgggaggggaacttggtttatctgggtgggctcagtgaccccttggaatggctgagggaggcaggagagcctggaaagattcgaagtgtcacagagatggtgccgtcattgctggcttaaagacaaggggccaggagccaacaccagaggccactccacaaccccagcgccagtcagcaaggaagccgggtgtcgctcacacaaccagaaggagctgagtttggcaacaacccaagtgagcctgaagcagattcgccccagagcctccaggcgtgagtggagcccagtccagcgacaccttggtttggcctgtgagactgagaagagagccagccacgccatgctgtgcctggggtccacagagccgggaggtcacacatgtacatcctggaagctgcccaaggtgtggccacttgtagggcagtgagaggaagccgtcgcggggaccatgctgccttctctgggctcacgactgttctggaaaggaccccatggcagacttggcaaggtctccacttcaggggcaaacatctccatcatcagcaactccaaaccccagccacttcctgggagttcaggaactgtgtttagccataatgtcccttggggtttggtgaaaaacaacttcctttttatttgtgggaaaactgtattatattgccttatttatttttaatcatgtacaatattcatgtacaaatgttagagccattcgggtaggattctctctaaattatttattgaagaggctttgtaaatagtgcaccagtgacaggtgctgcctgtttactcgtaccaaaaatgaagacaagccccacacccacctcagcccttgcttggccatgctgtggccctttggaaatgaccctgtgtgctcccctcgcgacccttgcatgcctttcatgcctgatgccgtagagtagaacacagccccggaatgcttccagttgcttgcaagggaccatgccggcccgggtggtccatgcctgcggggtgtctgtatcctgcaggaggacgcccctacagacccagcaacccaagttgccagcccgtgtttctcagactttaaagccaccagggcttctggaacacctgtcatagaagcaataactctaactctatactgtagagatgagtctggtccgaagcagattagtaatttagagataagccatgcatacaagtttgccccattctctggcttggggtggtgggaggcggggagctgccactcccaaagcctccaccccttcctgaagacccagctatgaaaccgcagttcctgtgggttgggctgcccaggctggtcagagctcagcaccccaggtctggtgagcagacagagccggcgttaaaccccgatcaggtcattgtcaccacacccttgcttggatgaggaaggaaggaggcaaaggcacccactccatccaagatccgttccaattgatgagcctcagtactggcctcacactgaccaacggtggtatgctgcagtttgttggtttggtgcagagtctaaaggataacatatcaaggcttacctgtgataggccattttaaggaaatggtggcactctgaaggctgtccccattcaccttccacaatgctggtaccatcctggtagaagagccctctgaacaggacacctgttcaggcctgggggccccatgctaggcttgcctgggtgtgagaaggtcgaactgggtggcttaggccttcaaattgagcttgggggtgtccaagagaggggtcttattcgaggaactcacataccccaaataaccatcagtgcacaaatcattccatgctctttggcaccaggcaggagatgctgcaggcaggtgtccgtagttggcaaaaatgggcagtaggggaaatggagttgcttcaacctttctcagtcccggccctcactgcacccaccaagtcaagcagagctgggtgggctgagaccagcatcccagctggactgagcctggggggaggggctggagccaaggagcccccctgggtgggggcatcaggagcaggggcagggcctgaggactgctccccctgcatggagggcaggccaggatggagcccagggtagactttgaggaaggctcagtgggctcagcagaaggaaggctcttctcatagttgtggtttttcacagatggatttgggtgatctgagtgtggtcaggccctgccgttggggaatgaatgccacacggggtttgtctgtaagctgcagtgtctgtgattctgtgtgaactgacagcagggagctgaaggacaggccccggccttgggagaggacacgggcatgggctgctggatgcagggctcccagggctgtgaaggcagaggggtctctggaggcagacagggtgggctgggggccagcagcagggggcagagccccagccagggcagctgcttcctgcacatagacattcctcctgcgcagggccaagtgcccatgagcacagccccagacagacacggtggggagcttggagccctccgctcacctagaggagccctgggacacgcactggaaagtattctaggggcttcctgccttatccttctgtttgttcatacacttagtgaaagcagatcctgtactaggatgtgaggatatctgtcacctgcgtggtccattccataaacaccagattccatttcagttgccacacattttggggctagacttccctaaacaacatgccattgtgaaataatgcatatatttgtatttttaaatttccctgaaaatttaatctattctgttccatatgaagtctgtttcactaccttaaaaaatagatactccactagaggctgtgcttaattcaaatccatgtgtgtgcctgcattacatgtgtgaacacgtgtttctgtcgtgtgtgtcatgcacatctgtgtgttgcatagcataagccaaatgaaaatcatttgttcatgggattcatatgaggaacaaaattaaatttgaatacagtcagataactgccacgcagggcatttggggaaccatccccgaatgccctgatgtgatttccctcagaaaatccttgttattagaggagaaggtctgggcaggggcagcagcatctcagacatcaagtcaactttatcatctactacatcagcactgaagtccaggggcattgaggcactaactaggttccattttctttggtttggttacttattttttctttttgggttctcggtgtgcagaggctgtagagagagcctcagggcggtgaccgctgcaggaattcggccctccagctcccctccagttaccaggagccgatttggaggccaggccttcccagctgagtgtctgtcagcttcattctctctcagctgtgcagtggaagagcaacaacagacaggtgaccttcttgggttgtgcttcacaatggactgggaaaaacatctttgaaatcaggaaatcaggccgggcgcagtggctcatgcctgtaagcccagcactttgggaggcggaggcgggtggatccattgaggtcaggagctcaagaccagcctggtcaacatggtgaaaccccgtctctactaaaaatacaaaaaaaaaattagctgggcgtgttggcgggagcctgtagtcccagctacacgggaggctaaggtgggagaattgcttgaacccgggaggcggaggttgcagtgagctgagattgcaccattgcactccagcctgggcgacagagcaagactctctcaaaaaaaaaaaaaaaagaaagaaagaaatcagaaaatcgaccacagtggtagccacctggcctaatgctgtgtttttgtacctgacaggggtcactcattttaggcacaactccttcattctttgtgaaattagtgagtttccttctacccgtcaccagattcaatatgttctattaatacaccgataaccacaggggaagggcacttgtcgctctcccacctggttaccacagtctccatgggtcttttgccgtgaccacaaataaaggaaacactcatcactagtatctaagtcgggctttacagtaactatgcaccttctgtgtgcttcacctcactctctacttcaaacagcccatggagggaggtattattatactccttatgttgacagtgaagaatctgaggcccagagaggttggggacttgagtaaagtcacacagccctgagaggcaggaccagggttccattcctgctctatccagttccaagcccttgtgttttccattatgtttagtgcctctttgctaacagcaacatctgcaagatttgtgttggttttgatggagaactctagctcatccacatgctagtgcccaagtggtggaggggccacctcagcaggtgggttctgaatgcagccaaggctgtccccgcaatgggtgagactcgctccaactgcccgccctcagagcaggtgcctaagtcctccctggcactggcaggccttacctcacattgctaaattaaagcaatgcaattcctcttgggtaagaggaattcctccttctttactaactgatccccagcaaggaaataaaatgttaggctttaaaaatccctactttgtcatatcagactatattctaaaactatatttgagcgaaacctgtcattgcgtctaatttcaaatatacagaatctccttaagagctgttgccttatttttttgtaaagcctctctgacatcaaatggggagaaatggtggcacctccagacaccctgaaactacacaccatttcttccctgctcagcttctgctcaggagttctgtgagctatgggaaggccattggttgtatttgctacttttactttcatcttcctctgctgtagagccatttaatgttattgtcatatgctgctggtgaggtaaaggtgggtccgggtgccttcccaggggttagaggatgttcaaagggccgatttcagcaggagttcagagggcttatgatggatggtgagagatttgacaaccaccagagcacatgtgctctgaccctctcctgggcattggttcctgctggtaccgggcggttcagaccttcaaataggttgctttcaaaagagctttcaggcacttattgagaattaatgtttaaacagacataatagcctagatgaactcccaagagatctattaaatcttgtgggctgaataaatatctcgtgcaggactgtgcaacagtagcccagagcatcctgcctgtgggcatccacctcccaggtgagggcagtgggaagctggcccgacggcagccagaacttgtttctcacctcccaccagcaaccccccacccaactctgggccccaggcacacgaagcacaagtctcaggggaccattcccacattgggggatcctgagggagcccatcaccgcctcttgcatacaactgtccactaggaggcacgcccagtgtgggagagatgtatggtcttgccttccacctgtaaaaactgcacatatgcaagccatttgcactctggaactgcatgccgtgaaaactcctaatggtgtggaacttagtttgaatttgaaatcacgccgcatgcacaaagggacaggcccaggcccgacctcaggtcatccgcccgctggctgcagagcatccctgggagccaaggcgaggcccgtggagcctgagctttgtgtagctcgagctttgtgtagctcgtgcacttattatgcaccacctcccttcagtcaccactcctcttcctccgccatcctcatttatactgattgcacaccccccgctcaaacaacaatgtccttattatgatgaccatctcgtagtggtacattccattcctatttaaggtaagcccaaagcccacttttggattttctcgactgtccgagaaaagttgtgtaagcgcctgcgttcttctgggtttggctagatagggttgtgtccctctatggaatggagagtgatgtgggcaagggtgtcattttctcgcacaatacaactcactgaggatgcttctgtagaagtgagaaacacgatgagtacattcagaattacaataactcactctcactgggtaacttctcatgatagatttgtatgatcaatacgggtctatttttatgtcaactgaacactgtagggtaccttccagtctttttcaagattgttaaattgagacaagtaattgaataatttgtcctatttttattttaaaaaaagtgaatggactgaaatgttaaatgtgaatgtacatttcttaattgcaacttttctactgagtgtttgcactatactttctggaatcttatttaacaaaaataaagggaaaaaattgcttgactaaa

SEQ ID NO: 37 - DNA, 4926 bp, Homo sapiens
cgcagtctctctctctctccctcctccgggaggaactgccgcgctccggctgactcctccgccggcgggcggggcgggggagggggcttcgggcgcgctgggaaccgcgggacccggacctgggcgccgcccgccgggggacgcgcggcccccgcttccgccgggccccgctgagctctagacaaacctccgcttcagaaataggctgcgggcggccggctaggaggcttggcccccaccccgggacccccgccgtccccgggccggccggccggtgggcacgatgagccaggtgctggggaagccgcagccgcaggacgaggacgacgcggaggaggaggaggaggaggatgagctggtggggctagcggactacggagacgggcccgactcctccgacgccgatccggacagcggcacagaggagggagttctggacttcagtgaccccttcagcactgaagtgaagccgagaatcctgctcatgggcctgaggagaagcggcaagtcgtctattcagaaagttgtctttcacaaaatgtctcccaacgaaactctgttcttggagagcactaataagatatgccgggaagatgtttccaacagctcctttgtcaattttcagatttgggacttcccaggacagattgacttttttgaccctacatttgactatgagatgatcttccggggaacaggagcactgatatttgtcattgactcacaggatgattacatggaagccctggccaggctccacctcacggtgaccagggcctacaaagtgaatactgacatcaacttcgaggtgtttattcataaagtggatggtctgtcagatgaccacaaaattgaaacccaaagagatattcaccagagggcaaacgatgaccttgcagatgctggattagaaaaaattcacctcagcttttatctgacaagcatatatgatcattcaatatttgaagcttttagcaaagttgttcagaaactgattccacaactcccaactctggagaatttgctgaacatctttatctcaaattctggaattgaaaaggcatttctatttgatgtggtcagtaaaatttatattgcaactgatagtactccggtggatatgcaaacctatgagctctgctgtgatatgatagatgtggttattgacatctcttgtatttatggtctcaaagaagatggagcaggaaccccctatgacaaggaatccacagccatcataaagcttaataatacaaccgtgctttatttaaaagaggtgacaaagttcctggctctcgtttgctttgtcagagaggaaagctttgaaagaaaagggctaattgactataattttcattgcttccggaaggccattcatgaagtttttgaggtgagaatgaaagtagtaaaatctcgaaaggttcagaatcggctgcagaagaaaaagagagccacccctaatgggacccctagagtgctgctgtaggtgaggtttcaggaatgtcttttgaaatcagaccttatccatgaggctgctgcgccatgttgcactaaaggaagaggaagaaggagattgggacacataccattgatttgttgttaaaaaaaaaaaattcctgcaaccctcttgatcttctcttttataaataaagtaagcactttgaagcaaaaacttgtatattaacagtgatgtgaaatccattgtcatttcattacacaaatgtaaacttttatggtctgtagtcaaaaaaatcccgtgtgagaactgccaggaattgtacatattttgcactttttcatgtttctcattgaactgaactttgataaaacgacttttctaagctttttttctgtacttggtgtcaaggacatgcatactgtagtccatatctatatggcaatcagaaattaatcaaaaagtgatgcattggtaatgactttttgtaaatttggaaatctttgctaccaattgttgagaaaaatcatttttcagtggagctggaacagattggagctacaagctccaggagcaataagaactgtcccctatttataatgggtgtaaacagttttgtagaataatgctagcaccagacttacctaaaaatttctatagcagtggctgtgcttccctgctcaacggtttttatgaagctgtttacctcaacacacatctctataatcactttatacagagaggttatttctttttgttgcattagtattcttttgaaactttgggaccagatttccaaaatggtgccgaacactggagagaagtaagaatgtcactgaattgtagggtttctggaggcttttctgtacctaccacccagggctaaagtaacatcagaggcctaaagttgttccaaaagtatgtgattggcaactgcagactaaaaaacatagatacaattctggacttttggccctgtgcgatggtctggtgtgctgcatttaaaatgcttattcaggaccagttctttattgctccatgaccatagtgaatagaacaaatcgcagaaccccaccatggagctcaatcctgttagtcacttttgtcacctccacatctccttctcactggtgataacatgcctcatgtactccacttgttcccaccttatgattaagccaagctcagcctgccaccagcatgctctgcaaggctgaagagtcatcctgaagacccctaaaggtcagtgggaaaaggatggctggagagacattacaattagctgtgtaattgtttctgtgaaattatttcacttatgtttactttagactaacaggaaattaagagtcctaaatctacccctatgccaaatcattccaagtagataattttacgtgcatctcaagggttagcaccctaaggcatgcttgtggggcattagaaaatgagatttttttttttttaaagcagagcctcctaagaacatcaaagttggtcctagcaaaatatataaagtccctaaagcaacttatacttgaaactttttttttttttttttttagaggggggcctcattctgttgcttgtgctggaatacattggtacaatcatagctcactgttacctcttgggctcaagggatccttccacctcagcctccctagtagctagaactacaggtgtgcacaaccacgcccggctaattcttaaattttgtttttgtagagacaggatctcactgtgttgcccaagatggtctcaaactcctggccccaagcaatcctcctgccttggcctcctcaaatgctgagattacaggcctgagctactgtgcccagcctaaactttcccacttctctctgtggcttctttccaacctctctccttcctctccccaagtcctgtttctttgaagctggtaactgaatttaagatgatatctggttggtgtttaaggtttgagcctcccaaggttctgtgcattttgaaaggagatttctaaaaataattaaggtgccctaactcctttcctcatgattcctactccgaaacctggatggttaggagcccagggctccctgatttccagagctatatcctgttggacctttgccaacagacctgacacttaggggttattgttataaatctaattctctaatattttttacatgttgtttcactttgaataagcaaatgaagaatcagttttctaatatgactttatcctcaagctagagacactagcctatttggtaaatcacacattacttaggtatatttattactataaccaggttggagcttccatgtttaagctgggtatatgatgggtttttgttaaaatgtgccttaaaaagcctattacttcaagagcaaatgattctttgggggaaaggcaaaaataattctatgacatagggcccaagttcatggtagtaagtgtactctttgattaatcacacgctaatatagattactgcctctaactttgtaagtgtggcaatgacttcttaattaaagaaagatgcaggagttatgtctaagcgttcagtttttcaaatctgtgttattggaaatgtcttcaagtcattttgcattgtatttttgatatgagaggcagcttattgcgatgtgtatggccatgtttcattctcaaatttaattctataaatacaaatcctaaatacatggctacagcaactgcactggaacatttttgcttggttttagggattgagaacttgccttgcaggtttccttcctcaaaaggagcagggcagtcctttccctgttgagtcaattagaatttttacatagaggtgagactgtgaattattttggttattttcagtgatgtagattagtgtgaatgaccagggtggaatgtttttgaaggaatataaagcaaaaactggttgacattcacaaactgttcttttgtgaacatattttggacccttaaatatgactaaaatcacagcaatattgttacatacgggttatatgccaactctgtttgaaatatactctggaaaaacagctgaattgtcttggttattaaagtatggtatgtattcaacttgtacagactggatgtaatttgtaatcaggtatagtccatgttttactttaagcagtacatcacttaataaccattgttaagccattgctttcaagaatgttaactgccaatttaaaagcatgtgtcctaggttcatgctttggtaaagctctcatttcaagtgtattcatagctaagctttctgggagcagaattgtctctttggtgaaaaggaagtacagcctttcctgtttctgaggttgcttaccatacatgtatgtcactgtttcattggccctgttacatccatttggtaaaatttatttgtcctgattaaccagctctcattttatggaaatgatgataaatctcactacttaaatttaatttatgcttttatttttaa

SEQ ID NO: 38 - DNA, 4408 bp, Homo sapiens
agtcgcgggggcggcggggggggggcggaggctccgtggaaatgtgtcggtgacattgaatggggagaccgagcgcgagcgaggcgcgcgcgcgcacacgcgcactcacggccccgctcgctccgagatccccggccacgtaagtaactattaataccgcctcgccgggggatgcgggcgtgctgagcgcggggattggcctcgggcaccgtcggccgtcccctttaatttttaaatacacggtcccctcttttctctggggggggcaagcaagaaatcaaagaaggaggagacaagccgtcaattttctccaaaacaaaccccaccgggcaatttggtctcggggtagggggagacggggtgattgcaaattattccaggacgagatccagttctccagcgggaaaggggcaaaggaacgccgcgcgttggaagggccagggacgcagctccccttgcagcgcccgcaggacccccgcaagctcgtgccggcgaaatcggagaccgccgatctgtcctcgttctctcctgcacgtctggctgcattcggaggaagacctggggcgcgagcgagcggcgacagcatgagcctgtgctgacctccgcgcggcgggccgagcccagggctttgtcgcggtacctgcgcccagcccgcgccgcaactctgtgcccagcttttgcaatcttttgttggcagcgctgaccgcaccaagttaaatgctcccttgcaatttttcttttttttgtttgtttgtttaatttttggagagctcgcgatcttggaaaagcctcagacgccatctacagttaaaacgtaggtaactgccctctcccgcaccccccccttacacgccccccaccctttccaccaaaaaaagggggtgcagcgcggattctggctgccgtgcgtcgccagccggtagacccgtgcttgtttcctttctctttttgtttggcttctaacgcgttgggactgagtcgccgccgtgagctccccgaagactgcacaaactaccgcgggctcctccgccccgtctgcgattcggaagccggcctgggggtcgcgtcgggagccctggcgctgcagctccgcaccttagcagcccgggtactcatccagatccacgccggggacacacacacagagtaactaaaagtgcggcgattctgcacatcgccgactgctttggggtaacaaaaagacccgagttgcctgccgaccgaggacccccgggagccgggctcggagcagacgaggtatccggcggcgcccatttgggggcttctaactctttctccacgcagcccctcttctgtcccctcccctctcgctcccttttaaaatcagtggcaccgaggcgcctgcagccgcactcgccagcgactcatctctccagcgggtttttttttgtttgtcgtgtgcgatcctcacactcatgaacatacacaggtctacccccatcacaatagcgagatatgggagatcgcggaacaaaacccaggatttcgaagagttgtcgtctataaggtccgcggagcccagccagagtttcagcccgaacctcggctccccgagcccgcccgagactccgaacttgtcgcattgcgtttcttgtatcgggaaatacttattgttggaacctctggagggagaccacgtttttcgtgccgtgcatctgcacagcggagaggagctggtgtgcaaggtgtttgatatcagctgctaccaggaatccctggcaccgtgcttttgcctgtctgctcatagtaacatcaaccaaatcactgaaattatcctgggtgagaccaaagcctatgtgttctttgagcgaagctatggggacatgcattccttcgtccgcacctgcaagaagctgagagaggaggaggcagccagactgttctaccagattgcctcggcagtggcccactgccatgacggggggctggtgctgcgggacctcaagctgcggaaattcatctttaaggacgaagagaggactcgggtcaagctggaaagcctggaagacgcctacattctgcggggagatgatgattccctctccgacaagcatggctgcccggcttacgtaagcccagagatcttgaacaccagtggcagctactcgggcaaagcagccgacgtgtggagcctgggggtgatgctgtacaccatgttggtggggcggtaccctttccatgacattgaacccagctccctcttcagcaagatccggcgtggccagttcaacattccagagactctgtcgcccaaggccaagtgcctcatccgaagcattctgcgtcgggagccctcagagcggctgacctcgcaggaaattctggaccatccttggttttctacagattttagcgtctcgaattcagcatatggtgctaaggaagtgtctgaccagctggtgccggacgtcaacatggaagagaacttggaccctttctttaactgagctcatgccccacggagacttagcaggttccaggagtgagcgagggcagcggaaaggagttcttccgggggacacgaattgcctggctgagtagcaagaaagacacactcttaagtttcttggttcagagcaggaaaaccttcaaggagctgactgaccacgtagcatgggggcaagaggcgtgggatggggattggggtgagatggatgggagcccgctggagcttgtcttccctaacatagcctgggagaccaccccttgccacttgggccacttccgcctaccccacttttcattttgttccaaaatagttgcagatcctgacagaatcaaaactctctgcctcaaacacacatcctggcatcgcactgttagcatttaacttcttgttaggattcagggaaggaacagttggccaagaattttttttcttttaaacaagccaaccacctagctggtaattaatgaggttcacttaaaaaaaaaattcggtgcacacagactgacatgaaacctgggtgctacagtaaaagaaaacaaaagtccagtttgtgtctcttaatcgctcacttcaactcatttcttctaaataaactatttaatatcctggtcaggaaatgacatgttaatgctttgctccctgaagggggaaaaaatctgtcctttaacaagctattctgttttgtgtcaattggttcgtggcaggaagctattagaagtcaaacgtccagatgcattactgctatcttagtttaaagggggaaagaaaagggaagaagaaaggaaaagagaaatccaactcctttttcatgttttgcttttgaacaatgagggtttgtgtgacaggcattcctctttgctgagatgatagcaatggcctgagattttagcaagctcctggagtctgatgcttttgcagtactctgatcgcaactaaacatttgtctttgttttattagaaactagtgaaacaaagcaggttgtcccacatgtataaaatacagggcagctatttagttttctttacagagaatgatccttttaaggcttgtaaggccctctggtttggacaaaaaccctcagtagagacaagcgggaaggataattagctgaaagctatgatgatataaataaaaacagctctctatcccaatacgcacctttgtattttcaagaactcttctatttattaaggaaaatgtcacattgtgatgtattaagccagtacttcaattacgggttgacttgggatgacatattacatgctgtagttaacatttataattctttttccttgtttgagtatttctgtctctgaaataaccttttacttggcttttctagatagctttatttgatttcgagtggcaaaatgttttttattacggcttttctattgctgtatgatacagaactcttttggcataaatatttgtgttcccagtacctcacttgttcggatttgactgcctgtatatgttttgtgaaatggtcctgtttttgggtaggtgacacgtggactctagtatgtaaatgttacttgaatctgtgcttcataatagtgtgtggcatgtatgtgcagactcttggatgctttatgcctgcgcagcaggagccctgtcctcacgttcccaggagggcggcttcacccttcgtaaccaggagacaaggcggccatggatttgcccttgattctattttgctaatggaagatagaaaggagagaaggttttttttttttttaacattctgaagatggtgctgtgtcaagaaggaccttttttttcccctctcccctattttttaagtaccttggaggaggagaggttggtgacatgcatggtggggatctatggcctctggtgctttgtcctgtatttggtttaatgtttttgtcctaatctcttcaatcaataaaattgtgcgtatttaactaaaa

SEQ ID NO: 39 - DNA, 4214 bp, Homo sapiens
gggtggggccaaacgacgcgcgttctgtggcgcgcggcctggcgggcgtgcaacggccgttagaggagctgagggagggaaccaccgctcaccgcagacgtggtggctgcagtcagtcttcccgagtgagggatttcgccgcccgctttcaggcccgtttggcttaaataactgtgattgatggccatgcaggagaaatatccaactgaggggatctctcacgtcacttcaccgagttccgatgtgattcagaagggcagttccctggggactgaatggcagaccccagttatctcggagccctttcggagccgcttcagccgctgttcaagtgtagccgacagtggggacacagccattggtacatcatgctcagatattgcggaggatttttgcagctcaagtggcagtcctcctttccagcccatcaaaagccacgtaaccattccaacagcccatgtgatgccttctactttagggacctctcctgccaagccaaattctacacctgttggaccctcttcctctaaactccctttgtcagggttggctgaaagtgtgggaatgacaagaaatggagacctcggtgcaatgaaacattctccaggcctatctagagatctcatgtatttctctggtgctactggagaaaatggaattgagcagtcctggtttccagcagtgggccatgaaagacaagaagaggcgaggaagtttgatattcctagcatggaatctaccctcaatcagtcggcaatgatggagacactttattcagatcctcaccaccgagtccgcttccacaacccaagaaccagcacaagtaaggagttgtacagagtgttgcctgaggccaagaaggcaccgggcagcggggcagtgtttgagcggaatggaccacattctaatagcagtggggtcctccctttgggactccagcctgctcccgggctctccaagcctctgccctctcaggtgtggcagccgagtcctgacacttggcatccccgagagcaatcttgtgaactcagcacttgtcggcagcagctggaattgattcgtttacagatggagcaaatgcagcttcagaatggagccatctgccaccatcctgctgcttttggtccttcactgcccatcttagagccagcacagtggatcagcatcttgaacagtaatgaacaccttctgaaggaaaaagagcttctcattgacaagcagaggaaacacatctctcagctggagcagaaagtgcgagagagcgaactgcaagtccacagtgccctcttgggccgccctgccccctttggtgatgtctgcttgctgaggctacaggaattgcagcgagaaaacactttcttacgtgcacagtttgcacagaagacagaagccttgagcagagaaaagattgaccttgaaaagaaactctctgcttctgaagttgaagtccagctcatcagagagtcgctcaaagtggcgttgcagaagcattctgaggaagtgaagaaacaggaagaaagggtcaaaggtcgtgataaacatatcaataatttgaaaaagaaatgccagaaggaatcagagcagaaccgggagaagcagcagcgtattgagaccttggagcgctacctggctgacctgcccacactggaagaccatcagaagcagagccagcagcttaaggattctgagttgaagagcacagagctgcaggagaaagtgactgagctggagagtttgctggaggagacccaggcaatctgcagagagaaggagattcaactggaaagcctgaggcagagagaagcagaattctcctccgctggacatagcctgcaagataaacagtctgtggaggagaccagtggagaaggtccagaagtggaaatggagtcctggcagaagcgatacgattcgctccaaaagattgtggagaagcagcagcagaagatggatcagttgcgctcacaagtacagagcctagagcaggaagtggctcaagaagaaggaacaagccaggccctgagagaggaggcccagcgaagggattcagccctgcagcagctgcgcacagccgtgaaggagctttcagtgcaaaaccaggacttgattgagaagaatctgacactccaggaacacctgcgccaggcccaaccagggtctccaccttcaccagacacggcccagctggcacttgagctgcaccaggagttggccagttgccttcaagatctgcaggctgtctgtagcattgtgacccagagggcccagggccatgaccccaatctctccctgctcctgggcattcactcagcacagcacccagagactcagctagatttgcagaagccagatgtgatcaagaggaaactagaagaggttcaacagctgcgtcgtgacattgaggacttaaggaccaccatgtcagacagatatgcccaggacatgggagaaaactgtgtcacacagtgaggaattctgggggattcccccagggaggagctgggctgctgagagcctagtccagcaggtttctgccctgacattctcttgtctgctattcccagagaggtctcagaggggaggggagagcctgcatctgggggccaagggctgattagggaactgtgtcctacccacactggcatgttggattacgtttgtcctgttaattcactctagacggtgagttactaattaacttttggcaggtacaacagataagtcctcacaaactgttcccagccctaggctgacatgagagacgaacaggctgtccacctttcttctccatccaatgggatggatccatgttcattcccacttcacaccttggtcctgctgattagagagctcatcagaggggcctggaaaggctgagcaagtaccagtgacaatggccatttaagaattctcaggccccatgtgccagccttcttgggaactgagctggctttctgggttttctcatgcctggtcttactgcttcttcctcagggctcttgttctcccagaagcctcagggtaatgtgttggttagcacgtaactactaggattggggccctagggattatagccaggactctaatctgcctaccatgccatttaacaagagatcccactctccagctgccttgtgtccctagggtcctggccatgtgtttagtgtgctaaactttctcctttgttctcaggccttccaggtagtccccttcctggacttaagagtgcaaactcttctctgtggttctagccttgggcagaattatatcccagagaccacagagcaactgtcaagctgcttaccccctcacccagggctacagcctgtgcccagccctctaatttgtgcctctcttgtgttgggggtggtgggggttattcctttccctttcctgctctggcctccttgaaagttcagagtacccagtacaagtcagctttaaagtacagcttttagtgtttcctgggttgtttctctggggctttagtgagggacctttgccctctggtttttcttgcctcctggtttagggagcatctcacacttgttagtatctggttgttgggccagccgtgcctcctctagatctggagccaggccaggcaggggccacgtgtgggccagtcagccactacaagatttttgctaagctttgggctgttggcagcatcttggacctcatgcctgggcctgaatgaggctctttcttaagtgtttttacaagtttgtgttttatttatggagtgacttatcccttccattcagagcagccccacccagccagcccttcagcctctgggctcctgctgcttaaaggcagagccgcctggttggtctccaccctgtgcattgggagcccagccaccatgctgacgggtatttttcctcataaagtttataaccagttatttatatgaatctttgttatgtccatttgtttgtattgcgtattttgattataaaataaagtatcttaacagactcctcagttttccatacccttccatcaccaccaccacgctattctacccctcactttggcttgttagagccaaacacctgggtgttcagccaggtcccccaggcagcagcgtggaggaacctttggcaggtccagccagcctcatgtccctatctatctctgccacctctgctcctctgtcgttctatagaaccagatctcttcccactcactttctcttgggcaaacct

SEQ ID NO: 40 - DNA, 6201 bp, Homo sapiens
ctccccccagtcggcggcgcttggtgccgcccgggagaaccaggtcatcggtcggttcccgtgaaaacaaaaacaatcggccgcgccgtcgcaggcacccgaacgtcgcgagcggggcctggggacgcggagccgagtgcagcgagcgaacgggagcagcggcgactcgccggggggctagggcgccatggggcaggcgggctccggctgcgcggggctcccccggcgccgcggctagtgcgcccgccgcctcggccgcctcagcctcccgcgccgcccgcttggggaacgaggagcaggacgcggcctcggtggggcccgggccgaacggctgcggacacctgggcgccgaggagccgagcgccgccgcctccggcatggatcagtgcgtgacggtggagcgcgagctggagaaggtgctgcacaagttctcaggctacgggcagctgtgcgagcgcggcctggaggagctcatcgactacaccggcggcctcaagcacgagatcctgcagagccacggccaagatgctgaattatcagggacactttcacttgttttgacacagtgctgtaaaagaataaaggatactgttcaaaaattggcctccgaccacaaagacatccacagcagtgtttctcgggttggaaaagccattgataagaattttgattctgacattagcagtgtgggaatagatggctgctggcaggcagacagccaaaggcttctcaatgaggtgatggtggagcacttctttcgacaaggaatgctggatgtggctgaggagctctgtcaggaatctggtctttctgtagacccaagtcagaaggaaccatttgtggagttaaatagaatattagaggcattaaaggtcagagttctgagacctgctctggagtgggcagtgtcaaaccgggaaatgcttatagctcaaaacagctccttggaatttaagctacacagactgtattttattagcttgttaatgggtggaaccacaaatcagcgagaggcattacaatatgctaaaaattttcagccatttgccctaaatcatcaaaaagacattcaggttttgatgggaagccttgtgtacctgagacaagggattgagaactcaccatatgttcacctacttgatgcaaaccagtgggctgatatctgtgacatctttacacgggatgcttgtgccctcctggggctctccgtggagtcccctctcagtgtcagtttctcagcaggttgtgtggcgctgccagctttaattaacatcaaagccgtgattgaacagaggcagtgtactggagtttggaaccagaaagatgaattacctattgaagtggaccttggtaaaaagtgctggtatcactctatatttgcctgccccattcttcgtcagcaaacaacagataacaatccacccatgaaattggtctgtggtcatattatatcaagagatgccctgaataaaatgtttaatggtagcaaattaaaatgtccctactgtccaatggaacaaagtccaggagatgccaaacagatatttttctgaagagataactttagtttgcaatttgtaagtgaaactgaatcgtgggtgcatttcagaagagaacgttccatataatgcagctaaccaaggactcctgtgtttctataagctaatgctccagaaactttgccaacctgttagtgtacacacactgaggggagtgctcccggtgaatattatcatagggctttattatattcttggtcttcatttctgatcaagtaaatacaccagcagttgtcattcaatgcaggtttttgtacttaattatatggtgatttttttactttttaagagcagaaacggaaattgacctccccgccatgtgtttaatattcctcctgcttttacttttgtcattttcttgataatcgtaagccttgagagtgtttgtgaaaaagttttatttcctgttatgtatacataattaaatgaaaattcttcagaaaaagtttgataaattgaattgtggttatgaaactaatttgcatttttatttgcttaagaaagaaagctgtgatagattccagatatgctttttgatgttttcctctgctccagctccaagaagtcagcacacctgcattttagctctgcatgcagccccagcaggctgcgtgtttaagaatttcattgtttaactggctggtgtgagaagtcttccgttagcatagagtggaaggagtactattgtttggttgggtttttgtttgtttgttttttgtttttgcttttattgccaagaggtgcttgttttaaaagtatgtttaataaaatgaaattctaaagttagaagtgttcttaagttgatatttactctcttggtcttggtagccctattatatcattgcagacacagtgttgtgcatgtgtgtattgtatatgtgcaccagcatcaaacattgtgtatctggaaggaaagcagcatgttccagttctaaaatgcagttaccagacccatcactttaaatccttaaagttagaagctagcaaattttctgtagtgcagaacgtttattgctgtttttgtgtttgaatagtataatgtttgatgcctctcttctgcaaagcgtatcatctcattgactgtgaatctgtatattattctgatggatacagataatgatcttttctcttgtgaggtatcttcatttatgcactgtccaaaaatagccatgtgtaagagtctttctgtatgacgaactacatggaaaagacttctgtggacataattctgaccgaaacccatgaagttacttcagtataagaagaacgttacacggaaatcaccaaatattttgcaactttatttcttctgacatggagtgaacatcaataggaatactttcaaagaaaatgaaaacacagaagcaaagagaaatgtggcacttcacattttaaactacagatggacttggtttgagggagggggaatcacagatttggtgctaagttaattagaaactggcagcgttttacagtagtacaccagcctggatgttttttctaaaatgtttacctgggagagctggggtttgtttgtgaggagaaagagtactgtggaaaacctctgcttgagtaccatgtggccaggcctatgtggatggctactccgtgctgtgcggcttcaccagcggttgggattggcccagcttggagtgcttgtgtggtccaacctcagtctggccccatagcgacttttgccccatgattctgcttcactgttggaatcctctttgaagttccccctctctttgctaaagcagtgaaggaagagaacagagacaaactctttggactgtgaaagagaaggtagagaattccaggcaacagtctgaccaagggtgtaaaccagtttattatatatatatttttcctttgaattaaaacctagagtgttgtatttttctttctttctttttttttttttttttttttaccctttttctccttaggccaagtttagcttattcttatctttccacccaaacacctacacaacgtttaggcttcctgtaaggtttgaatgagacagatgtactctgaaggctggtggtaaatgtgtttgatgaccagactcttcatacagtcggcttgggccactttaaaggacaaaagccagagctcagctttatccctctcccagtgctgggagccaaaaaactgttgacggttttttgtgcagctcaagaaaactttgaaaagaacatgctttaactgaagcattggactctgcagctttctgtgtaaggcccgtgtactcccactgggcagggtgaggaccaaaaatctgaaactcttatgaatctgacatattatatggaaattatatcttgtgaccgtcttcaagtgcatggacttaaaattcatgagagactaaatgtgagggagaggtggatttaaagaggccagaccttaaccaaagatgctgagatacagcattctgtcccccctgccctagaaactccataaatgctgtcacaaccctatcatcgctgatgctttctgcatgtcagcagtccaggaggatgctttttgtctctctttgcctccactttacaaaagataatatgatagaggcaacgtttataacagtcacatttaattataatgtacatcaaaggcagaatttcagaatggtttcttaaatttccttgggaaccgtttccacatatcagttatagacaaaggccatgggactatgctaaaccaataaaaccttattagcaaatctttagattctgacttagccagagcatctgagtgttcaagtacagttttacagtggctaaggttgtctcttgatcttttttctccgttgtgtgatcacagatgctatttctgttttattggtgattatacgagacttctaatacataaatgaacgggtattggtgcctctttattttaaaaaatttgaagaaaagagccacctcatattcatagggtgtgtattttttgagtgtgagcatttaattgaaaataagaaagctatgaagtaaatgttaacttctctgtagcagctaatgcatagagacactaaaacccacaccacattttgtgggaaatgaggatcctgatcctcttttgtcctctccaggtagtctcgcaggttatgcagcttaagttcagtcttctttatgctgcgattgatttccacctcagtggcttagcctttgggacagtggatactgcaacagccaagaactcttggttatccgcacaagctgctggtagactacattagccctctggttttccagctcaacctctgataaagtggactgagagccacgctgctcagtctgtttcgtcagccgactcaggttattttcagggaaggcatggaggcatagtttggttagtttcatcactaggatgtataaggtgacgacacaaaccaaatacctttctttcatcacttaactatacgtactttatctctggtaacactagaatgctgtggtcttgagggaatgttagcaaggaacacatagaagatttggtgtttcataagcctgtctaggtgtggcaggttttgtgtggtacactgatgtttaccataagcaggtacaagcttcatgaaccgttcttaatgaactataattgaatagataccaaaaatagaatgacaaatgtattttaatagcagatgaggcagttttaggatgaattttccactgttgattttacttcaagacatagcaagagaaacaaaattttgttttcaagacatttccactgcagtttcaagctgtagtgggcatatgcttcatttacttccaaagaggcaaaagcagctggaattggcttacagcacatgctttgtttcatgttatgggtgaggacctacatacactcttactttagcagtcacttaaccttctccagcaaggcagttgtggggttcactaggatttagtgcctgatcttttttttgggaaggggcgggaatgaatgtgttggggctgggagggaagcagaagaaaatgggagtgtgagtgagtgtgcatgtgtctgaagttcaccattgcccccacctgcacctagcaaggaacaggtgtttgatgtattttgctcatgactgcagtatgcatgtatttttttccttctctgtgttttctaaacttacactaaaggattcatcaaatcatcttgttcagatggctcaggattgtatttattttgcttaccccgtgctcttgggttctatagtatttctataattatgtaacgagaatagtgttgcactgtaatctatcatatagagctatatgtatggaaaattttgatcaattttttaagaaatgtatcctgtttgcaaaggcacagtaaagttgcatcttatagactataggcaataaagctaacaataaaccttatttaacacaaaccacatccatatcctctgttcatttgattttggaaaaagtagcatatccagtagtttcagggaattcattttaactttaagaattctgatatatttaatttataaatttcggactgatataatagagttttggaaaactataagaaatgctttgttaatgtgtgtattcctatgtaaaacacatggcttttcctgtgtatatttttaaaaattaaagaaatgcacatttaaaaagtgaaaaaaaaaaaaaaaaaa

SEQ ID NO: 41 - DNA, 4840 bp, Homo sapiens
acttcctgcgacacgcaggaaacaaaggctcccagttcacgcgataataagaccaactcgatactcactaggatttgtagtctttcgtctttcttcgggtttactcttccggtcctagggtcacacccaccgcagggtctggcttggtacagttgggtgcatgcagaagtaggtggagctgctgttgcagccttgagagagttttattgtaaaactcttgtaatttatagtaatcggaggggaaaacacctcttccttttaattgctctgaggaccgctgccaaagaaacgcagtagatccgctccctcttgggggcggggagaaagaacgggttgtgtccgccatgttggtgaagtcaagcgaaggcgactagagctccaggagggccagttctgtgggctctagtcggccatattaataaagagaaagggaaggctgaccgtccttcgcctccgcccccacatacacaccccttcttcccactccgctctcacgactaagctctcacgattaaggcacgcctgcctcgattgtccagcctctgccagaagaaagcttagcagccagcgcctcagtagagacctaagggcgctgaatgagtgggaaagggaaatgccgaccaattgcgctgcggcgggctgtgccactacctacaacaagcacattaacatcagcttccacaggtttcctttggatcctaaaagaagaaaagaatgggttcgcctggttaggcgcaaaaattttgtgccaggaaaacacacttttctttgttcaaagcactttgaagcctcctgttttgacctaacaggacaaactcgacgacttaaaatggatgctgttccaaccatttttgatttttgtacccatataaagtctatgaaactcaagtcaaggaatcttttgaagaaaaacaacagttgttctccagctggaccatctaatttaaaatcaaacattagtagtcagcaagtactacttgaacacagctatgcctttaggaatcctatggaggcaaaaaagaggatcattaaactggaaaaagaaatagcaagcttaagaagaaaaatgaaaacttgcctacaaaaggaacgcagagcaactcgaagatggatcaaagccacgtgtttggtaaagaatttagaagcaaatagtgtattacctaaaggtacatcagaacacatgttaccaactgccttaagcagtcttcctttggaagattttaagatccttgaacaagatcaacaagataaaacactgctaagtctaaatctaaaacagaccaagagtaccttcatttaaatttagcttgcacagagcttgatgcctatccttcattcttttcagaagtaaagataattatggcacttatgccaaaattcattatttaataaagttttacttgaagtaacattactgaatttgtgaagacttgattacaaaagaataaaaaacttcatatggaaattttatttgaaaatgagtggaagtgccttacattagaattacggacttaaaaattttgctaataaattgtgtgtttgaaaggtgttttttgtttttgtctttttaaactactgttaaaagaacagcttatgataagtaatatgtttaacttagagaagaattttttcctgtaccaaagttggcatattgcattctaaataagatgctaaataagagttaaccaacattcaacatgaccttaaaactgctgggttttgtattaattaaattataattggcactgtgatttgaaaaatttatagaaaaaaaggtacagggcaagtttttaaattaaaactttctatattttgttttaccagtaaaagtgagcttatcatggcctctctcataagaatgattttaaaataggttgtaaaatattttgaaaatatttgaatgtgaagtaccattgagtcatccaaactaggtaaggcctcaagtactttaaactagtaaaatctagtagctgataatattcacctaagtaagtgttgtaaaataattcagagttcaggacctagcttagataaatgtatactactctttttctcataataaaaatcttacatttccaacttcaaaattggtgcttccatatttgttgataaccaaaactcctaaggttttttgttttctttttaactactttccaaatgcatactatacctcagaaatagtgtatcaatatagtgggctttttttttcctcttcataaacccacagtaaaatttaatcacaggaaactacttatatcttcacactttgtattgataacttaaaatggcatcagtttatcttagacatcagcttgctttttatctccttttttagtgagtgaaatagagcaactagcatgcctgtgttcccagctacttgggaggctaaggtgggaagatcaattgaacctaggaggttgaggctatagtgagctgtgattgcacgactgcactccagcctgggcaatggagtgagactcctgtctctaaaacagcaacaacaaaaataaagcaaccatagtgcataagggaaattaaatgttccctatagaaatatgtgtatgtctgtgatagtggtatgcaaatgctaattattttataaaataaaagttcagaactattcttatcattgccacttgaacaattaaagggtttgctttatttcactaatgtttaataggaaccctttgcttcaaacagctttgttgaaatcatgtaaaaatttgttaatagagaatcaagttatttaactcaacttatttaattcaagcttgtgatactaacatacaaaggtagcataaaccaagtcataaattgctgtaatctttcctgtaaagtaatagctacttcatgatttttttaaaaatttcatttttttgctatttaggattgcatttgcttggctcctagtaacaattcttttacagtattagcactctctttactaaggaatgcctcccaaggaaatgcaaaggtaggaaaagtctcttagaatgcccatgaggtatttaaaacagatatttatgaaaatctttttgtgaatgttataaatcttgctagttattttatctttatcttaagtattagatgtagttccttggaattgtcattacatatttatttttttctagtatggtttcaaataactttttgccaacatataatcatcatcaaacattcactgaccatatctattttataactcaaaataagttggacaaataatcattttaataaaaactattttttccaagtataaccactgtcatgtggttcacccttcaccccagatacaaaacacttatttgtgtagcccagttcccatctacagtaataccttgaaaccttaataaattttaaaaatcataaaaataaaatattgtaaaatacaacaaattttggacaaggttacttcatcttcattcattattacctgacagtattaaactactactcaataattttagagtaaacttttctgtgttttctccgtgattttcattgtgctgtcctgacaacatgctccaaactctttgcatcaaattgttttattaacatacatttgtctaccttaaaactagctttattcacagagaaaaacctaaaaggagtctattaaaatgctgctttcagtttgatagttttttttttaatcactctgaccataaactaactgaaattataatggattttttttcctctcccggtcacaacacagatcttctgttcatttgttctctgtctactgggcaccaacctctacaaagaaccagccaaaggctaggtacttgatataaaaaggaatattacattattttctgccctcaagttgctctatctcctgaaagaaacaagtaatatttataatacaatatgataaatgctacaaaagaaatagctgtaaagtcctttggtaaatgctgttgaattggaattcagtaagaactataaactgtagacctttttataatcaaatgcttttgtcttgaaacaaaacagattcctccttatattgacttagcaaaggaggtacaaggacattggcatttgacctgaattatggtgttttattgaatgagctataagacaacatttttaccctttaaaatgaacactgaacaaatgtgttaatggtatctttgttaaaaggaaaacatagctataaataaaatactacatcgaaatccagcactggagttcatttgaaatttgatattttgtgtaaaataacaaacctattaacacagatttttaaaataactcagaatcgtataaagcactttggtacttatttgttctcttttcccttacattctgtgtggtaggtggtattatctctgatttacacatgaagacatccttgttaatgcaatttatttattcattcgggcatttactgtgtgccaacttgcaaaaggaatagaaatgtctgtgatctagatagttctagattgaacatagattttctgccaacaaatcctctctgctgttcacattatcctttgtttaacgtatgaaccaggttactaaaataggataaatcatgtgtcttaaaatatgaaaatagtaaagtctttgaggtcacttgatcttctctaagtagactttataatattgtgttttatctcatttctcaatattagaatacgggtagattttaattttgctataatataggaaatggttcatctttgtaccaaaatattgcattcttctgatatttagacagttggaaactttctaaaattgaggattttgtagtgtatactaaataattgcatattcaaaaaaatgtattctgagtatggtgatattaaacatttttccccaaggaaattac

SEQ ID NO: 42 - DNA, 3186 bp, Homo sapiens
acagcatggagtggggttacctgttggaagtgacctcgctgctggccgccttggcgctgctgcagcgctctagcggcgctgcggccgcctcggccaaggagctggcatgccaagagatcaccgtgccgctgtgtaagggcatcggctacaactacacctacatgcccaatcagttcaaccacgacacgcaagacgaggcgggcctggaggtgcaccagttctggccgctggtggagatccagtgctcgcccgatctcaagttcttcctgtgcagcatgtacacgcccatctgcctagaggactacaagaagccgctgccgccctgccgctcggtgtgcgagcgcgccaaggccggctgcgcgccgctcatgcgccagtacggcttcgcctggcccgaccgcatgcgctgcgaccggctgcccgagcaaggcaaccctgacacgctgtgcatggactacaaccgcaccgacctaaccaccgccgcgcccagcccgccgcgccgcctgccgccgccgccgcccggcgagcagccgccttcgggcagcggccacggccgcccgccgggggccaggcccccgcaccgcggcggcggcaggggcggtggcggcggggacgcggcggcgcccccagctcgcggcggcggcggtggcgggaaggcgcggccccctggcggcggcgcggctccctgcgagcccgggtgccagtgccgcgcgcctatggtgagcgtgtccagcgagcgccacccgctctacaaccgcgtcaagacaggccagatcgctaactgcgcgctgccctgccacaacccctttttcagccaggacgagcgcgccttcaccgtcttctggatcggcctgtggtcggtgctctgcttcgtgtccaccttcgccaccgtctccaccttccttatcgacatggagcgcttcaagtacccggagcggcccattatcttcctctcggcctgctacctcttcgtgtcggtgggctacctagtgcgcctggtggcgggccacgagaaggtggcgtgcagcggtggcgcgccgggcgcggggggcgctgggggcgcgggcggcgcggcggcgggcgcgggcgcggcgggcgcgggcgcgggcggcccgggcgggcgcggcgagtacgaggagctgggcgcggtggagcagcacgtgcgctacgagaccaccggccccgcgctgtgcaccgtggtcttcttgctggtctacttcttcggcatggccagctccatctggtgggtgatcttgtcgctcacatggttcctggcggccggtatgaagtggggcaacgaagccatcgccggctactcgcagtacttccacctggccgcgtggcttgtgcccagcgtcaagtccatcgcggtgctggcgctcagctcggtggacggcgacccggtggcgggcatctgctacgtgggcaaccagagcctggacaacctgcgcggcttcgtgctggcgccgctggtcatctacctcttcatcggcaccatgttcctgctggccggcttcgtgtccctcttccgcatccgctcggtcatcaagcaacaggacggccccaccaagacgcacaagctggagaagctgatgatccgcctgggcctgttcaccgtgctctacaccgtgcccgccgcggtggtggtcgcctgcctcttctacgagcagcacaaccgcccgcgctgggaggccacgcacaactgcccgtgcctgcgggacctgcagcccgaccaggcacgcaggcccgactacgccgtcttcatgctcaagtacttcatgtgcctagtggtgggcatcacctcgggcgtgtgggtctggtccggcaagacgctggagtcctggcgctccctgtgcacccgctgctgctgggccagcaagggcgccgcggtgggcgggggcgcgggcgccacggccgcggggggtggcggcgggccggggggcggcggcggcgggggacccggcggcggcggggggccgggcggcggcgggggctccctctacagcgacgtcagcactggcctgacgtggcggtcgggcacggcgagctccgtgtcttatccaaagcagatgccattgtcccaggtctgagcggaggggagggggcgcccaggaggggtggggaggggggcgaggagagccaagtgcagcgaagggacacttgatgggctgaggttcccaccccttcacagtgttgattgctattagcatgataatgaactcttaatggtatccattagctgggacttaaatgactcacttagaacaaagtacctggcattgaagcctcccagacccagccccttttcctccattgatgtgcggggagctcctcccgccacgcgttaatttctgttggctgaggagggtggactctgcggcgtttccagaacccgagatttggagccctccctggctgcacttggctgggtttgcagtcagatacacagatttcacctgggagaacctctttttctccctcgactcttcctacgtaaactcccacccctgacttaccctggaggaggggtgaccgccacctgatgggattgcacggtttgggtattcttaatgaccaggcaaatgccttaagtaaacaaacaagaaatgtcttaattatacaccccacgtaaatacgggtttcttacattagaggatgtatttatataattatttgttaaattgtaaaaaaaaaagtgtaaaatatgtatatatccaaagatatagtgtgtacatttttttgtaaaaagtttagaggcttacccctgtaagaacagatataagtattctattttgtcaataaaatgacttttgataaatgatttaaccattgccctctcccccgcctcttctgagctgtcacctttaaagtgcttgctaaggacgcatggggaaaatggacattttctggcttgtcattctgtacactgaccttaggcatggagaaaattacttgttaaactctagttcttaagttgttagccaagtaaatatcattgttgaactgaaatcaaaattgagtttttgcaccttccccaaagacggtgtttttcatgggagctcttttctgatccatggataacaactctcactttagtggatgtaaatggaacttctgcaaggcagtaattccccttaggccttgttatttatcctgcatggtatcactaaaggtttcaaaaccctg

SEQ ID NO: 43 - DNA, 4684 bp, Homo sapiens
aagcgaaatgacatttcctttttaaatagctggagtcggggccccatcgagaaatggccgcgtcggcagatttaagtaagtcttccccaacaccgaatgggattccatcttcagacccagccagcgatgccatggaccccttccatgcttgcagtattcttaagcaactcaaaacaatgtacgatgaaggacagttgacagacattgtagtggaagtggatcacgggaaaacattttcctgtcatagaaacgttcttgctgcaatcagcccttacttcagatccatgttcactagcggccttacagaaagtactcaaaaagaagttcgaatagttggtgttgaagctgaatcgatggatttagtgttgaactatgcctacacttccagagttattcttacagaggccaatgttcaagccttgttcactgcagctagcatcttccagattccttccatccaagaccaatgtgctaagtatatgatcagtcatttggacccacagaattctattggggtctttatctttgctgatcattatggtcatcaggaactcggagatcgatcaaaagaatacattcgtaaaaagtttctgtgtgtcaccaaagaacaagagtttctccagttgacaaaagaccaactgataagtatactagacagtgacgatttaaatgtagaccgagaagagcatgtttatgaaagcattataaggtggtttgagcatgaacagaatgaaagagaagtgcaccttccagaaatttttgctaaatgcatacgttttcctctgatggaagatacctttatagagaaaattccacctcagtttgcacaggctatagccaaaagctgtgtagaaaagggaccatccaacaccaatggctgtacacagaggcttggaatgactgcttctgaaatgatcatatgttttgatgctgcccacaaacactcaggaaagaagcaaacagtgccttgtctagatatagtcacaggaagggtgtttaaactatgcaaaccaccaaatgacctgagagaagttgggattcttgtatcaccagataatgacatttacattgcaggagggtacaggccaagcagcagtgaggtctccatcgaccataaggcagaaaatgatttctggatgtatgatcattccaccaatagatggctatccaaaccatccttgcttcgagccagaataggctgcaaacttgtctattgctgtggtaaaatgtatgcaatcggaggtcgtgtttatgaaggtgatgggagaaactcactaaaatctgttgagtgctacgacagtagagagaattgttggacgactgtttgcgcgatgccagttgcaatggaatttcataatgctgtggagtacaaagagaagatctatgttttacagggagaattttttctcttctatgagcctcaaaaagactactggggtttcttaacccccatgactgtgcctagaatccagggcttagcagctgtatacaaggactctatctactacatagctggaacctgtggaaatcatcaacgtatgtttactgtagaagcctatgatattgagctaaataaatggactcgtaagaaagactttccatgtgatcagtccataaatccataccttaaactggtacttttccagaacaaactccatttatttgttcgagctactcaagtgactgttgaagaacacgtcttcagaaccagcagaaaaaattccctttaccaatatgatgacattgctgaccagtggatgaaagtgtatgagaccccagatcggctctgggaccttggccggcattttgaatgtgctgttgctaaactgtatcctcagtgtcttcagaaagtactctaaatgagtagcaggccttagtgcatcactggcatctcattcttaggaaacttgtctttgatacaaaagagtgctgacagtatttcagaaagctgagagagttttatacatggaaaatgggtatgcttaaagattgcagggtagggagggattttccttcatccttgtgacatttcatttcagtaaggaaaagataacaaagtgcaattatcagcatttttttttcctggcataaaattaatcatttcattttataattttgtgataaatagtaactgaggtaccagatgaatcaggacaactatgcactcttataagagcatttagggtattattgggtaaagacgtctaaacttgtttgatgtgacttttaattttaaatacgggtaacaatctgaggcaatatcactaggactttagctgtgacctctctaacacagagaagcactaacttagatcctcattcttaatatttatatgtatctatttttgtgtactgttttcaagtgtactgagatttaaatgtgttctattattagagtagatcgaagaaaaaattagtctcagaaagagcttttagtctgattgtttccatttcccatgtaattttaagttaagctaaagttttaaagtggcagttttctgtcgatgactttttcaagtgctaacactgtctcttttgtgaaaatctggaaaagtgctcatattcacaggtggctggtgctagtctaacttaattcatgtgtataactagatggatttaaatggtctgagcctatgcctatctttcaaattggtgtggatttcatggccatagtactttacctgttgaactcttgtgatttcacaagattctctacttatgtgataggagggtatggccagttattcatctaactggactcaatcttagaatagtaggaacattatacccagtttgcactaacatgggccatttgtagcccaaccttctcttccatctacctgtccattcattattggtacaaggaaaggtaacttatttctcttctgcacagagcataatgtgaagttttatacctacttttaaaattctgctttccagaaacaaaattcctgcagtggtctaatttaatgtctttaagtttcatattacaattaaaacctcattttttttttccatttttgcacttaacagtgatgaatacttttacgttggaatcctccttctagctgaaggtgattgaaaaggaaaagagtgagtgaacagaaccatagctttctaggtactaaagcattttttgcatttaactgatgaaatttctaacaatcatcagttaggaatattaacatgaaggataaaccaacttatttgtatacctaaggcaggcatttggatcagtaacatgttttactaagcctagagtaattcgtaaagggtataagcataggacagattttgccctcaatcacaatatttgtattcacttgaaagcaaactggcatggttcgtattttaaaaatcttgcacaaattgtaatgtgatactgtgaaacaaattgaaaacattgcctctttgcatcacatacctcgtttttcagaaactttccaaactgctttacatagacctctacaagtagggaatgttttctgaagcagaagttaaaatggacagcatttctagaattaacattttaaaatctagtcttagctagatatgtggtttcttcttattggtgttgatagtatgtctgtaatctctgtataaactttgtcaacatttttacctccccagttttatcttctgttttgtttttgtttttatcatcatgatgttttggagttattactgtgtattttagaaatcattctttacagttttgcattgctgaggagagagaaaaaacaatttttttgcaagagatgttcatgtaatttatttttgaaagctttgttgaataagatttcctgccgctttttgacaatcttgtgtatttagaaaaatgtattacttgaaaacatgacatagaacattgagttagcaatttacatgggctgtatgttatataagagaatgacatactgtggctaattcaacagtagatttattcttttagcctgcacaacagttgatcttttggctatgacaatttgtatggagggtacgatctaagttaagtgtgtcaaaagcaaggcttaggatttgttatgggagtagaatatatattgaattttgtatgaagaactatttgtttaaattatatagctgggatattttgccactgttaaaatggattcagaagaggtcctagaaaagtaagattagtgacatgtgtgggtttatatttagatatttaaggtgcattttcatagtgtggtaagaccttaagtaaaaggcacaatgggtactacagaattaaaatgtaggtctaacataatgccagttccactttaactttgtttttgcatttgaagaatgtatgtagcactttcctatatatttgtcacacattgaaaactggactgggtataactatgttataggaaagtagaaattgtattctttattttccatctttgttttctgttctacaaagttgatgcttaagcatcaagctgattttattggtcatgagaacaaatggatgtgatcatgaaggaatcagattccctatgtaaagcagtttaaaatggaattcaatgttcagtgctcaggtatgtagtaagtactgtagtcctgtgggggcaaatgtgtagatatttttaaacattttgccataattgcacaattttttgcatttttacctgatgtcattgtttcttataataaaaccttttctgattgaaaa

SEQ ID NO: 44 - DNA, 4540 bp, Homo sapiens
aggagacgcgtagccgccgtcgccgccgccgggggatgtggccggcgcctgcctctagccgcgccgcctcttgagtaccagccgccgctgcagccgccgccgccgcctagccgtgcggtgccaggccgcgccctccccgggcgcccgccggctcgcatgccgaggggctccggggcgtagctgcgcgcccggcgccgcctccgggctccttcggccccgccatgggctgctgcagctccgcctcctccgccgcgcagagctccaaacgagaatggaagccgctggaggaccgtagctgcacagacataccatggctgctgctcttcatcctcttctgcattgggatgggatttatttgtggcttttcaatagcaacaggtgcagcagcaagactagtgtcaggatacgacagctatggaaatatctgtgggcagaaaaatacaaagttggaagcaataccaaacagtggcatggaccacacccagcggaagtatgtattctttttggatccatgcaacctggacttgataaaccggaagattaagtctgtagcactgtgtgtagcagcgtgtccaaggcaagaactgaaaactctgagtgatgttcagaagtttgcagagataaatggttcagccctatgtagctacaacctaaagccttctgaatacactacatctccaaaatcttctgttctctgccccaaactaccagttccagcgagtgcacctattccattcttccatcgctgtgctcctgtgaacatttcctgctatgccaagtttgcagaggccctgatcacctttgtcagtgacaatagtgtcttacacaggctgattagtggagtaatgaccagcaaagaaattatattgggactttgcttgttatcactagttctatccatgattttgatggtgataatcaggtatatatcaagagtacttgtgtggatcttaacgattctggtcatactcggttcacttggaggcacaggtgtactatggtggctgtatgcaaagcaaagaaggtctcccaaagaaactgttactcctgagcagcttcagatagctgaagacaatcttcgggccctcctcatttatgccatttcagctacagtgttcacagtgatcttattcctgataatgttggttatgcgcaaacgtgttgctcttaccatcgccttgttccacgtagctggcaaggtcttcattcacttgccactgctagtcttccaacccttctggactttctttgctcttgtcttgttttgggtgtactggatcatgacacttctttttcttggcactaccggcagtcctgttcagaatgagcaaggctttgtggagttcaaaatttctgggcctctgcagtacatgtggtggtaccatgtggtgggcctgatttggatcagtgaatttattctagcatgtcagcagatgacagtggcaggagctgtggtaacatactattttactagggataaaaggaatttgccatttacacctattttggcatcagtaaatcgccttattcgttaccacctaggtacggtggcaaaaggatctttcattatcacattagtcaaaattccgcgaatgatccttatgtatattcacagtcagctcaaaggaaaggaaaatgcttgtgcacgatgtgtgctgaaatcttgcatttgttgcctttggtgtcttgaaaagtgcctaaattatttaaatcagaatgcatacacagccacagctatcaacagcaccaacttctgcacctcagcaaaggatgcctttgtcattctggtggagaatgctttgcgagtggctaccatcaacacagtaggagattttatgttattccttggcaaggtgctgatagtctgcagcacaggtttagctgggattatgctgctcaactaccagcaggactacacagtatgggtgctgcctctgatcatcgtctgcctctttgctttcctagtcgctcattgcttcctgtctatttatgaaatggtagtggatgtattattcttgtgttttgccattgatacaaaatacaatgatgggagccctggcagagaattctatatggataaagtgctgatggagtttgtggaaaacagtaggaaagcaatgaaagaagctggtaagggaggcgtcgctgattccagagagctaaagccgatggcttcgggagcaagttctgcttgaacctagccgacggttatggaaacccattgacattccaaaacaatatatacacataactatgtatttgtgtgtgtgggtgtgtgtatatatgtatatgtatgtgtgtatatatgtatatgtatatacacacacacacataaatcagccaaaatcagagaaaaggaacagggatttaataccttttttatgcttatttttgtcaaacatgtactcctttcatacgggtggcttttacaaggcaacttccgtcatttaatgttttcaactgtaattgtcttaatggaaatgttaaaattcatatctgattaacatttttaataacttagaggagattttaactttatttaaaaataggtaaaattattgtacctaattatgtctaaagtttattcaggggtaatttccctgatgtctgtataaaatcaagatcttattttactgatgcataagtcctagtgggtcaagactaggcatatgctttcagataaataaggaattactccaatcagttttccccaatcaaagaagccatgtcattttacttttagaaacatacaattgggcccaatatgggaattttcataatagttcatacatttgtcagccaacattaaaaggtaaccaactcctcaggtatttgtagtttaccctaacgcttctttaaaagaaagtaggtaaaaaaagaaaagggtagataatctttcgtatgcaaacttttcccttatattttgtctttctttcctttttgactttagtagcatcctccacacatttgtgtgcctgatttgaaaggaagctggggcacccagcgagtttagcctttaagtttctgtgtattgatttgcagattaagtaatgctgggaggaataaagaagggacagaaacatggaacataaagcattgaaaattccggtgcttgggcttcggcttcagagtaacgtcagtggcttagggttaaacggccattttattcaaatgcttgctatacaatctgaaaacacactggcaggtgctcctctccttggcaattcattgagtatccagagttctacgatgtttaactgaagaattggctaatgttttgatcctccagtgtgactgttgtttttgtttgggggtgggtttggggttttttgcttttttattcctgaagcttaccagatatgaatggctaatactccattgttctgcttgttgtaatggtgaatgctttaagaaaaaaaagtgtaatttgctaagaataattcatgatctgtttatgcgataactcctttttgttacaatttttttaaaaaaagctatttttgttaatgtaaagtaaatatttcagagcaaattttttaaacttattgcactaaatacaggctctgtacaaaaaaaaaaaaaaaaaaaaagcctcagcattttatcattccatggaaggagaatcttttgaaagaaagcattgcctcctaccagaactagacagtgaattagatcggtattatggaaatgcatacaagtaatgtcactagggcttaataagcagccgtttgctaatgtgcttcctttcaaagggttggacctttaaattgctgcaaaaggtaaattgtatttttttttaagtattggtgttctttactctagctaggctaaaatttgctaaatgccttggtttcttttaaaagttcatgtaatatttctgatttttcagaatatttgcaataagagtctggattttaaaaaacacatgcatacacacaattaagagctcatgtcttagcaagatctgggaaaccaacattgcgagagtagctattttgaaagaataattctccagaagttaacatctaatatctagtatcaccaaacagtatcgctgttctcttttattcatttgaaatgaatataattatataactaacaattgtccaaatagatgagagagcaaatcatgtgagaaaattcagaataccatctgtttcatagccgcacagattttggactttcacaaacattgggaactaaatttagaattggcaaaagtctagaagatgggtatcaaaacagaagacattccaggagctagcaattttaagaggtgtccctccaaagtgacctgatggaagtcctgaacttggaaattaggttctactcacttggacatccctgcatcatggactgttgctgctccctgttccatatgctcgcaatctcagctatttggaagctaccaggaatgctttctaattatcatttgcaactagaactgtaatcagaaagaaattttgtatttttgtataacttgattgtgtgccattttatataacaggtcctgttttacaaataaattttgttttactaa

SEQ ID NO: 45 - DNA, 3485 bp, Homo sapiens
gcgggccacgtgcgggaggaggggccgccttctggttggcgcccggtgtccgttcctcctatcggcgtaggccccgcgaggaagacaagggcgcgccctggctgggagggcgtggccagagacctgtccatcaccgagtccacgagtggcagcacctaccacaccgcagtaccttggcgaggcggagcaggggcaggcaggtcgcggaagggggaggcggagcaaggccggcgggagccaatcggcctggcggcacgagggggcgggggcggggtcaacgcgcgcgacccaaacacacgggccgggcgcaccctgcagccgcgccgctccgcggccttccggcgcggggccggggaacctcctccccatctgcgcaccccccgccttcgcggcccagatcctcccgccagcccggcccctccttcgcagggggagcgaggcgacggttgccgggaagcgcgcgccacctctccctcccatttttcgttctcccctcgcgcgccacccgtttttcctctttctccgttaataacagctgggtggctgggggaggagggaaggtggccccggcggagtctgggcgggcgcctcccactcagccgccagccgccgtgggagccggaggatggcggcggtagcagcggccgcccgagaggaggcggtgccgagatcgggggcgccgagcgcggcagcagagagcggtagcggcccgtcgtggcgcaccagaaccgaaaccagcggcagccgcacggccacttgagccgccccttcctgctggagccagcgaggggtgcctgcagccgggaccccttcctctccgcgtctcctcgtctcccgcgcccgcgtcaggccgtcggcctcgcccgccgccccaagaagagcgcgccgggcgccgactgcccctctggacgccgggcggcggccctggacgtgcgggggcctctctgggccggccgcggcgcctgggccctgccctctagctcccgcgctcgctcccgccctcccggctctcggggcgcagcgcgcgggcccggcccggggcagggcggacatgggcgccaaacagagcggcccggccgccgctaacggccgcacgcgcgcgtactcgggctcggatctaccttccagtagcagcggaggcgccaatgggaccgcgggcggcggcgggggcgctcgggccgccgccgcggggaggttcccggctcaggtgcccagcgcgcaccagcccagcgcctccggcggcgccgcggcggccgcggcggccccggcagccccggcggccccgcgcagccgctccctcggcggggccgtggggagcgtggcgtcgggggcccgcgcggcgcagtcccccttcagcatcccgaacagcagcagcggcccgtacggctcgcaggactcggtgcacagcagccctgaggacggcggcggcggccgggaccggccggtgggcgggagccccggcgggccgcgcctggtgatcggctccttaccagctcacctctcgccgcacatgtttggaggatttaagtgccctgtatgctcaaaatttgtatcctcagatgaaatggatttgcatcttgtaatgtgtttaacaaagccacgaataacctataatgaggatgtactgagtaaagatgctggggaatgtgcaatatgccttgaagaattgcagcagggagatactatagcacgactgccttgtctatgcatatatcataaaggctgcatagatgaatggtttgaagtaaatagatcttgccctgagcacccttcagattaagcgtcagcttcctgttttataggttttcttgtcttgacaagatgcttgaaaaaccaagaggatatgaaaatctgtctctggagaaacaaagacgcaggcatactcagccagaaatctgagttttgtgagacttggtaatacagagatggacaatcgtactggggtaaaaaaaccctgctgaagagaggacagtgaccacagaactcagtgtaccaaacatgcatacaaaggacacacagggattttgaaaatgctgcacatcccttaatagtcatctacataggtaatactgataaacattttgtattcagacgccaaagttaactgatttaaaagttgatttactttttattaagttctccagagctgcacaactagttatgttttgatttgttttgttttttaatttggggtctctttgttttccccaacataatgttcataatgtttctgcattcatctgttcttaaattgaaaaacatataatttacttcttataaattgaagtcttaaatgtgaaaccaagaaatgtaatcaagcagtaaaaacatctgaatgtagaccatgatctcaagttcttccattttctcccccacgagtggaaaatagacttctacataggaaagctaaaatatgttaatatttttaaattaaaggtttaatatcagaatgcagtccaaagagcaaatcatattacataattacattttaattaaatatagaatattctactgaattgcaatttattaaatattcttatcctcttaaataaaactgctcaacagttaatcagcagtgaatcatcttgcagctatgcaatttaaaaaaaatacagattaccaatttcaagtgctgccagctaaaataactgttttaacgggtatcttttgtttgttcttttcacttaattattttattgtgctttgcatctccaggcagttctctcacatttgggtaaaatgtttagcaggctgtaaacttaagaaaagggtaaaataaaattttctggagaggaacttggaatttgagggagattttatatacctttaaaaactgtaatttaattgggatgccaggtttatagcaatttgcaactttaattttccagataatctggaggttagcatttgataaatgattttttaaagtagatatgaagattttgttaatttataatttattcatgtgttattactgtaattgaaaatgttatagacacttttaaattcagtttgtgtagaaagaaatgtgttaaacaaaattatgttaataaatattcccacataatacatctgaatggttaaaaatactggaagagttgtcagggctacaatagtgaatgtccttttttttaatatcaaaaatatcgataagtaggttttgtgttttcaacgtagggaaaatgttatcagtgaataggtggtgtactttacttggtataatttaaagttgcacagtaagtactgtttccttattttaatctttctttactcataatgtatttaagaatttgctgttttatttaacgctgctactcttaatcttctctaaatttttccccctactttcttgcttctgtttcacattttttaaaagggcaagtacaggagcaactgctgctacccagaaaaatgtgtgtattataaataattaaagagtttttaattgctttctgtatgaaaaaaaaaaaaaaaaaaaaaaaaaa

SEQ ID NO: 46 - DNA, 1717 bp, Homo sapiens
gcgcggatcagcttccagcccagtcggcccggcccgggggccatggagctccgagcggcggatcgcgagcctcctgcgaaccccagcctgcacgcccggttagcattcggccgggagatgcggcagtggaatctggaagggcggtgaaaaacctacgtcctgccctcgcccggcctctccattcgtcccccgggtagagaggtgcccggctcccaccccttcccagccccagccctggagacagcagcccctagactactgagggacagcgacagcatgaaggctccgggtcggctcgtgctcatcatcctgtgctccgtggtcttctctgccgtctacatcctcctgtgctgctgggccggcctgcccctctgcctggccacctgcctggaccaccacttccccacaggctccaggcccactgtgccgggacccctgcacttcagtggatatagcagtgtgccagatgggaagccgctggtccgcgagccctgccgcagctgtgccgtggtgtccagctccggccaaatgctgggctcaggcctgggtgctgagatcgacagtgccgagtgcgtgttccgcatgaaccaggcgcccaccgtgggctttgaggcggatgtgggccagcgcagcaccctgcgtgtcgtctcacacacaagcgtgccgctgctgctgcgcaactattcacactacttccagaaggcccgagacacgctctacatggtgtggggccagggcaggcacatggaccgggtgctcggcggccgcacctaccgcacgctgctgcagctcaccaggatgtaccccggcctgcaggtgtacaccttcacggagcgcatgatggcctactgcgaccagatcttccaggacgagacgggcaagaaccggaggcagtcgggctccttcctcagcaccggctggttcaccatgatcctcgcgctggagctgtgtgaggagatcgtggtctatgggatggtcagcgacagctactgcagggagaagagccacccctcagtgccttaccactactttgagaagggccggctagatgagtgtcagatgtacctggcacacgagcaggcgccccgaagcgcccaccgcttcatcactgagaaggcggtcttctcccgctgggccaagaagaggcccatcgtgttcgcccatccgtcctggaggactgagtagcttccgtcgtcctgccagccgccatgccgttgcgaggcctccgggatgtcccatcccaagccatcacactccacaaaaacatttaatttatggatcctgcctcctgccacgtgctgggtggacctaaggttccttcccaccccattctggcgacacttggagccatctcaggcctcatgacttgaaggggagtggaggggggagccgtgtctcccccctccactccctgagtaattcatggcatttgggggctcaccccacctccaggtctgtcaagtggcctttgtccctggggctgatggcccccaactcaccagcatcatgaccttgtgccagtcctggtcctccctccccagccgcccctaccaccttttggtgccacacttctcaggctggccgccctggttggggcagccgagagcctggggttcattggtgaaggggccttggagttgtgactgccggggccgtatcaggaacgtacgggtaaacgtgtgttttctggaaaaaaaaaaaaaaaaaaaaaaaaaaa

SEQ ID NO: 47 - DNA, 3470 bp, Homo sapiens
ttctgcggcccggcagcggcgagcgggcgcgatgacacaggagtacgacaacaaacggccagtgttggttcttcagaatgaagcactttatccacagcggcggtcctacactagtgaggatgaggcctggaaatccttcctggaaaaccctctcactgcagcgaccaaagcgatgatgagcatcaatggagatgaagacagcgccgctgcgctgggcctgctctatgactactacaaggttccaagagagagaaggtcatcaacagcaaagccagaggtggagcaccctgagccagatcacagcaaaagaaacagcataccaattgtgacagagcagcccctcatctctgctggagaaaacagagtgcaagtactgaaaaatgtgccatttaacattgtccttccccatggcaaccagctgggcattgataagagaggccatctgacagctccagatacgacagtcactgtctccatagcaacgatgcctacccactccatcaagacagaaacccagccacatggcttcgctgtgggaatccccccagcagtgtatcatcctgagcccactgagcgggtggtggttttcgatcggaatctcaatactgaccagttcagctctggtgctcaagccccaaatgctcaaaggcgaactccagactcgaccttctcagagaccttcaaggaaggcgttcaggaggttttcttcccctcggatctcagtctgcggatgcctggcatgaattcagaggactatgtttttgacagtgtttctgggaacaactttgaatataccctagaagcttcaaaatcacttcgacagaagccaggagacagtaccatgacgtacctgaacaaaggccagttctatcccatcaccttgaaggaggtgagcagcagtgaaggaatccatcatcccatcagcaaagttcgaagtgtgatcatggtggtttttgctgaagacaaaagcagagaagatcagttaaggcattggaagtactggcactcccggcagcacaccgctaaacaaagatgcattgacatagctgactataaagaaagcttcaacactatcagtaacatcgaggagattgcgtataacgccatttccttcacatgggacatcaacgatgaagcaaaggttttcatctctgtgaactgcttaagcacagatttctcttcccagaagggagtgaaggggttgcctcttaacattcaagttgatacctatagttacaacaaccgcagcaacaagcctgtgcaccgggcctactgccagatcaaggtcttctgtgacaagggagctgagcggaaaatcagggatgaagaacgaaagcaaagcaaaagaaaagtttctgatgttaaagtgccactgcttccctctcacaagcgaatggatatcacagttttcaaacccttcattgatctcgatactcagcctgtcctcttcattcctgacgtgcactttgccaacttgcagcggggcactcatgtccttcccattgcctctgaagaattggagggtgaaggctctgtcttgaaaagggggccgtacggcacagaagatgactttgctgtccctccttctaccaagctggcccggatagaagaaccaaagagagtgctgctctacgttcgaaaggagtcagaagaagtctttgatgccctgatgctcaaaaccccatctttgaagggcttgatggaagctatctcagacaaatacgatgttccccatgacaagattgggaaaatattcaagaagtgtaaaaaggggatcctggtgaacatggacgacaacattgtgaagcattactccaatgaggacaccttccagctgcagattgaagaagccggggggtcttacaagctcaccctgacggagatctaaaggcctgcgggccacagctccccaggagttcagtgcaggtgtttctagatcttacggtttggcaactgcaggtaaccccagtcagccatgtcgccagcacaggtctatgtcgagggaatgggttccttgcaggttggaggcggggctgcatctggcttggtggtagcatttaatctattgcattggtgtttttcagatgaaagagaaatccatataccattatgtttgaatttcctgatatatacaggatttaaagtgaaaactttattccaagagttaacagagtctctgggaagctttaggacatctgctacgttatttatcaaaatattgggatctctgccttgtgcctacagtgtcgtgggcctgctcgctagcagaagtcagaaaaggcgataggcttggctttaaggatttcgtgcccttgcctgaattcagtacaactccactgcctcacgttagcgggagcgcacctgaagagtacggggggagccctctctcccttaccctctcactctccaccagatgtttactaaacagggcatgttactgaaatcttcctttgcgactttctcggacatatcaactgcctttctcatgaagaattttaatgggttacagtatgaaatcagttaagataaagctgcattgtatataagtgcaatatatttttgaaggtctgtaaatgtgtacatacatgtcttatataaatatataatatataaatatggtgtctgtgtacatatagtgaagatatgcagtaagagctaccttaaagactttccctagacaaaggttaagttattttttgatcgtgtataccaagcagatagaatactgtgcttagtggaacccgctaaaaacctttttctctgtttttccaaacacaggcattctgtagcatagcaaaaccttctcaaatgacagagattctgtttgctgttgagaatgttgttatttggatttctgcactgtttaacaaatgaagtaaaagaaaaacactactgcaatcacgtcttttgttatgctagtatcagtcagatgcacttagagtgaagaaacactgtaattacagcacacagattgcaagtattgcgtaccaagtgatacaactcgaaatgcagttctcatcttcctgttttgagaaatgattattttatcacgcatcagagccttcgtgctttgattatcttgtatgttaacaattctagaaaacattcatgaattcacaaaaatatgttactatggcaggggaacattttgtacacatttaagtatataaaaatactaaaatatgtaattttataacaaagtcacgggtatctttaggttcagggaactagactaggtcattcgtgtaaatggactggtagttacagtcttaggttaaagtattctaatgaagtatgggaactaaattgctggttttctaagataagatatgggatatgggtcatataacttttgtattttttatgaagttgattttgtcttgcgtgttatttttaattgtatcattgaagatgtattttaaaccaaaggaattaaattttatatgtctatttcgtaatatgtcaaaaaa

SEQ ID NO: 48 - DNA, 2058 bp, Homo sapiens
gcacataacgggcagaacgcactgcgaagcggcttcttcagagcacgggctggaactggcaggcaccgcgagcccctagcacccgacaagctgagtgtgcaggacgagtccccaccacacccacaccacagccgctgaatgaggcttccaggcgtccgctcgcggcccgcagagccccgccgtgggtccgcccgctgaggcgcccccagccagtgcgctcacctgccagactgcgcgccatggggcaacccgggaacggcagcgccttcttgctggcacccaatagaagccatgcgccggaccacgacgtcacgcagcaaagggacgaggtgtgggtggtgggcatgggcatcgtcatgtctctcatcgtcctggccatcgtgtttggcaatgtgctggtcatcacagccattgccaagttcgagcgtctgcagacggtcaccaactacttcatcacttcactggcctgtgctgatctggtcatgggcctggcagtggtgccctttggggccgcccatattcttatgaaaatgtggacttttggcaacttctggtgcgagttttggacttccattgatgtgctgtgcgtcacggccagcattgagaccctgtgcgtgatcgcagtggatcgctactttgccattacttcacctttcaagtaccagagcctgctgaccaagaataaggcccgggtgatcattctgatggtgtggattgtgtcaggccttacctccttcttgcccattcagatgcactggtaccgggccacccaccaggaagccatcaactgctatgccaatgagacctgctgtgacttcttcacgaaccaagcctatgccattgcctcttccatcgtgtccttctacgttcccctggtgatcatggtcttcgtctactccagggtctttcaggaggccaaaaggcagctccagaagattgacaaatctgagggccgcttccatgtccagaaccttagccaggtggagcaggatgggcggacggggcatggactccgcagatcttccaagttctgcttgaaggagcacaaagccctcaagacgttaggcatcatcatgggcactttcaccctctgctggctgcccttcttcatcgttaacattgtgcatgtgatccaggataacctcatccgtaaggaagtttacatcctcctaaattggataggctatgtcaattctggtttcaatccccttatctactgccggagcccagatttcaggattgccttccaggagcttctgtgcctgcgcaggtcttctttgaaggcctatgggaatggctactccagcaacggcaacacaggggagcagagtggatatcacgtggaacaggagaaagaaaataaactgctgtgtgaagacctcccaggcacggaagactttgtgggccatcaaggtactgtgcctagcgataacattgattcacaagggaggaattgtagtacaaatgactcactgctgtaaagcagtttttctacttttaaagacccccccccccaacagaacactaaacagactatttaacttgagggtaataaacttagaataaaattgtaaaattgtatagagatatgcagaaggaagggcatccttctgccttttttatttttttaagctgtaaaaagagagaaaacttatttgagtgattatttgttatttgtacagttcagttcctctttgcatggaatttgtaagtttatgtctaaagagctttagtcctagaggacctgagtctgctatattttcatgacttttccatgtatctacctcactattcaagtattaggggtaatatattgctgctggtaatttgtatctgaaggagattttccttcctacacccttggacttgaggattttgagtatctcggacctttcagctgtgaacatggactcttcccccactcctcttatttgctcacacggggtattttaggcagggatttgaggagcagcttcagttgttttcccgagcaaagtctaaagtttacagtaaataaattgtttgaccatgccttcattgcaaaaaaaaaaaaaaaaa

SEQ ID NO: 49 - DNA, 2660 bp, Homo sapiens
gctactcctcccccaagagcggtggcaccgagggagttggggtggggggaggctgagcgctctggctgggacagctagagaagatggcccaggctggggaagtcgctctcatgccttgctgtcccctcccctgagccaggtgatttgggagaccccctccttccttctttccctaccgccccacgcgcgacccggggatggctccgtggcctcacgagaacagctctcttgccccatggccggacctccccaccctggcgcccaataccgccaacaccagtgggctgccaggggttccgtgggaggcggccctagccggggccctgctggcgctggcggtgctggccaccgtgggaggcaacctgctggtcatcgtggccatcgcctggactccgagactccagaccatgaccaacgtgttcgtgacttcgctggccgcagccgacctggtgatgggactcctggtggtgccgccggcggccaccttggcgctgactggccactggccgttgggcgccactggctgcgagctgtggacctcggtggacgtgctgtgtgtgaccgccagcatcgaaaccctgtgcgccctggccgtggaccgctacctggctgtgaccaacccgctgcgttacggcgcactggtcaccaagcgctgcgcccggacagctgtggtcctggtgtgggtcgtgtcggccgcggtgtcgtttgcgcccatcatgagccagtggtggcgcgtaggggccgacgccgaggcgcagcgctgccactccaacccgcgctgctgtgccttcgcctccaacatgccctacgtgctgctgtcctcctccgtctccttctaccttcctcttctcgtgatgctcttcgtctacgcgcgggttttcgtggtggctacgcgccagctgcgcttgctgcgcggggagctgggccgctttccgcccgaggagtctccgccggcgccgtcgcgctctctggccccggccccggtggggacgtgcgctccgcccgaaggggtgcccgcctgcggccggcggcccgcgcgcctcctgcctctccgggaacaccgggccctgtgcaccttgggtctcatcatgggcaccttcactctctgctggttgcccttctttctggccaacgtgctgcgcgccctggggggcccctctctagtcccgggcccggctttccttgccctgaactggctaggttatgccaattctgccttcaacccgctcatctactgccgcagcccggactttcgcagcgccttccgccgtcttctgtgccgctgcggccgtcgcctgcctccggagccctgcgccgccgcccgcccggccctcttcccctcgggcgttcctgcggcccggagcagcccagcgcagcccaggctttgccaacggctcgacggggcttcttggggagtttcttaggcctgaaggacaagaagcaacaactctgttgatcagaacctgtggaaaacctctggcctctgttcagaatgagtcccatgggattccccggctgtgacactctaccctccagaacctgacgactgggccatgtgacccaaggagggatccttaccaagtgggttttcaccatcctcttgctctctgtctgagagatgttttctaaaccccagccttgaacttcactcctccctcagtggtagtgtccaggtgccgtggagcagcaggctggctttggtaggggcacccatcacccggcttgcctgtgcagtcagtgagtgcttagggcaaagagagctcccctggttccattccttctgccacccaaaccctgatgagaccttagtgttctccaggctctgtggcccaggctgagagcagcagggtagaaaagaccaagatttggggttttatctctggttcccttattactgctctcaagcagtggcctctctcactttagccatggaatggctccgatctacctcacagcagtgtcagaaggacttcgccagggttttgggagctccagggttcataagaaggtgaaccattagaacagatcccttcttttccttttgcaatcagataaataaatatcactgaatgcagttcatcctcggccccctttccctccgtttgttttcttttcataatccacttactcccttcccttctactctgcgctggcttttgacagaggcagtaaattaggcctaatcctcactcttttcttcctaatcttcatcaaacaaaaaatgaaaagtctgtctggacgaaggggagtgagcttgagcctttgatatcttgctcccccacccttcctgaaactcttgaaatccagttgccattgagtagcaaagccacgctccccacaggacttggacagagggcccacagggggatgggctggctgtggccaggtttagggcagggggcatttgtcccctccatgctataatccagtggtgccttacatggtgtgtgtgtgtgtgtgtgcgtgtgtgtgtgtgtgtgtgtgtctggaggcacaggcacaaagcattgcttgggttggtcaaatgtcttgtgtcataaatatattctgatgtttcccagcctttccacaacctctaccttcccactcaccttccccagctacaaaaatctgtattatcctcttaaagtaaaactggagttacaaaaaaaaaaaaaaaa

SEQ ID NO: 50 - DNA, 2755 bp, Homo sapiens
cctacccgcgcgcaggccaagttgctgaatcaatggagccctccccaacccgggcgttccccagcgaggcttccttcccatcctcctgaccaccggggcttttcgtgagctcgtctctgatctcgcgcaagagtgacacacaggtgttcaaagacgcttctggggagtgagggaagcggtttacgagtgacttggctggagcctcaggggcgggcactggcacggaacacaccctgaggccagccctggctgcccaggcggagctgcctcttctcccgcgggttggtggacccgctcagtacggagttggggaagctctttcacttcggaggattgctcaacaaccatgctgggcatctggaccctcctacctctggttcttacgtctgttgctagattatcgtccaaaagtgttaatgcccaagtgactgacatcaactccaagggattggaattgaggaagactgttactacagttgagactcagaacttggaaggcctgcatcatgatggccaattctgccataagccctgtcctccaggtgaaaggaaagctagggactgcacagtcaatggggatgaaccagactgcgtgccctgccaagaagggaaggagtacacagacaaagcccatttttcttccaaatgcagaagatgtagattgtgtgatgaaggacatggcttagaagtggaaataaactgcacccggacccagaataccaagtgcagatgtaaaccaaactttttttgtaactctactgtatgtgaacactgtgacccttgcaccaaatgtgaacatggaatcatcaaggaatgcacactcaccagcaacaccaagtgcaaagaggaaggatccagatctaacttggggtggctttgtcttcttcttttgccaattccactaattgtttgggtgaagagaaaggaagtacagaaaacatgcagaaagcacagaaaggaaaaccaaggttctcatgaatctccaactttaaatcctgaaacagtggcaataaatttatctgatgttgacttgagtaaatatatcaccactattgctggagtcatgacactaagtcaagttaaaggctttgttcgaaagaatggtgtcaatgaagccaaaatagatgagatcaagaatgacaatgtccaagacacagcagaacagaaagttcaactgcttcgtaattggcatcaacttcatggaaagaaagaagcgtatgacacattgattaaagatctcaaaaaagccaatctttgtactcttgcagagaaaattcagactatcatcctcaaggacattactagtgactcagaaaattcaaacttcagaaatgaaatccaaagcttggtctagagtgaaaaacaacaaattcagttctgagtatatgcaattagtgtttgaaaagattcttaatagctggctgtaaatactgcttggttttttactgggtacattttatcatttattagcgctgaagagccaacatatttgtagatttttaatatctcatgattctgcctccaaggatgtttaaaatctagttgggaaaacaaacttcatcaagagtaaatgcagtggcatgctaagtacccaaataggagtgtatgcagaggatgaaagattaagattatgctctggcatctaacatatgattctgtagtatgaatgtaatcagtgtatgttagtacaaatgtctatccacaggctaaccccactctatgaatcaatagaagaagctatgaccttttgctgaaatatcagttactgaacaggcaggccactttgcctctaaattacctctgataattctagagattttaccatatttctaaactttgtttataactctgagaagatcatatttatgtaaagtatatgtatttgagtgcagaatttaaataaggctctacctcaaagacctttgcacagtttattggtgtcatattatacaatatttcaattgtgaattcacatagaaaacattaaattataatgtttgactattatatatgtgtatgcattttactggctcaaaactacctacttctttctcaggcatcaaaagcattttgagcaggagagtattactagagctttgccacctctccatttttgccttggtgctcatcttaatggcctaatgcacccccaaacatggaaatatcaccaaaaaatacttaatagtccaccaaaaggcaagactgcccttagaaattctagcctggtttggagatactaactgctctcagagaaagtagctttgtgacatgtcatgaacccatgtttgcaatcaaagatgataaaatagattcttatttttcccccacccccgaaaatgttcaataatgtcccatgtaaaacctgctacaaatggcagcttatacatagcaatggtaaaatcatcatctggatttaggaattgctcttgtcatacccccaagtttctaagatttaagattctccttactactatcctacgtttaaatatctttgaaagtttgtattaaatgtgaattttaagaaataatatttatatttctgtaaatgtaaactgtgaagatagttataaactgaagcagatacctggaaccacctaaagaacttccatttatggaggatttttttgccccttgtgtttggaattataaaatataggtaaaagtacgtaattaaataatgtttttggtaaaaaaaaaaaaaaaaaaaaaaaaaaaaaaaaaaaaaaaaaaaaaaaaaaaaaaaaaaaaaaaaaaa

SEQ ID NO: 51 - DNA, 6655 bp, Homo sapiens
ttcccggacccctgtttgctttagagccgagccgcgccgatgccctcacactctgcgcctcctctcccgggactttaacaccccgctctcctccaccgaccaggtgaccttttgctctgagccagatcagagaagaattcggtgtccgtgcgggacgatgcctgagcaggagagacagatcacagccagagaaggggccagtcggaaaatcttatctaagctttctttgcctacccgtgcctgggaaccagcaatgaagaagagttttgcttttgacaatgttggctatgaaggtggtctggatggcctgggcccttcttctcaggtggccaccagcacagtcaggatcttgggcatgacttgccagtcatgtgtgaagtccattgaggacaggatttccaatttgaaaggcatcatcagcatgaaggtttccctggaacaaggcagtgccactgtgaaatatgtgccatcggttgtgtgcctgcaacaggtttgccatcaaattggggacatgggcttcgaggccagcattgcagaaggaaaggcagcctcctggccctcaaggtccttgcctgcccaggaggctgtggtcaagctccgggtggagggcatgacctgccagtcctgtgtcagctccattgaaggcaaggtccggaaactgcaaggagtagtgagagtcaaagtctcactcagcaaccaagaggccgtcatcacttatcagccttatctcattcagcccgaagacctcagggaccatgtaaatgacatgggatttgaagctgccatcaagagcaaagtggctcccttaagcctgggaccaattgatattgagcggttacaaagcactaacccaaagagacctttatcttctgctaaccagaattttaataattctgagaccttggggcaccaaggaagccatgtggtcaccctccaactgagaatagatggaatgcattgtaagtcttgcgtcttgaatattgaagaaaatattggccagctcctaggggttcaaagtattcaagtgtccttggagaacaaaactgcccaagtaaagtatgacccttcttgtaccagcccagtggctctgcagagggctatcgaggcacttccacctgggaattttaaagtttctcttcctgatggagccgaagggagtgggacagatcacaggtcttccagttctcattcccctggctccccaccgagaaaccaggtccagggcacatgcagtaccactctgattgccattgccggcatgacctgtgcatcctgtgtccattccattgaaggcatgatctcccaactggaaggggtgcagcaaatatcggtgtctttggccgaagggactgcaacagttctttataatccctctgtaattagcccagaagaactcagagctgctatagaagacatgggatttgaggcttcagtcgtttctgaaagctgttctactaaccctcttggaaaccacagtgctgggaattccatggtgcaaactacagatggtacacctacatctgtgcaggaagtggctccccacactgggaggctccctgcaaaccatgccccggacatcttggcaaagtccccacaatcaaccagagcagtggcaccgcagaagtgcttcttacagatcaaaggcatgacctgtgcatcctgtgtgtctaacatagaaaggaatctgcagaaagaagctggtgttctctccgtgttggttgccttgatggcaggaaaggcagagatcaagtatgacccagaggtcatccagcccctcgagatagctcagttcatccaggacctgggttttgaggcagcagtcatggaggactacgcaggctccgatggcaacattgagctgacaatcacagggatgacctgcgcgtcctgtgtccacaacatagagtccaaactcacgaggacaaatggcatcacttatgcctccgttgcccttgccaccagcaaagcccttgttaagtttgacccggaaattatcggtccacgggatattatcaaaattattgaggaaattggctttcatgcttccctggcccagagaaaccccaacgctcatcacttggaccacaagatggaaataaagcagtggaagaagtctttcctgtgcagcctggtgtttggcatccctgtcatggccttaatgatctatatgctgatacccagcaacgagccccaccagtccatggtcctggaccacaacatcattccaggactgtccattctaaatctcatcttctttatcttgtgtacctttgtccagctcctcggtgggtggtacttctacgttcaggcctacaaatctctgagacacaggtcagccaacatggacgtgctcatcgtcctggccacaagcattgcttatgtttattctctggtcatcctggtggttgctgtggctgagaaggcggagaggagccctgtgacattcttcgacacgccccccatgctctttgtgttcattgccctgggccggtggctggaacacttggcaaagagcaaaacctcagaagccctggctaaactcatgtctctccaagccacagaagccaccgttgtgacccttggtgaggacaatttaatcatcagggaggagcaagtccccatggagctggtgcagcggggcgatatcgtcaaggtggtccctgggggaaagtttccagtggatgggaaagtcctggaaggcaataccatggctgatgagtccctcatcacaggagaagccatgccagtcactaagaaacccggaagcactgtaattgcggggtctataaatgcacatggctctgtgctcattaaagctacccacgtgggcaatgacaccactttggctcagattgtgaaactggtggaagaggctcagatgtcaaaggcacccattcagcagctggctgaccggtttagtggatattttgtcccatttatcatcatcatgtcaactttgacgttggtggtatggattgtaatcggttttatcgattttggtgttgttcagagatactttcctaaccccaacaagcacatctcccagacagaggtgatcatccggtttgctttccagacgtccatcacggtgctgtgcattgcctgcccctgctccctggggctggccacgcccacggctgtcatggtgggcaccggggtggccgcgcagaacggcatcctcatcaagggaggcaagcccctggagatggcgcacaagataaagactgtgatgtttgacaagactggcaccattacccatggcgtccccagggtcatgcgggtgctcctgctgggggatgtggccacactgcccctcaggaaggttctggctgtggtggggactgcggaggccagcagtgaacaccccttgggcgtggcagtcaccaaatactgtaaagaggaacttggaacagagaccttgggatactgcacggacttccaggcagtgccaggctgtggaattgggtgcaaagtcagcaacgtggaaggcatcctggcccacagtgagcgccctttgagtgcaccggccagtcacctgaatgaggctggcagccttcccgcagaaaaagatgcagtcccccagaccttctctgtgctgattggaaaccgtgagtggctgaggcgcaacggtttaaccatttctagcgatgtcagtgacgctatgacagaccacgagatgaaaggacagacagccatcctggtggctattgacggtgtgctctgtgggatgatcgcaatcgcagacgctgtcaagcaggaggctgccctggctgtgcacacgctgcagagcatgggtgtggacgtggttctgatcacgggggacaaccggaagacagccagagctattgccacccaggttggcatcaacaaagtctttgcagaggtgctgccttcgcacaaggtggccaaggtccaggagctccagaataaagggaagaaagtcgccatggtgggggatggggtcaatgactccccggccttggcccaggcagacatgggtgtggccattggcaccggcacggatgtggccatcgaggcagccgacgtcgtccttatcagaaatgatttgctggatgtggtggctagcattcacctttccaagaggactgtccgaaggatacgcatcaacctggtcctggcactgatttataacctggttgggatacccattgcagcaggtgtcttcatgcccatcggcattgtgctgcagccctggatgggctcagcggccatggcagcctcctctgtgtctgtggtgctctcatccctgcagctcaagtgctataagaagcctgacctggagaggtatgaggcacaggcgcatggccacatgaagcccctgacggcatcccaggtcagtgtgcacataggcatggatgacaggtggcgggactcccccagggccacaccatgggaccaggtcagctatgtcagccaggtgtcgctgtcctccctgacgtccgacaagccatctcggcacagcgctgcagcagacgatgatggggacaagtggtctctgctcctgaatggcagggatgaggagcagtacatctgatgacttcaggcaggcgggccggggcagggacttgcctccactcaccacaagctgagcaggacagccagcagcaggatgggctgagctagcctccagctttggggacttccgctccctggatatgtccagtcatcctgccctgcagcacgcggccttgtctgggtgcagctgggcttggcctggagaggacggccctgcctgcctcttggcctcacgggaccgtcagcatgggctttgtcttggactctagtccttggctggactgtagaaggtgagaggcgagtcaccctcctcacagacctctgcttggagtatttaggatgactgctgtgaaatggagaacagtttcatcaggaccaaaaaacctcactgggcctttccagagaactgcagacctcactgtcagggtctttctgatgacgcctgtctgtgtgcatcatgtttctgagaccacagtttacctcaggtgtgcctgttgctttcttcctgcatagtctgttcctttcttcgtacatagtctgttccttttctctcctgtgtgcttgtcagtggggacccctcgcaaccctgcctgtcacctgggagggtgggaccaatgtccttgtggtctttgctgctgctctcaggcgcttctccaatgctctggagtgtgcatttcagcttgaacctgcttcctggctcacacatccccagccagggagcttgccacactcttcttcaagttgaggagagttcttttttgcttaaagcccccttctccatggagtgttggcttctcaatagagtgttgttgctgaccagctggagtgagggcctcagagcctgacctgagagtccgtactcggcttcctgtggggtgtaggttctcgcgattcaggacgtccttccatatccctgcccagcctgtggtgcttgaaacgtttgccccatgggaaacgtatgtgtgcaggagcctccctgcacggcccaaggggcttcgttttcagtcttctgactgtcacctcgtggggttcagtagagaattcatgtgactagcgcctggccttgtgtggcttggaggaaatggtactgcccaaataggaggaaaacacagcctccctgagcctgcattctgcacgctgcccaggggcttcagaaaaggagtggccacagcaccccgaagggagcatctgtttacctggcagtggctctcagagcagcagaacgggttcagttttagactctgaagttggttgtgattgacagaaccctttgggagcaaactagtagagttggattaaattctgggtgaaacccttttctcccacacaaaatagttttagtgatttttttcattgtccattacttgccaggggcagttttagcagcacttttgatagattacgtctaatcctcccaaccaaccagcagggtagctattactgtccacattttacaggcaaggaaacaggctccaagaggctgaggactttgcccaggatgacatagccaatggacaagcagtgtctgtcagctgtgaaggcttcactcttattgtccttctaccttgaatagaagttttcctgataagaataaacgaggaaaaggtccttgcctcctggaagaacaaatctaccaggtgatctattcattgtttcaactcagaatgcacttgattcaggaggtcatctgaccttcaccttggatggttagtttcactttttacatatagtttttgcagggttttattttataaaatccaagcgcgctgttgattgtgttttccttgttttcagcccccccactccagcccgcagcacatttccgctgtccgtcagtaattgtgtcctctctttatgcttgcttggggaatgttgttttctgactaggctgatcattatctaaagaatctaattctgttgatttttaaaacttttaggaccataaacgttgtgttcatatatggacatggaaatatttatataattttatagaaaataaccttttagatggtcaaagtgtaaggagtttttttgtcagataatcatttctacttcaaaaacatttcatgcaatattagaataaagttcctgtcattcctctaaaaaaaaaaaaaaaaaa

SEQ ID NO: 52 - DNA, 3316 bp, Homo sapiens
cactctctttctctctccctctggcatgcatgctgctggtaggagacccccaagtcaacattgcttcagaaatcctttagcactcatttctcaggagaacttatggcttcagaatcacagctcggtttttaagatggacataacctgtacgaccttctgatgggctttcaactttgaactggatgtggacacttttctctcagatgacagaattactccaacttcccctttgcagttgcttcctttccttgaaggtagctgtatcttattttctttaaaaagctttttcttccaaagccacttgccatgccgaccgtcattagcgcatctgtggctccaaggacagcggctgagccccggtccccagggccagttcctcacccggcccagagcaaggccactgaggctgggggtggaaacccaagtggcatctattcagccatcatcagccgcaattttcctattatcggagtgaaagagaagacattcgagcaacttcacaagaaatgtctagaaaagaaagttctttatgtggaccctgagttcccaccggatgagacctctctcttttatagccagaagttccccatccagttcgtctggaagagacctccggaaatttgcgagaatccccgatttatcattgatggagccaacagaactgacatctgtcaaggagagctaggggactgctggtttctcgcagccattgcctgcctgaccctgaaccagcaccttcttttccgagtcataccccatgatcaaagtttcatcgaaaactacgcagggatcttccacttccagttctggcgctatggagagtgggtggacgtggttatagatgactgcctgccaacgtacaacaatcaactggttttcaccaagtccaaccaccgcaatgagttctggagtgctctgctggagaaggcttatgctaagctccatggttcctacgaagctctgaaaggtgggaacaccacagaggccatggaggacttcacaggaggggtggcagagttttttgagatcagggatgctcctagtgacatgtacaagatcatgaagaaagccatcgagagaggctccctcatgggctgctccattgatgatggcacgaacatgacctatggaacctctccttctggtctgaacatgggggagttgattgcacggatggtaaggaatatggataactcactgctccaggactcagacctcgaccccagaggctcagatgaaagaccgacccggacaatcattccggttcagtatgagacaagaatggcctgcgggctggtcagaggtcacgcctactctgtcacggggctggatgaggtcccgttcaaaggtgagaaagtgaagctggtgcggctgcggaatccgtggggccaggtggagtggaacggttcttggagtgatagatggaaggactggagctttgtggacaaagatgagaaggcccgtctgcagcaccaggtcactgaggatggagagttctggatgtcctatgaggatttcatctaccatttcacaaagttggagatctgcaacctcacggccgatgctctgcagtctgacaagcttcagacctggacagtgtctgtgaacgagggccgctgggtacggggttgctctgccggaggctgccgcaacttcccagatactttctggaccaaccctcagtaccgtctgaagctcctggaggaggacgatgaccctgatgactcggaggtgatttgcagcttcctggtggccctgatgcagaagaaccggcggaaggaccggaagctaggggccagtctcttcaccattggcttcgccatctacgaggttcccaaagagatgcacgggaacaagcagcacctgcagaaggacttcttcctgtacaacgcctccaaggccaggagcaaaacctacatcaacatgcgggaggtgtcccagcgcttccgcctgcctcccagcgagtacgtcatcgtgccctccacctacgagccccaccaggagggggaattcatcctccgggtcttctctgaaaagaggaacctctctgaggaagttgaaaataccatctccgtggatcggccagtgaaaaagaaaaaaaccaagcccatcatcttcgtttcggacagagcaaacagcaacaaggagctgggtgtggaccaggagtcagaggagggcaaaggcaaaacaagccctgataagcaaaagcagtccccacagccacagcctggcagctctgatcaggaaagtgaggaacagcaacaattccggaacattttcaagcagatagcaggagatgacatggagatctgtgcagatgagctcaagaaggtccttaacacagtcgtgaacaaacacaaggacctgaagacacacgggttcacactggagtcctgccgtagcatgattgcgctcatggatacagatggctctggaaagctcaacctgcaggagttccaccacctctggaacaagattaaggcctggcagaaaattttcaaacactatgacacagaccagtccggcaccatcaacagctacgagatgcgaaatgcagtcaacgacgcaggattccacctcaacaaccagctctatgacatcattaccatgcggtacgcagacaaacacatgaacatcgactttgacagtttcatctgctgcttcgttaggctggagggcatgttcagagcttttcatgcatttgacaaggatggagatggtatcatcaagctcaacgttctggagtggctgcagctcaccatgtatgcctgaaccaggctggcctcatccaaagccatgcaggatcactcaggatttcagtttcaccctctatttccaaagccatttacctcaaaggacccagcagctacacccctacaggcttccaggcacctcatcagtcatgctcctcctccattttaccccctacccatccttgatcggtcatgcctagcctgaccctttagtaaagcaatgaggtaggaagaacaaacccttgtccctttgccatgtggaggaaagtgcctgcctctggtccgagccgcctcggttctgaagcgagtgctcctgcttaccttgctctaggctgtctgcagaagcacctgccggtggcactcagcacctccttgtgctagagccctccatcaccttcacgctgtcccaccatgggccaggaaccaaaccagcactgggttctactgctgtggggtaaactaactcagtggaatagggctggttactttgggctgtccaactcataagtttggctgcattttgaaaaaagctgatctaaataaaggcatgtgtatggctggtc

SEQ ID NO: 53 - DNA, 9515 bp, Homo sapiens
cacattctgaccgccagggaacactggtagttctttaggtggcgtttgttgctgtgaaaggcagagaatgcagcaagtgcccttctaaagcacttcagactggggcttcttttgtaaaagctccccaacctgaatgaccaaatgcgggctgccaaggttatttcttccttgaggcagaaaaaaagaaaactgtgattgaagaggacaagtcgtacaatggtggaggaataggttcttcaaataggatcatggacttcttggaggagccaatccctggtgtagggacctatgatgatttcaatacaattgattgggtgagagagaagtctcgagaccgggataggcaccgagagattaccaataaaagcaaagagtcaacatgggccttaattcacagtgtgagtgatgctttttccggctggttgttgatgctccttattgggcttttatcaggttcgttagctggtttgatagacatctctgctcattggatgacagacttaaaagaaggtatatgcacagggggattctggtttaaccatgaacattgttgctggaactctgagcatgtcacctttgaagagagagacaaatgtccagagtggaatagttggtcccagcttatcatcagcacagatgagggagcctttgcctacatagtcaattatttcatgtacgtcctctgggctctcctatttgccttccttgccgtatctcttgtcaaggtgtttgcgccttatgcctgtggctctggaatccctgagataaaaactatcttgagtggtttcattattaggggctatttgggtaagtggactctggttatcaaaaccatcaccttggtgctggcagtgtcatctggcttgagcctgggcaaagagggccctctagtgcacgtggcttgctgctgtgggaacatcctgtgccactgcttcaacaaatacaggaagaatgaagccaagcgcagagaggtcttgtcggctgcagcagcagctggtgtatctgtagcctttggagcacctataggtggagtattattcagccttgaagaggtcagctactattttcccctcaaaacattgtggcgttcattctttgctgccttggtggcagcattcactctacgctccatcaatccatttgggaacagccgcctggtactattttatgtggagtttcacaccccatggcatctctttgagctcgtgccattcattctgctgggcatatttggtggtctgtggggagcactgtttatccgcacaaacattgcctggtgtcggaagcgaaagaccacccagttgggcaagtatcctgttatagaggtactcgtcgtgacagccatcactgccatcctggctttccccaatgaatacactcggatgagcacaagtgagctcatttctgagctgtttaatgactgtggccttctggactcctccaagctctgtgattatgagaaccgtttcaacacaagcaaagggggtgaactgcctgacagaccggctggcgtgggagtctacagtgcaatgtggcagctggctttaacactcatactgaaaattgtcattactatattcacctttggcatgaagatcccttctggcctctttatccctagcatggctgttggtgctatagcaggtcgacttctaggagtaggaatggaacagctggcttattaccaccaggaatggaccgtcttcaatagctggtgtagtcagggagctgattgcatcacccccggcctttatgcaatggttggggctgcagcctgcttaggtggggtgactcggatgactgtttctcttgttgtcataatgtttgaactgactggtggcttagaatacatcgtgcctctgatggctgcagccatgacaagcaagtgggtggcagatgctcttgggcgggagggcatctatgatgcccacatccgtctcaatggatacccctttcttgaagccaaagaagagtttgctcataagaccctggcaatggatgtgatgaaaccccggagaaatgatcctttgttgactgtccttactcaggacagtatgactgtggaagatgtagagaccataatcagtgaaaccacttacagtggcttcccagtggtggtatcccgggagtcccaaagacttgtgggctttgtcctccgaagagatctcattatttcaattgaaaatgctcgaaagaaacaggatggggttgttagcacttccatcatttatttcacggagcattctcctccattgccaccatacactccacccactctaaagcttcggaacatcctcgatctcagccccttcactgtgactgaccttacacccatggagatcgtagtggatattttccgaaagctgggactgcggcagtgcctggttacacacaacgggcgattgcttggaatcattaccaaaaaggatgtgttaaagcatatagcacagatggcgaaccaagatcctgattccattctcttcaactagaatcatagagttctggatgtaaagcgggaaggacattacagaccatggatatgttgtattaactgggtacccaaaacacattttccatatttggatggtgaagtcacattagtgtgttgtctctttcctacaagttaaccagttgcactacataatctctggaaattaattttctctttaggagaaattatagttaggcttccatgatgttacattaggaagatatcatgaaagaataaataagattgctatggtttaattatatttgctttttaaaagatttttttaacttaaaaagtagttagccaatatgcaatcactgaaaactatgcaagagaaattccaaccgtcctgacctataacctgtaggaaaccgacgaaaaagtcactcttttgggatctaactgttgttactggaagacgaagtgtaaactaaggggctttgcttttcaaaccagagaaaggaaagccagaaggaaaagagtaatggtattttctagactgtgaagattcagttcaaatgttatccttgttcctgttacaatatttagcattattagtttgttatgtgtgtatgtttatgttaattttaatttctgattataagacaatgctgctttggttaatctcttctaaatgaatttagagagattgacttttatagcttgcttgttgctggtactcttttgaagtgcacaaagataagttatagagctttctccttgtctgcaaaaacggtaattttccaggtggcatttgttagctggtagacaaggactttgccgtgaatttgttagtagcaaggaatgatttcttccagcttccttgaaatgaataattagtaaacttctaagcaaagtcaatgactaggagtttcacatgtttgtgaggtcctaactaattctcttacccagatgccacctccatgaatgatggtgctttaggcttctggaatatgtaaaaacagcaaagggaaccaagtctagactgcatactggtaaaccagggaagactcagaactgcatatgcatcctcatgcattcctttgtaaagaccaccagtactaaaataactggacactcattgtacctcccagcgataagtatgtgtaacaggccagtgtgttgtccccatgatcatgaattaggcttgggatgcttccaaatatattcaaggtgttggaacaggataggcagctgtgactccctcaagagtccttagaattctaaataaaatgcagagccatcctaagacacaggggtatggacaaggcctggtgacaccaaaggtgcttgtatccaattgaaaaggtgcctgtctcaatttcataccacctttattgcagttaaaaaaaaatcacactctggggacacttggtggaattacagagccaccatcatcattccaaccactatttcattttctgtagttttacctgtgtgcaattactccccctccattctgttccacttcttactccttagtaccaaatcctctgtttgggattgagcgctgctcctggttaatcattcctactacaaaaaaaaataactcccagggctagttaaattgtaaaccaaggctcagcagtctcacaacacatggaccagaggtgacacacagccatttcctttgccatgtggcccagttgctgctgccatgcctccatttccacactggatgcctacggcagtgagatttcactgccggggtaagagttcagcctggatgattttatagctctgttcctagcacttctcatcatccttccagcccagaatcagcggtcattctgcatattcccaccaaccctctacccccaaacacttcagtgtacctcattttaagagttgctgatccctgattctaggacgtttttacccatagttcttgtctttccaaaatctgaaattcttttttttgctcagaactgggtagccaagggttattttatttttatctttaaaataatcaaggcagtcgctagagtttctccttgtgaatagatcactctagcattttaatgaaaaagaaaaaaatctttctggggtatgttgtatcatagtaatggctcagtaaccacatattttgtcctttccatgtcactgattccttcatatgagactatttggcttgactaccctgtatattgtgtagaaatcaaagttcttatctgtacatttctggtccaatacctgtcttattagttgtccttccccactaaagtttgcaaaacagaaaatgttactatttctggtatttaatgacaatgaaaggtttggtcatatttcatagtgcagtagcgataaggagggtgtctcaagtttgcttttgtgtttcttctaggctttgttcttgattttagacagatgagccagtgttaaggtgctacttcagagaataaattagagaaatcagataacactgtgccaaggtatactttgtagatgctaagcaccgattggccctccagagaatgacaatatccctttgatacctcactcctgatcaatctcattcattaacctcagcttctcaggaatccttgtagcttgtatgctagaagtagctatggtatatggtatccactatatgtccagtcctatggtttggctcaaaggttggctaattgcagctagagctctcaactgctagctcagcaccttgacatttgaagtttcttgtcttgaggagaaggaaaatgttctttctgccattgccactttaacagttggacatgcttaagcaacaaatacagccagtatagggaggactgtcagtagcatcaaatggccacatacctcaatggcaaaagactagatggtttgtgatttaaaaattaatgagtcgagatgagactattttggtattaaatgagaaaattgcctaacacaagggaagggtttacaaaagaatgccaattagtgtttcaacagagttaggattttccaagtaagagtagctggtagccatccagccataaaaggaacgagagtctatagatttgtaaaagtaaaactgctatattttgtatcttcaaatcttcaatataaagaatttaaagaacctgaaacagttaatgcatgattcgttatattggagggaaaaagcaggggactgataatacaaaataatggcaactttaaagatcatttctacgtggatgtttggttagaaacatattccaatgctctcctctttctctggccacagcatcctggctcagcccagctgtggagtagaggtggtaagatccacagaacagatatcctctggtagataagctgacattgatgatactttgaatttaccagctggtgaagcaaacgattaatttgtgattgaactgaaaagcagttgaattgttttgacaccagaggctgaatctaaaccctttacaggaagagcagagcatactatacatttcttagcagatcttcaattctgtttgaacatgatgaagtaaccagggtttagtgagatctaaggccgtgaagtaattcacaaccaagatcttatgaacgcattcagatgtgaggggggcaaatatgttttcaaaaacttagtgtgcaatagagtccattatagaaattaaccactgctatatgttttaagtagttcaatcacctgttgtggttcagtcttgattattgtttattttgttaggtgataagtaggaagatgcacttgttatcccacactatctcttgttttgttttgttttgtttttaaataatgaacagtgcaatctttgaacttgagtttttaataatgatagcaaagacaatggtgagaacttgaaacagccagcatattttatattgccaaagtacttactgatgactgaccacactgtcttgtgaggaactgggtcccctgcactggatcagagccaaatgcaagccacccatcagttcagaggaagcaggaaaacatcttttgggtggtgcatagaacattgagctcttaaaaacccggagaaaaattaggaatttagaaagtaagtgggaggtagaatattgagtccttttttaaaaaaaagaattgatgtctaaatatgtagtctgaacttaagtgtcctaaaaccttgttttttgtttttttgttttttgaggagtcgtcttgctctatcaccaggtgggagtgcagtggcacaatctcggctcactgtaacctctgcctcctgcctcccgggtccaagcaattcccctgcctcagtctcccaagtaggtgggactacaggcgcacaccaccatgcccagctaacttttgtatttttagtagagacggggtttcaccatgttggccaggatggtctcgatctcttgacctcgtgatccacccatctcggcctcccaaagtgctgggattataggtgtgagccaccgcacccagccaaaccttgatttttttagccacctctgggattgcctgggttccctttggagaagaaactaaaagttatggccatagaaaaagccctggtaagaaaatatttgaatggtgtaagatggtggaaggaaagccatcccacacccctacaacatatgttctggcatttataaactgcttgattgtgtgcctcaaggggagaaaaagtcaagcaatgcttcaaaggccaggctttctaagcaaatgagtggttcaaagcagtgtttggctcaagggcagtctggttttatggatagggccgacccaagacatctgctcatgaagaaatgtggcatctgttgccatttcctaaactataaggtttagatagattgtcttgaattttgatagcaaatttttttaaatttatatttctgcctcctcgtacatccttatatatggaaaaaaaagtaagagttcctcagatcagagctcagtagctgtgtcaatttgaagttcaatcagtgtagttgtcctggggtgatcgctgactctgctctgtttcatatttcagttgcttgctccaaggagagaatttctgagaacaatgggtgttagcaactttaagttactccccaaacgtttgctggccacattctcatttctaaacatctggatctgggtaaaggtttgaatagatgtagggaacaaaattggtttttccatggtgtagtctaattttgccaaatcacccaagaaagaaagtatatgacgtgtggagtttgcatttcttggatgggacctatcgggtcacccagcccagtcttacagtcataaattcctacctcttagttcctgccaaagggccttcagcctctgtgtgcacacttattgaatgaatgctttgcctaaagtttggccttttgaagaaaaacagcatgtgataatataaaaatatgagagtttaaaaaaaaaaaagatctctgcctctcttctctctgcctcgtcccaccttgctgtctgtctcattgtctttctctcccctcaccatgcgctgaattcagatttctctttcttttattataggcatgttgttttgaatgtggactttgtgggagggagaggattgttctgagaacagaaactggaagatacgtctgagttgatgggaccaacagggctttgctcctctgtgagggccaaagccattgatacttgtcgggggtgatgagggctttagcatctcaaggcagacatatgaagtatttactgctaaactatattacttactagtacaaatctgttggaattcaggggcagtctaagatttggtgagtgaaatgccatctggcaaaatcgagaagagagtgtggcctgagaggggaatgttcagcctcactgtcacattaagggtacctcaaaatacatggtccttccagtgtgttccttttccttcctccatttcactttgtcccctcttcttcctttctctcccattttcctggctttttagcactcagcttttttttataagtatgtatttactttttattatatatttggtcctttgggactttgtgatgattaagaatttattccattcaggattttaaaatgatgtgtttaatattttgttctcttaaactcttttgaagctatgctgctaaccaggtataggccagaaaggaggtggcccagtcagtaccttgctcacgtcagctaagggggacagtgatgtcatgtgggtgactcttcttcatttgaccaaggccagcctcctgttcttacctctgcccattcatttctggctatgggaaaactaccacctgttgagtgagccaatgaggccaggaagatcagaggggctgggttccggcccatgggccactatttgaatttctctgtagtaagctctttgtagggctggctccaactgcagtagccaaagaaaacctgtctgactcgacattttaatgcctgagagttggtgaaagttcagctgaagctaatgtctagacatcagcagtaactaggcatccagaaagtagcttcaaccaaagctaatagagcccaagtttccgcaggaagtttggtgctgagctgtccagagcagttgtttatctgagtgttgctagcccttagccatgctttcttagctttattctcgcctgttcctaggcatagcctgaaccagagctatggctcactgctcgctttattctactccctagtcatgcggaacaacatagtctaaaaaggaagatgtggactggggagttaggagacctgatttctattccctatgcttctactaactagcctcgagatcttaaccgctctgtgcctcagtgttcccatctgcaaaatggggatagtgttaattgccctacctacctcacagggttgttgtgaggataaactgagacaatgaattcaaagcaagttgacaagtaagtgctatgcaaattgtaagaaatggaaacaatcatgttaaaagcaatggaatggacattggcagaagggttaatggattgtccagccctttctctgtgtggcttaaacccaggtcgccattgctttatacattttcacttagcacagatttgtaattatgcatgtaataaagcacagccttatccaccctgaaaaaaaaaa

SEQ ID NO: 54 - DNA, 5927 bp, Homo sapiens
tcgtcggagcagacgggagtttctcctcggggtcggagcaggaggcacgcggagtgtgaggccacgcatgagcggacgctaaccccctccccagccacaaagagtctacatgtctagggtctagacatgttcagctttgtggacctccggctcctgctcctcttagcggccaccgccctcctgacgcacggccaagaggaaggccaagtcgagggccaagacgaagacatcccaccaatcacctgcgtacagaacggcctcaggtaccatgaccgagacgtgtggaaacccgagccctgccggatctgcgtctgcgacaacggcaaggtgttgtgcgatgacgtgatctgtgacgagaccaagaactgccccggcgccgaagtccccgagggcgagtgctgtcccgtctgccccgacggctcagagtcacccaccgaccaagaaaccaccggcgtcgagggacccaagggagacactggcccccgaggcccaaggggacccgcaggcccccctggccgagatggcatccctggacagcctggacttcccggaccccccggaccccccggacctcccggaccccctggcctcggaggaaactttgctccccagctgtcttatggctatgatgagaaatcaaccggaggaatttccgtgcctggccccatgggtccctctggtcctcgtggtctccctggcccccctggtgcacctggtccccaaggcttccaaggtccccctggtgagcctggcgagcctggagcttcaggtcccatgggtccccgaggtcccccaggtccccctggaaagaatggagatgatggggaagctggaaaacctggtcgtcctggtgagcgtgggcctcctgggcctcagggtgctcgaggattgcccggaacagctggcctccctggaatgaagggacacagaggtttcagtggtttggatggtgccaagggagatgctggtcctgctggtcctaagggtgagcctggcagccctggtgaaaatggagctcctggtcagatgggcccccgtggcctgcctggtgagagaggtcgccctggagcccctggccctgctggtgctcgtggaaatgatggtgctactggtgctgccgggccccctggtcccaccggccccgctggtcctcctggcttccctggtgctgttggtgctaagggtgaagctggtccccaagggccccgaggctctgaaggtccccagggtgtgcgtggtgagcctggcccccctggccctgctggtgctgctggccctgctggaaaccctggtgctgatggacagcctggtgctaaaggtgccaatggtgctcctggtattgctggtgctcctggcttccctggtgcccgaggcccctctggaccccagggccccggcggccctcctggtcccaagggtaacagcggtgaacctggtgctcctggcagcaaaggagacactggtgctaagggagagcctggccctgttggtgttcaaggaccccctggccctgctggagaggaaggaaagcgaggagctcgaggtgaacccggacccactggcctgcccggaccccctggcgagcgtggtggacctggtagccgtggtttccctggcgcagatggtgttgctggtcccaagggtcccgctggtgaacgtggttctcctggccctgctggccccaaaggatctcctggtgaagctggtcgtcccggtgaagctggtctgcctggtgccaagggtctgactggaagccctggcagccctggtcctgatggcaaaactggcccccctggtcccgccggtcaagatggtcgccccggacccccaggcccacctggtgcccgtggtcaggctggtgtgatgggattccctggacctaaaggtgctgctggagagcccggcaaggctggagagcgaggtgttcccggaccccctggcgctgtcggtcctgctggcaaagatggagaggctggagctcagggaccccctggccctgctggtcccgctggcgagagaggtgaacaaggccctgctggctcccccggattccagggtctccctggtcctgctggtcctccaggtgaagcaggcaaacctggtgaacagggtgttcctggagaccttggcgcccctggcccctctggagcaagaggcgagagaggtttccctggcgagcgtggtgtgcaaggtccccctggtcctgctggtccccgaggggccaacggtgctcccggcaacgatggtgctaagggtgatgctggtgcccctggagctcccggtagccagggcgcccctggccttcagggaatgcctggtgaacgtggtgcagctggtcttccagggcctaagggtgacagaggtgatgctggtcccaaaggtgctgatggctctcctggcaaagatggcgtccgtggtctgactggccccattggtcctcctggccctgctggtgcccctggtgacaagggtgaaagtggtcccagcggccctgctggtcccactggagctcgtggtgcccccggagaccgtggtgagcctggtccccccggccctgctggctttgctggcccccctggtgctgacggccaacctggtgctaaaggcgaacctggtgatgctggtgctaaaggcgatgctggtccccctggccctgccggacccgctggaccccctggccccattggtaatgttggtgctcctggagccaaaggtgctcgcggcagcgctggtccccctggtgctactggtttccctggtgctgctggccgagtcggtcctcctggcccctctggaaatgctggaccccctggccctcctggtcctgctggcaaagaaggcggcaaaggtccccgtggtgagactggccctgctggacgtcctggtgaagttggtccccctggtccccctggccctgctggcgagaaaggatcccctggtgctgatggtcctgctggtgctcctggtactcccgggcctcaaggtattgctggacagcgtggtgtggtcggcctgcctggtcagagaggagagagaggcttccctggtcttcctggcccctctggtgaacctggcaaacaaggtccctctggagcaagtggtgaacgtggtccccctggtcccatgggcccccctggattggctggaccccctggtgaatctggacgtgagggggctcctggtgccgaaggttcccctggacgagacggttctcctggcgccaagggtgaccgtggtgagaccggccccgctggaccccctggtgctcctggtgctcctggtgcccctggccccgttggccctgctggcaagagtggtgatcgtggtgagactggtcctgctggtcccgccggtcctgtcggccctgttggcgcccgtggccccgccggaccccaaggcccccgtggtgacaagggtgagacaggcgaacagggcgacagaggcataaagggtcaccgtggcttctctggcctccagggtccccctggccctcctggctctcctggtgaacaaggtccctctggagcctctggtcctgctggtccccgaggtccccctggctctgctggtgctcctggcaaagatggactcaacggtctccctggccccattgggccccctggtcctcgcggtcgcactggtgatgctggtcctgttggtccccccggccctcctggacctcctggtccccctggtcctcccagcgctggtttcgacttcagcttcctgccccagccacctcaagagaaggctcacgatggtggccgctactaccgggctgatgatgccaatgtggttcgtgaccgtgacctcgaggtggacaccaccctcaagagcctgagccagcagatcgagaacatccggagcccagagggcagccgcaagaaccccgcccgcacctgccgtgacctcaagatgtgccactctgactggaagagtggagagtactggattgaccccaaccaaggctgcaacctggatgccatcaaagtcttctgcaacatggagactggtgagacctgcgtgtaccccactcagcccagtgtggcccagaagaactggtacatcagcaagaaccccaaggacaagaggcatgtctggttcggcgagagcatgaccgatggattccagttcgagtatggcggccagggctccgaccctgccgatgtggccatccagctgaccttcctgcgcctgatgtccaccgaggcctcccagaacatcacctaccactgcaagaacagcgtggcctacatggaccagcagactggcaacctcaagaaggccctgctcctccagggctccaacgagatcgagatccgcgccgagggcaacagccgcttcacctacagcgtcactgtcgatggctgcacgagtcacaccggagcctggggcaagacagtgattgaatacaaaaccaccaagacctcccgcctgcccatcatcgatgtggcccccttggacgttggtgccccagaccaggaattcggcttcgacgttggccctgtctgcttcctgtaaactccctccatcccaacctggctccctcccacccaaccaactttccccccaacccggaaacagacaagcaacccaaactgaaccccctcaaaagccaaaaaatgggagacaatttcacatggactttggaaaatatttttttcctttgcattcatctctcaaacttagtttttatctttgaccaaccgaacatgaccaaaaaccaaaagtgcattcaaccttaccaaaaaaaaaaaaaaaaaaagaataaataaataactttttaaaaaaggaagcttggtccacttgcttgaagacccatgcgggggtaagtccctttctgcccgttgggcttatgaaaccccaatgctgccctttctgctcctttctccacaccccccttggggcctcccctccactccttcccaaatctgtctccccagaagacacaggaaacaatgtattgtctgcccagcaatcaaaggcaatgctcaaacacccaagtggcccccaccctcagcccgctcctgcccgcccagcacccccaggccctgggggacctggggttctcagactgccaaagaagccttgccatctggcgctcccatggctcttgcaacatctccccttcgtttttgagggggtcatgccgggggagccaccagcccctcactgggttcggaggagagtcaggaagggccacgacaaagcagaaacatcggatttggggaacgcgtgtcaatcccttgtgccgcagggctgggcgggagagactgttctgttccttgtgtaactgtgttgctgaaagactacctcgttcttgtcttgatgtgtcaccggggcaactgcctgggggcggggatgggggcagggtggaagcggctccccattttataccaaaggtgctacatctatgtgatgggtggggtggggagggaatcactggtgctatagaaattgagatgcccccccaggccagcaaatgttcctttttgttcaaagtctatttttattccttgatatttttctttttttttttttttttttgtggatggggacttgtgaatttttctaaaggtgctatttaacatgggaggagagcgtgtgcggctccagcccagcccgctgctcactttccaccctctctccacctgcctctggcttctcaggcctctgctctccgacctctctcctctgaaaccctcctccacagctgcagcccatcctcccggctccctcctagtctgtcctgcgtcctctgtccccgggtttcagagacaacttcccaaagcacaaagcagtttttccccctaggggtgggaggaagcaaaagactctgtacctattttgtatgtgtataataatttgagatgtttttaattattttgattgctggaataaagcatgtggaaatgacccaaacataa

SEQ ID NO: 55 - DNA, 5411 bp, Homo sapiens
gtgtcccatagtgtttccaaacttggaaagggcgggggagggcgggaggatgcggagggcggaggtatgcagacaacgagtcagagtttccccttgaaagcctcaaaagtgtccacgtcctcaaaaagaatggaaccaatttaagaagccagccccgtggccacgtcccttcccccattcgctccctcctctgcgcccccgcaggctcctcccagctgtggctgcccgggcccccagccccagccctcccattggtggaggcccttttggaggcaccctagggccagggaaacttttgccgtataaatagggcagatccgggctttattattttagcaccacggcagcaggaggtttcggctaagttggaggtactggccacgactgcatgcccgcgcccgccaggtgatacctccgccggtgacccaggggctctgcgacacaaggagtctgcatgtctaagtgctagacatgctcagctttgtggatacgcggactttgttgctgcttgcagtaaccttatgcctagcaacatgccaatctttacaagaggaaactgtaagaaagggcccagccggagatagaggaccacgtggagaaaggggtccaccaggccccccaggcagagatggtgaagatggtcccacaggccctcctggtccacctggtcctcctggcccccctggtctcggtgggaactttgctgctcagtatgatggaaaaggagttggacttggccctggaccaatgggcttaatgggacctagaggcccacctggtgcagctggagccccaggccctcaaggtttccaaggacctgctggtgagcctggtgaacctggtcaaactggtcctgcaggtgctcgtggtccagctggccctcctggcaaggctggtgaagatggtcaccctggaaaacccggacgacctggtgagagaggagttgttggaccacagggtgctcgtggtttccctggaactcctggacttcctggcttcaaaggcattaggggacacaatggtctggatggattgaagggacagcccggtgctcctggtgtgaagggtgaacctggtgcccctggtgaaaatggaactccaggtcaaacaggagcccgtgggcttcctggtgagagaggacgtgttggtgcccctggcccagctggtgcccgtggcagtgatggaagtgtgggtcccgtgggtcctgctggtcccattgggtctgctggccctccaggcttcccaggtgcccctggccccaagggtgaaattggagctgttggtaacgctggtcctgctggtcccgccggtccccgtggtgaagtgggtcttccaggcctctccggccccgttggacctcctggtaatcctggagcaaacggccttactggtgccaagggtgctgctggccttcccggcgttgctggggctcccggcctccctggaccccgcggtattcctggccctgttggtgctgccggtgctactggtgccagaggacttgttggtgagcctggtccagctggctccaaaggagagagcggtaacaagggtgagcccggctctgctgggccccaaggtcctcctggtcccagtggtgaagaaggaaagagaggccctaatggggaagctggatctgccggccctccaggacctcctgggctgagaggtagtcctggttctcgtggtcttcctggagctgatggcagagctggcgtcatgggccctcctggtagtcgtggtgcaagtggccctgctggagtccgaggacctaatggagatgctggtcgccctggggagcctggtctcatgggacccagaggtcttcctggttcccctggaaatatcggccccgctggaaaagaaggtcctgtcggcctccctggcatcgacggcaggcctggcccaattggcccagctggagcaagaggagagcctggcaacattggattccctggacccaaaggccccactggtgatcctggcaaaaacggtgataaaggtcatgctggtcttgctggtgctcggggtgctccaggtcctgatggaaacaatggtgctcagggacctcctggaccacagggtgttcaaggtggaaaaggtgaacagggtccccctggtcctccaggcttccagggtctgcctggcccctcaggtcccgctggtgaagttggcaaaccaggagaaaggggtctccatggtgagtttggtctccctggtcctgctggtccaagaggggaacgcggtcccccaggtgagagtggtgctgccggtcctactggtcctattggaagccgaggtccttctggacccccagggcctgatggaaacaagggtgaacctggtgtggttggtgctgtgggcactgctggtccatctggtcctagtggactcccaggagagaggggtgctgctggcatacctggaggcaagggagaaaagggtgaacctggtctcagaggtgaaattggtaaccctggcagagatggtgctcgtggtgctcctggtgctgtaggtgcccctggtcctgctggagccacaggtgaccggggcgaagctggggctgctggtcctgctggtcctgctggtcctcggggaagccctggtgaacgtggtgaggtcggtcctgctggccccaatggatttgctggtcctgctggtgctgctggtcaacctggtgctaaaggagaaagaggagccaaagggcctaagggtgaaaacggtgttgttggtcccacaggccccgttggagctgctggcccagctggtccaaatggtccccccggtcctgctggaagtcgtggtgatggaggcccccctggtatgactggtttccctggtgctgctggacggactggtcccccaggaccctctggtatttctggccctcctggtccccctggtcctgctgggaaagaagggcttcgtggtcctcgtggtgaccaaggtccagttggccgaactggagaagtaggtgcagttggtccccctggcttcgctggtgagaagggtccctctggagaggctggtactgctggacctcctggcactccaggtcctcagggtcttcttggtgctcctggtattctgggtctccctggctcgagaggtgaacgtggtctaccaggtgttgctggtgctgtgggtgaacctggtcctcttggcattgccggccctcctggggcccgtggtcctcctggtgctgtgggtagtcctggagtcaacggtgctcctggtgaagctggtcgtgatggcaaccctgggaacgatggtcccccaggtcgcgatggtcaacccggacacaagggagagcgcggttaccctggcaatattggtcccgttggtgctgcaggtgcacctggtcctcatggccccgtgggtcctgctggcaaacatggaaaccgtggtgaaactggtccttctggtcctgttggtcctgctggtgctgttggcccaagaggtcctagtggcccacaaggcattcgtggcgataagggagagcccggtgaaaaggggcccagaggtcttcctggcttaaagggacacaatggattgcaaggtctgcctggtatcgctggtcaccatggtgatcaaggtgctcctggctccgtgggtcctgctggtcctaggggccctgctggtccttctggccctgctggaaaagatggtcgcactggacatcctggtacagttggacctgctggcattcgaggccctcagggtcaccaaggccctgctggcccccctggtccccctggccctcctggacctccaggtgtaagcggtggtggttatgactttggttacgatggagacttctacagggctgaccagcctcgctcagcaccttctctcagacccaaggactatgaagttgatgctactctgaagtctctcaacaaccagattgagacccttcttactcctgaaggctctagaaagaacccagctcgcacatgccgtgacttgagactcagccacccagagtggagcagtggttactactggattgaccctaaccaaggatgcactatggatgctatcaaagtatactgtgatttctctactggcgaaacctgtatccgggcccaacctgaaaacatcccagccaagaactggtataggagctccaaggacaagaaacacgtctggctaggagaaactatcaatgctggcagccagtttgaatataatgtagaaggagtgacttccaaggaaatggctacccaacttgccttcatgcgcctgctggccaactatgcctctcagaacatcacctaccactgcaagaacagcattgcatacatggatgaggagactggcaacctgaaaaaggctgtcattctacagggctctaatgatgttgaacttgttgctgagggcaacagcaggttcacttacactgttcttgtagatggctgctctaaaaagacaaatgaatggggaaagacaatcattgaatacaaaacaaataagccatcacgcctgcccttccttgatattgcacctttggacatcggtggtgctgaccaggaattctttgtggacattggcccagtctgtttcaaataaatgaactcaatctaaattaaaaaagaaagaaatttgaaaaaactttctctttgccatttcttcttcttcttttttaactgaaagctgaatccttccatttcttctgcacatctacttgcttaaattgtgggcaaaagagaaaaagaaggattgatcagagcattgtgcaatacagtttcattaactccttcccccgctcccccaaaaatttgaatttttttttcaacactcttacacctgttatggaaaatgtcaacctttgtaagaaaaccaaaataaaaattgaaaaataaaaaccataaacatttgcaccacttgtggcttttgaatatcttccacagagggaagtttaaaacccaaacttccaaaggtttaaactacctcaaaacactttcccatgagtgtgatccacattgttaggtgctgacctagacagagatgaactgaggtccttgttttgttttgttcataatacaaaggtgctaattaatagtatttcagatacttgaagaatgttgatggtgctagaagaatttgagaagaaatactcctgtattgagttgtatcgtgtggtgtattttttaaaaaatttgatttagcattcatattttccatcttattcccaattaaaagtatgcagattatttgcccaaatcttcttcagattcagcatttgttctttgccagtctcattttcatcttcttccatggttccacagaagctttgtttcttgggcaagcagaaaaattaaattgtacctattttgtatatgtgagatgtttaaataaattgtgaaaaaaatgaaataaagcatgtttggttttccaaaagaacatat

SEQ ID NO: 56 - DNA, 5490 bp, Homo sapiens
ggctgagttttatgacgggcccggtgctgaagggcagggaacaacttgatggtgctactttgaactgcttttcttttctcctttttgcacaaagagtctcatgtctgatatttagacatgatgagctttgtgcaaaaggggagctggctacttctcgctctgcttcatcccactattattttggcacaacaggaagctgttgaaggaggatgttcccatcttggtcagtcctatgcggatagagatgtctggaagccagaaccatgccaaatatgtgtctgtgactcaggatccgttctctgcgatgacataatatgtgacgatcaagaattagactgccccaacccagaaattccatttggagaatgttgtgcagtttgcccacagcctccaactgctcctactcgccctcctaatggtcaaggacctcaaggccccaagggagatccaggccctcctggtattcctgggagaaatggtgaccctggtattccaggacaaccagggtcccctggttctcctggcccccctggaatctgtgaatcatgccctactggtcctcagaactattctccccagtatgattcatatgatgtcaagtctggagtagcagtaggaggactcgcaggctatcctggaccagctggccccccaggccctcccggtccccctggtacatctggtcatcctggttcccctggatctccaggataccaaggaccccctggtgaacctgggcaagctggtccttcaggccctccaggacctcctggtgctataggtccatctggtcctgctggaaaagatggagaatcaggtagacccggacgacctggagagcgaggattgcctggacctccaggtatcaaaggtccagctgggatacctggattccctggtatgaaaggacacagaggcttcgatggacgaaatggagaaaagggtgaaacaggtgctcctggattaaagggtgaaaatggtcttccaggcgaaaatggagctcctggacccatgggtccaagaggggctcctggtgagcgaggacggccaggacttcctggggctgcaggtgctcggggtaatgacggtgctcgaggcagtgatggtcaaccaggccctcctggtcctcctggaactgccggattccctggatcccctggtgctaagggtgaagttggacctgcagggtctcctggttcaaatggtgcccctggacaaagaggagaacctggacctcagggacacgctggtgctcaaggtcctcctggccctcctgggattaatggtagtcctggtggtaaaggcgaaatgggtcccgctggcattcctggagctcctggactgatgggagcccggggtcctccaggaccagccggtgctaatggtgctcctggactgcgaggtggtgcaggtgagcctggtaagaatggtgccaaaggagagcccggaccacgtggtgaacgcggtgaggctggtattccaggtgttccaggagctaaaggcgaagatggcaaggatggatcacctggagaacctggtgcaaatgggcttccaggagctgcaggagaaaggggtgcccctgggttccgaggacctgctggaccaaatggcatcccaggagaaaagggtcctgctggagagcgtggtgctccaggccctgcagggcccagaggagctgctggagaacctggcagagatggcgtccctggaggtccaggaatgaggggcatgcccggaagtccaggaggaccaggaagtgatgggaaaccagggcctcccggaagtcaaggagaaagtggtcgaccaggtcctcctgggccatctggtccccgaggtcagcctggtgtcatgggcttccccggtcctaaaggaaatgatggtgctcctggtaagaatggagaacgaggtggccctggaggacctggccctcagggtcctcctggaaagaatggtgaaactggacctcagggacccccagggcctactgggcctggtggtgacaaaggagacacaggaccccctggtccacaaggattacaaggcttgcctggtacaggtggtcctccaggagaaaatggaaaacctggggaaccaggtccaaagggtgatgccggtgcacctggagctccaggaggcaagggtgatgctggtgcccctggtgaacgtggacctcctggattggcaggggccccaggacttagaggtggagctggtccccctggtcccgaaggaggaaagggtgctgctggtcctcctgggccacctggtgctgctggtactcctggtctgcaaggaatgcctggagaaagaggaggtcttggaagtcctggtccaaagggtgacaagggtgaaccaggcggtccaggtgctgatggtgtcccagggaaagatggcccaaggggtcctactggtcctattggtcctcctggcccagctggccagcctggagataagggtgaaggtggtgcccccggacttccaggtatagctggacctcgtggtagccctggtgagagaggtgaaactggccctccaggacctgctggtttccctggtgctcctggacagaatggtgaacctggtggtaaaggagaaagaggggctccgggtgagaaaggtgaaggaggccctcctggagttgcaggaccccctggaggttctggacctgctggtcctcctggtccccaaggtgtcaaaggtgaacgtggcagtcctggtggacctggtgctgctggcttccctggtgctcgtggtcttcctggtcctcctggtagtaatggtaacccaggacccccaggtcccagcggttctccaggcaaggatgggcccccaggtcctgcgggtaacactggtgctcctggcagccctggagtgtctggaccaaaaggtgatgctggccaaccaggagagaagggatcgcctggtgcccagggcccaccaggagctccaggcccacttgggattgctgggatcactggagcacggggtcttgcaggaccaccaggcatgccaggtcctaggggaagccctggccctcagggtgtcaagggtgaaagtgggaaaccaggagctaacggtctcagtggagaacgtggtccccctggaccccagggtcttcctggtctggctggtacagctggtgaacctggaagagatggaaaccctggatcagatggtcttccaggccgagatggatctcctggtggcaagggtgatcgtggtgaaaatggctctcctggtgcccctggcgctcctggtcatccaggcccacctggtcctgtcggtccagctggaaagagtggtgacagaggagaaagtggccctgctggccctgctggtgctcccggtcctgctggttcccgaggtgctcctggtcctcaaggcccacgtggtgacaaaggtgaaacaggtgaacgtggagctgctggcatcaaaggacatcgaggattccctggtaatccaggtgccccaggttctccaggccctgctggtcagcagggtgcaatcggcagtccaggacctgcaggccccagaggacctgttggacccagtggacctcctggcaaagatggaaccagtggacatccaggtcccattggaccaccagggcctcgaggtaacagaggtgaaagaggatctgagggctccccaggccacccagggcaaccaggccctcctggacctcctggtgcccctggtccttgctgtggtggtgttggagccgctgccattgctgggattggaggtgaaaaagctggcggttttgccccgtattatggagatgaaccaatggatttcaaaatcaacaccgatgagattatgacttcactcaagtctgttaatggacaaatagaaagcctcattagtcctgatggttctcgtaaaaaccccgctagaaactgcagagacctgaaattctgccatcctgaactcaagagtggagaatactgggttgaccctaaccaaggatgcaaattggatgctatcaaggtattctgtaatatggaaactggggaaacatgcataagtgccaatcctttgaatgttccacggaaacactggtggacagattctagtgctgagaagaaacacgtttggtttggagagtccatggatggtggttttcagtttagctacggcaatcctgaacttcctgaagatgtccttgatgtgcagctggcattccttcgacttctctccagccgagcttcccagaacatcacatatcactgcaaaaatagcattgcatacatggatcaggccagtggaaatgtaaagaaggccctgaagctgatggggtcaaatgaaggtgaattcaaggctgaaggaaatagcaaattcacctacacagttctggaggatggttgcacgaaacacactggggaatggagcaaaacagtctttgaatatcgaacacgcaaggctgtgagactacctattgtagatattgcaccctatgacattggtggtcctgatcaagaatttggtgtggacgttggccctgtttgctttttataaaccaaactctatctgaaatcccaacaaaaaaaatttaactccatatgtgttcctcttgttctaatcttgtcaaccagtgcaagtgaccgacaaaattccagttatttatttccaaaatgtttggaaacagtataatttgacaaagaaaaatgatacttctctttttttgctgttccaccaaatacaattcaaatgctttttgttttatttttttaccaattccaatttcaaaatgtctcaatggtgctataataaataaacttcaacactctttatgataacaacactgtgttatattctttgaatcctagcccatctgcagagcaatgactgtgctcaccagtaaaagataacctttctttctgaaatagtcaaatacgaaattagaaaagccctccctattttaactacctcaactggtcagaaacacagattgtattctatgagtcccagaagatgaaaaaaattttatacgttgataaaacttataaatttcattgattaatctcctggaagattggtttaaaaagaaaagtgtaatgcaagaatttaaagaaatatttttaaagccacaattattttaatattggatatcaactgcttgtaaaggtgctcctcttttttcttgtcattgctggtcaagattactaatatttgggaaggctttaaagacgcatgttatggtgctaatgtactttcacttttaaactctagatcagaattgttgacttgcattcagaacataaatgcacaaaatctgtacatgtctcccatcagaaagattcattggcatgccacaggggattctcctccttcatcctgtaaaggtcaacaataaaaaccaaattatggggctgcttttgtcacactagcatagagaatgtgttgaaatttaactttgtaagcttgtatgtggttgttgatcttttttttccttacagacacccataataaaatatcatattaaaattc

SEQ ID NO: 57 - DNA, 4422 bp, Homo sapiens
gggagtttctggagggctgaacacgtggaggcaaacaggaaggtgaagaagaacttatcctatcaggacggaaggtcctgtgctcgggatcttccagacgtcgcgactctaaattgccccctctgaggtcaaggaacacaagatggttttggaaatgctgaacccgatacattataacatcaccagcatcgtgcctgaagccatgcctgctgccaccatgccagtcctgctcctcactggcctttttctcttggtgtggaattatgagggcacatcctcaataccaggtcctggctactgcatgggaattggacccctcatctcccacggcagattcctgtggatggggatcggcagtgcctgcaactactacaaccgggtatatggagaattcatgcgagtctggatctctggagaggaaacactcattatcagcaagtcctcaagtatgttccacataatgaagcacaatcattacagctctcgattcggcagcaaacttgggctgcagtgcatcggtatgcatgagaaaggcatcatatttaacaacaatccagagctctggaaaacaactcgacccttctttatgaaagctctgtcaggccccggccttgttcgtatggtcacagtctgtgctgaatccctcaaaacacatctggacaggttggaggaggtgaccaatgaatcgggctatgtggacgtgttgacccttctgcgtcgtgtcatgctggacacctctaacacgctcttcttgaggatccctttggacgaaagtgctatcgtggttaaaatccaaggttattttgatgcatggcaagctctcctcatcaaaccagacatcttctttaagatttcttggctatacaaaaagtatgagaagtctgtcaaggatttgaaagatgccatagaagttctgatagcagaaaaaagacgcaggatttccacagaagagaaactggaagaatgtatggactttgccactgagttgattttagcagagaaacgtggtgacctgacaagagagaatgtgaaccagtgcatattggaaatgctgatcgcagctcctgacaccatgtctgtctctttgttcttcatgctatttctcattgcaaagcaccctaatgttgaagaggcaataataaaggaaatccagactgttattggtgagagagacataaagattgatgatatacaaaaattaaaagtgatggaaaacttcatttatgagagcatgcggtaccagcctgtcgtggacttggtcatgcgcaaagccttagaagatgatgtaatcgatggctacccagtgaaaaaggggacaaacattatcctgaatattggaaggatgcacagactcgagtttttccccaaacccaatgaatttactcttgaaaattttgcaaagaatgttccttataggtactttcagccatttggctttgggccccgtggctgtgcaggaaagtacatcgccatggtgatgatgaaagccatcctcgttacacttctgagacgattccacgtgaagacattgcaaggacagtgtgttgagagcatacagaagatacacgacttgtccttgcacccagatgagactaaaaacatgctggaaatgatctttaccccaagaaactcagacaggtgtctggaacactagagaaggctggtcagtacccactctggagcatttctcatcagtagttcacatacaaatcatccatccttgccaatagtgtcatcctcacagtgaacactcagtggcccatggcattttataggcatacctcctatgggttgtcaccaagctaggtgctatttgtcatctgctcctgttcacaccagagaaccaggctacaagagaaaaagcagaggccaagagtttgagggagaaatagtcggtgaagaaaccgtatccataaagacccgattccaccaaatgtgctttgagaaggataggccttcattaacaaaatgtatgtctggttccccagtagagctctactgcctcaacccaaggggatttttatgtctggggcagaaacactcaagttgattagaaagaccaggccaatgtcagggtacctggggccaaacccacctgctagtgtgaattaaagtactttaattttgttttctgtggaggtggaaaagcaacattcatagtctttggagaaatgcttagaaattcagcatttgacccttgctgtgaattaagcccaattaattcctgtttgtctacatatgatctgtctgtggcaaaagtttaatcagaggaaattctttcccagtctgtcgatttatgcctcagccacttgcctgtgctacaattcattgtgttacctgtagattcaggtaatacaaactatatataatcatcaagtaatacaaactaatttagtaatagcctgggttaagtattattagggccctgtgtctgctgtagaaaaaaaaattcacatgatgcacttcaaattcaaataaaaatccttttggcatgttcccatttttgcttagctcaattagtgtggctaaccaagagataactgtaaatgtgacattgatttgctcttactacagcttcagtgattgggggaggaaaagtcccaacccaatgggctcaaacttctaaggggtactcctctcatccccttatccttctccctcgacattttctccctctttcttcccatgaccccaaagccaagggcaacagatcagtaaagaacgtggtcagagtagaacccctgaagtattttttaatcctacctcaaaatttaacagttacctgagagatttaacattatctagttcattgaatcattgtatgtggtcatggataaattgcacaccttggaattcgctttctaaaggaaatcaaatgaatggaggaactttccaaacaccactttacttgtgttatatagccaatataactatctctactgaatgtcattgaaaaactaaaaaattaaacttatttacaaataggtaaatatttgtcattgaatccattgccatcccatttgactgttcttttcatcctactgtctagtaataagctgagtataagatgacagtgtaatctccctgaaagcaggagctactttctttcttttgtaatctatttccatccccatttccctgtcctgtctccctgtattcactcccaagctcagttctgaatagacattcctgctcagagatactcccaactgatgcagaaaccaaataaagaggtaggtattccaagaattcaagaatggacattagtaaagaataaaacatttatttgagcttggaattatttggatcatctatatggcctaaaaatatatggactatgcctgtgtacctgaatacgtatgtagtcaggtcaagacaatcatccaaataacttagacccctaaaagcaaggccaggatttgcaatttaatgtgtcccaattaattcacttgaaaattagtaacactctgtttacgttgcctctggctggagctgcatggtggaagaagcccaactttggatccatgtacttcacccatccaatactcttgggacatttatgtgtattttatctgtatatatgaagccaatgtctatgtctacacagtcaaagtgaaatgcatgtttgatatagctgtacatagatatctattttgcaggtacaaaaatatcctgggggaaaactgggagtggaagggtggggggtgggagtgagggacatgggggagggacaggaagaggagaagtgttggtttgaacgatccaagcaaactctcccagaatcaaattacctgggtagttgttcaacttttcactctgcttagcctgtatagacaaaccccatatatttgtagaggcttggccttggaattctggaataccattggcttttcagtaggctgatgaacacattttgaaaattctattatcttcagaattttgccccattgttaagtgcttaaccgtcactcttgaatgtgcaatgtgctgtggattccattttcatcagttctgaaagaactgcaatgtgtaaattatcagtgaaatgcatgcatataagggctctatcattatcaaattgtaaggacaattgtacccttctatatctttgggcatgctagacacccccatgccttcattgagatcccattttccccctctcaagtggaaaataatcacatccagcaagctctctcattattgagaaataccatttggaaattgccactttttattcctaagcagcacctttcactgttcatgatgctaatgttccacaaaagcatgtgccattggcccactgaaggatagagggacccttttcaatctatatcagctgggctctgggactgaatctctcacctattcttgcagaaagacatactaattaaaccttgtcaaagtaaaaaaaaaaaaaaaaaa

SEQ ID NO: 58 - DNA, 14069 bp, Homo sapiens
cgttaaatgcaaacgctgctctggctcatgtgtttgctccgaggtataggttttgttcgactgacgtatcagatagtcagagtggttaccacaccgacgttgtagcagctgcataataaatgactgaaagaatcatgttaggcatgcccacctaacctaacttgaatcatgcgaaaggggagctgttggaattcaaatagactttctggttcccagcagtcggcagtaatagaatgctttcaggaagatgacagaatcaggagaaagatgctgttttgcactatcttgatttgttacagcagccaacttattggcatgatggagtgacaggaaaaacagctggcatggaagatgaaagagaagatgttcaaaagaaaacattcacaaaatgggtaaatgcacaattttctaagtttgggaagcagcatattgagaacctcttcagtgacctacaggatgggaggcgcctcctagacctcctcgaaggcctgacagggcaaaaactgccaaaagaaaaaggatccacaagagttcatgccctgaacaatgtcaacaaggcactgcgggttttgcagaacaataatgttgatttagtgaatattggaagtactgacatcgtagatggaaatcataaactgactcttggtttgatttggaatataatcctccactggcaggtcaaaaatgtaatgaaaaatatcatggctggattgcaacaaaccaacagtgaaaagattctcctgagctgggtccgacaatcaactcgtaattatccacaggttaatgtaatcaacttcaccaccagctggtctgatggcctggctttgaatgctctcatccatagtcataggccagacctatttgactggaatagtgtggtttgccagcagtcagccacacaacgactggaacatgcattcaacatcgccagatatcaattaggcatagagaaactactcgatcctgaagatgttgataccacctatccagataagaagtccatcttaatgtacatcacatcactcttccaagttttgcctcaacaagtgagcattgaagccatccaggaagtggaaatgttgccaaggccacctaaagtgactaaagaagaacattttcagttacatcatcaaatgcactattctcaacagatcacggtcagtctagcacagggatatgagagaacttcttcccctaagcctcgattcaagagctatgcctacacacaggctgcttatgtcaccacctctgaccctacacggagcccatttccttcacagcatttggaagctcctgaagacaagtcatttggcagttcattgatggagagtgaagtaaacctggaccgttatcaaacagctttagaagaagtattatcgtggcttctttctgctgaggacacattgcaagcacaaggagagatttctaatgatgtggaagtggtgaaagaccagtttcatactcatgaggggtacatgatggatttgacagcccatcagggccgggttggtaatattctacaattgggaagtaagctgattggaacaggaaaattatcagaagatgaagaaactgaagtacaagagcagatgaatctcctaaattcaagatgggaatgcctcagggtagctagcatggaaaaacaaagcaatttacatagagttttaatggatctccagaatcagaaactgaaagagttgaatgactggctaacaaaaacagaagaaagaacaaggaaaatggaggaagagcctcttggacctgatcttgaagacctaaaacgccaagtacaacaacataaggtgcttcaagaagatctagaacaagaacaagtcagggtcaattctctcactcacatggtggtggtagttgatgaatctagtggagatcacgcaactgctgctttggaagaacaacttaaggtattgggagatcgatgggcaaacatctgtagatggacagaagaccgctgggttcttttacaagacatccttctcaaatggcaacgtcttactgaagaacagtgcctttttagtgcatggctttcagaaaaagaagatgcagtgaacaagattcacacaactggctttaaagatcaaaatgaaatgttatcaagtcttcaaaaactggccgttttaaaagcggatctagaaaagaaaaagcaatccatgggcaaactgtattcactcaaacaagatcttctttcaacactgaagaataagtcagtgacccagaagacggaagcatggctggataactttgcccggtgttgggataatttagtccaaaaacttgaaaagagtacagcacagatttcacaggctgtcaccaccactcagccatcactaacacagacaactgtaatggaaacagtaactacggtgaccacaagggaacagatcctggtaaagcatgctcaagaggaacttccaccaccacctccccaaaagaagaggcagattactgtggattctgaaattaggaaaaggttggatgttgatataactgaacttcacagctggattactcgctcagaagctgtgttgcagagtcctgaatttgcaatctttcggaaggaaggcaacttctcagacttaaaagaaaaagtcaatgccatagagcgagaaaaagctgagaagttcagaaaactgcaagatgccagcagatcagctcaggccctggtggaacagatggtgaatgagggtgttaatgcagatagcatcaaacaagcctcagaacaactgaacagccggtggatcgaattctgccagttgctaagtgagagacttaactggctggagtatcagaacaacatcatcgctttctataatcagctacaacaattggagcagatgacaactactgctgaaaactggttgaaaatccaacccaccaccccatcagagccaacagcaattaaaagtcagttaaaaatttgtaaggatgaagtcaaccggctatcaggtcttcaacctcaaattgaacgattaaaaattcaaagcatagccctgaaagagaaaggacaaggacccatgttcctggatgcagactttgtggcctttacaaatcattttaagcaagtcttttctgatgtgcaggccagagagaaagagctacagacaatttttgacactttgccaccaatgcgctatcaggagaccatgagtgccatcaggacatgggtccagcagtcagaaaccaaactctccatacctcaacttagtgtcaccgactatgaaatcatggagcagagactcggggaattgcaggctttacaaagttctctgcaagagcaacaaagtggcctatactatctcagcaccactgtgaaagagatgtcgaagaaagcgccctctgaaattagccggaaatatcaatcagaatttgaagaaattgagggacgctggaagaagctctcctcccagctggttgagcattgtcaaaagctagaggagcaaatgaataaactccgaaaaattcagaatcacatacaaaccctgaagaaatggatggctgaagttgatgtttttctgaaggaggaatggcctgcccttggggattcagaaattctaaaaaagcagctgaaacagtgcagacttttagtcagtgatattcagacaattcagcccagtctaaacagtgtcaatgaaggtgggcagaagataaagaatgaagcagagccagagtttgcttcgagacttgagacagaactcaaagaacttaacactcagtgggatcacatgtgccaacaggtctatgccagaaaggaggccttgaagggaggtttggagaaaactgtaagcctccagaaagatctatcagagatgcacgaatggatgacacaagctgaagaagagtatcttgagagagattttgaatataaaactccagatgaattacagaaagcagttgaagagatgaagagagctaaagaagaggcccaacaaaaagaagcgaaagtgaaactccttactgagtctgtaaatagtgtcatagctcaagctccacctgtagcacaagaggccttaaaaaaggaacttgaaactctaaccaccaactaccagtggctctgcactaggctgaatgggaaatgcaagactttggaagaagtttgggcatgttggcatgagttattgtcatacttggagaaagcaaacaagtggctaaatgaagtagaatttaaacttaaaaccactgaaaacattcctggcggagctgaggaaatctctgaggtgctagattcacttgaaaatttgatgcgacattcagaggataacccaaatcagattcgcatattggcacagaccctaacagatggcggagtcatggatgagctaatcaatgaggaacttgagacatttaattctcgttggagggaactacatgaagaggctgtaaggaggcaaaagttgcttgaacagagcatccagtctgcccaggagactgaaaaatccttacacttaatccaggagtccctcacattcattgacaagcagttggcagcttatattgcagacaaggtggacgcagctcaaatgcctcaggaagcccagaaaatccaatctgatttgacaagtcatgagatcagtttagaagaaatgaagaaacataatcaggggaaggaggctgcccaaagagtcctgtctcagattgatgttgcacagaaaaaattacaagatgtctccatgaagtttcgattattccagaaaccagccaattttgagcagcgtctacaagaaagtaagatgattttagatgaagtgaagatgcacttgcctgcattggaaacaaagagtgtggaacaggaagtagtacagtcacagctaaatcattgtgtgaacttgtataaaagtctgagtgaagtgaagtctgaagtggaaatggtgataaagactggacgtcagattgtacagaaaaagcagacggaaaatcccaaagaacttgatgaaagagtaacagctttgaaattgcattataatgagctgggagcaaaggtaacagaaagaaagcaacagttggagaaatgcttgaaattgtcccgtaagatgcgaaaggaaatgaatgtcttgacagaatggctggcagctacagatatggaattgacaaagagatcagcagttgaaggaatgcctagtaatttggattctgaagttgcctggggaaaggctactcaaaaagagattgagaaacagaaggtgcacctgaagagtatcacagaggtaggagaggccttgaaaacagttttgggcaagaaggagacgttggtggaagataaactcagtcttctgaatagtaactggatagctgtcacctcccgagcagaagagtggttaaatcttttgttggaataccagaaacacatggaaacttttgaccagaatgtggaccacatcacaaagtggatcattcaggctgacacacttttggatgaatcagagaaaaagaaaccccagcaaaaagaagacgtgcttaagcgtttaaaggcagaactgaatgacatacgcccaaaggtggactctacacgtgaccaagcagcaaacttgatggcaaaccgcggtgaccactgcaggaaattagtagagccccaaatctcagagctcaaccatcgatttgcagccatttcacacagaattaagactggaaaggcctccattcctttgaaggaattggagcagtttaactcagatatacaaaaattgcttgaaccactggaggctgaaattcagcagggggtgaatctgaaagaggaagacttcaataaagatatgaatgaagacaatgagggtactgtaaaagaattgttgcaaagaggagacaacttacaacaaagaatcacagatgagagaaagcgagaggaaataaagataaaacagcagctgttacagacaaaacataatgctctcaaggatttgaggtctcaaagaagaaaaaaggctctagaaatttctcatcagtggtatcagtacaagaggcaggctgatgatctcctgaaatgcttggatgacattgaaaaaaaattagccagcctacctgagcccagagatgaaaggaaaataaaggaaattgatcgggaattgcagaagaagaaagaggagctgaatgcagtgcgtaggcaagctgagggcttgtctgaggatggggccgcaatggcagtggagccaactcagatccagctcagcaagcgctggcgggaaattgagagcaaatttgctcagtttcgaagactcaactttgcacaaattcacactgtccgtgaagaaacgatgatggtgatgactgaagacatgcctttggaaatttcttatgtgccttctacttatttgactgaaatcactcatgtctcacaagccctattagaagtggaacaacttctcaatgctcctgacctctgtgctaaggactttgaagatctctttaagcaagaggagtctctgaagaatataaaagatagtctacaacaaagctcaggtcggattgacattattcatagcaagaagacagcagcattgcaaagtgcaacgcctgtggaaagggtgaagctacaggaagctctctcccagcttgatttccaatgggaaaaagttaacaaaatgtacaaggaccgacaagggcgatttgacagatctgttgagaaatggcggcgttttcattatgatataaagatatttaatcagtggctaacagaagctgaacagtttctcagaaagacacaaattcctgagaattgggaacatgctaaatacaaatggtatcttaaggaactccaggatggcattgggcagcggcaaactgttgtcagaacattgaatgcaactggggaagaaataattcagcaatcctcaaaaacagatgccagtattctacaggaaaaattgggaagcctgaatctgcggtggcaggaggtctgcaaacagctgtcagacagaaaaaagaggctagaagaacaaaagaatatcttgtcagaatttcaaagagatttaaatgaatttgttttatggttggaggaagcagataacattgctagtatcccacttgaacctggaaaagagcagcaactaaaagaaaagcttgagcaagtcaagttactggtggaagagttgcccctgcgccagggaattctcaaacaattaaatgaaactggaggacccgtgcttgtaagtgctcccataagcccagaagagcaagataaacttgaaaataagctcaagcagacaaatctccagtggataaaggtttccagagctttacctgagaaacaaggagaaattgaagctcaaataaaagaccttgggcagcttgaaaaaaagcttgaagaccttgaagagcagttaaatcatctgctgctgtggttatctcctattaggaatcagttggaaatttataaccaaccaaaccaagaaggaccatttgacgttcaggaaactgaaatagcagttcaagctaaacaaccggatgtggaagagattttgtctaaagggcagcatttgtacaaggaaaaaccagccactcagccagtgaagaggaagttagaagatctgagctctgagtggaaggcggtaaaccgtttacttcaagagctgagggcaaagcagcctgacctagctcctggactgaccactattggagcctctcctactcagactgttactctggtgacacaacctgtggttactaaggaaactgccatctccaaactagaaatgccatcttccttgatgttggaggtacctgctctggcagatttcaaccgggcttggacagaacttaccgactggctttctctgcttgatcaagttataaaatcacagagggtgatggtgggtgaccttgaggatatcaacgagatgatcatcaagcagaaggcaacaatgcaggatttggaacagaggcgtccccagttggaagaactcattaccgctgcccaaaatttgaaaaacaagaccagcaatcaagaggctagaacaatcattacggatcgaattgaaagaattcagaatcagtgggatgaagtacaagaacaccttcagaaccggaggcaacagttgaatgaaatgttaaaggattcaacacaatggctggaagctaaggaagaagctgagcaggtcttaggacaggccagagccaagcttgagtcatggaaggagggtccctatacagtagatgcaatccaaaagaaaatcacagaaaccaagcagttggccaaagacctccgccagtggcagacaaatgtagatgtggcaaatgacttggccctgaaacttctccgggattattctgcagatgataccagaaaagtccacatgataacagagaatatcaatgcctcttggagaagcattcataaaagggtgagtgagcgagaggctgctttggaagaaactcatagattactgcaacagttccccctggacctggaaaagtttcttgcctggcttacagaagctgaaacaactgccaatgtcctacaggatgctacccgtaaggaaaggctcctagaagactccaagggagtaaaagagctgatgaaacaatggcaagacctccaaggtgaaattgaagctcacacagatgtttatcacaacctggatgaaaacagccaaaaaatcctgagatccctggaaggttccgatgatgcagtcctgttacaaagacgtttggataacatgaacttcaagtggagtgaacttcggaaaaagtctctcaacattaggtcccatttggaagccagttctgaccagtggaagcgtctgcacctttctctgcaggaacttctggtgtggctacagctgaaagatgatgaattaagccggcaggcacctattggaggcgactttccagcagttcagaagcagaacgatgtacatagggccttcaagagggaattgaaaactaaagaacctgtaatcatgagtactcttgagactgtacgaatatttctgacagagcagcctttggaaggactagagaaactctaccaggagcccagagagctgcctcctgaggagagagcccagaatgtcactcggcttctacgaaagcaggctgaggaggtcaatactgagtgggaaaaattgaacctgcactccgctgactggcagagaaaaatagatgagacccttgaaagactccaggaacttcaagaggccacggatgagctggacctcaagctgcgccaagctgaggtgatcaagggatcctggcagcccgtgggcgatctcctcattgactctctccaagatcacctcgagaaagtcaaggcacttcgaggagaaattgcgcctctgaaagagaacgtgagccacgtcaatgaccttgctcgccagcttaccactttgggcattcagctctcaccgtataacctcagcactctggaagacctgaacaccagatggaagcttctgcaggtggccgtcgaggaccgagtcaggcagctgcatgaagcccacagggactttggtccagcatctcagcactttctttccacgtctgtccagggtccctgggagagagccatctcgccaaacaaagtgccctactatatcaaccacgagactcaaacaacttgctgggaccatcccaaaatgacagagctctaccagtctttagctgacctgaataatgtcagattctcagcttataggactgccatgaaactccgaagactgcagaaggccctttgcttggatctcttgagcctgtcagctgcatgtgatgccttggaccagcacaacctcaagcaaaatgaccagcccatggatatcctgcagattattaattgtttgaccactatttatgaccgcctggagcaagagcacaacaatttggtcaacgtccctctctgcgtggatatgtgtctgaactggctgctgaatgtttatgatacgggacgaacagggaggatccgtgtcctgtcttttaaaactggcatcatttccctgtgtaaagcacatttggaagacaagtacagataccttttcaagcaagtggcaagttcaacaggattttgtgaccagcgcaggctgggcctccttctgcatgattctatccaaattccaagacagttgggtgaagttgcatcctttgggggcagtaacattgagccaagtgtccggagctgcttccaatttgctaataataagccagagatcgaagcggccctcttcctagactggatgagactggaaccccagtccatggtgtggctgcccgtcctgcacagagtggctgctgcagaaactgccaagcatcaggccaaatgtaacatctgcaaagagtgtccaatcattggattcaggtacaggagtctaaagcactttaattatgacatctgccaaagctgctttttttctggtcgagttgcaaaaggccataaaatgcactatcccatggtggaatattgcactccgactacatcaggagaagatgttcgagactttgccaaggtactaaaaaacaaatttcgaaccaaaaggtattttgcgaagcatccccgaatgggctacctgccagtgcagactgtcttagagggggacaacatggaaactcccgttactctgatcaacttctggccagtagattctgcgcctgcctcgtcccctcagctttcacacgatgatactcattcacgcattgaacattatgctagcaggctagcagaaatggaaaacagcaatggatcttatctaaatgatagcatctctcctaatgagagcatagatgatgaacatttgttaatccagcattactgccaaagtttgaaccaggactcccccctgagccagcctcgtagtcctgcccagatcttgatttccttagagagtgaggaaagaggggagctagagagaatcctagcagatcttgaggaagaaaacaggaatctgcaagcagaatatgaccgtctaaagcagcagcacgaacataaaggcctgtccccactgccgtcccctcctgaaatgatgcccacctctccccagagtccccgggatgctgagctcattgctgaggccaagctactgcgtcaacacaaaggccgcctggaagccaggatgcaaatcctggaagaccacaataaacagctggagtcacagttacacaggctaaggcagctgctggagcaaccccaggcagaggccaaagtgaatggcacaacggtgtcctctccttctacctctctacagaggtccgacagcagtcagcctatgctgctccgagtggttggcagtcaaacttcggactccatgggtgaggaagatcttctcagtcctccccaggacacaagcacagggttagaggaggtgatggagcaactcaacaactccttccctagttcaagaggaagaaatacccctggaaagccaatgagagaggacacaatgtaggaagtcttttccacatggcagatgatttgggcagagcgatggagtccttagtatcagtcatgacagatgaagaaggagcagaataaatgttttacaactcctgattcccgcatggtttttataatattcatacaacaaagaggattagacagtaagagtttacaagaaataaatctatatttttgtgaagggtagtggtattatactgtagatttcagtagtttctaagtctgttattgttttgttaacaatggcaggttttacacgtctatgcaattgtacaaaaaagttataagaaaactacatgtaaaatcttgatagctaaataacttgccatttctttatatggaacgcattttgggttgtttaaaaatttataacagttataaagaaagattgtaaactaaagtgtgctttataaaaaaaagttgtttataaaaacccctaaaaacaaaacaaacacacacacacacacatacacacacacacacaaaactttgaggcagcgcattgttttgcatccttttggcgtgatatccatatgaaattcatggctttttctttttttgcatattaaagataagacttcctctaccaccacaccaaatgactactacacactgctcatttgagaactgtcagctgagtggggcaggcttgagttttcatttcatatatctatatgtctataagtatataaatactatagttatatagataaagagatacgaatttctatagactgactttttccattttttaaatgttcatgtcacatcctaatagaaagaaattacttctagtcagtcatccaggcttacctgcttggtctagaatggatttttcccggagccggaagccaggaggaaactacaccacactaaaacattgtctacagctccagatgtttctcattttaaacaactttccactgacaacgaaagtaaagtaaagtattggatttttttaaagggaacatgtgaatgaatacacaggacttattatatcagagtgagtaatcggttggttggttgattgattgattgattgatacattcagcttcctgctgctagcaatgccacgatttagatttaatgatgcttcagtggaaatcaatcagaaggtattctgaccttgtgaacatcagaaggtattttttaactcccaagcagtagcaggacgatgatagggctggagggctatggattcccagcccatccctgtgaaggagtaggccactctttaagtgaaggattggatgattgttcataatacataaagttctctgtaattacaactaaattattatgccctcttctcacagtcaaaaggaactgggtggtttggtttttgttgcttttttagatttattgtcccatgtgggatgagtttttaaatgccacaagacataatttaaaataaataaactttgggaaaaggtgtaaaacagtagccccatcacatttgtgatactgacaggtatcaacccagaagcccatgaactgtgtttccatcctttgcatttctctgcgagtagttccacacaggtttgtaagtaagtaagaaagaaggcaaattgattcaaatgttacaaaaaaacccttcttggtggattagacaggttaaatatataaacaaacaaacaaaaattgctcaaaaaagaggagaaaagctcaagaggaaaagctaaggactggtaggaaaaagctttactctttcatgccattttatttctttttgatttttaaatcattcattcaatagataccaccgtgtgacctataattttgcaaatctgttacctctgacatcaagtgtaattagcttttggagagtgggctgacatcaagtgtaattagcttttggagagtgggttttgtccattattaataattaattaattaacatcaaacacggcttctcatgctatttctacctcactttggttttggggtgttcctgataattgtgcacacctgagttcacagcttcaccacttgtccattgcgttattttctttttcctttataattctttctttttccttcataattttcaaaagaaaacccaaagctctaaggtaacaaattaccaaattacatgaagatttggtttttgtcttgcatttttttcctttatgtgacgctggaccttttctttacccaaggatttttaaaactcagatttaaaacaaggggttactttacatcctactaagaagtttaagtaagtaagtttcattctaaaatcagaggtaaatagagtgcataaataattttgttttaatctttttgtttttcttttagacacattagctctggagtgagtctgtcataatatttgaacaaaaattgagagctttattgctgcattttaagcataattaatttggacattatttcgtgttgtgttctttataaccaccaagtattaaactgtaaatcataatgtaactgaagcataaacatcacatggcatgttttgtcattgttttcaggtactgagttcttacttgagtatcataatatattgtgttttaacaccaacactgtaacatttacgaattatttttttaaacttcagttttactgcattttcacaacatatcagacttcaccaaatatatgccttactattgtattatagtactgctttactgtgtatctcaataaagcacgcagttatgttac

SEQ ID NO: 59 - DNA, 8993 bp, Homo sapiens
gcgccacgggcctccccgcaccagcagaagtcggagtcgctgttgggggcggtgtctatggttgagctgagggcgcaggcgccacggcccgtcgagctgggttccaaggcggctggcggcggtagcgtctctgtttccttgtgggcgctcgcgcggccctgggtagtctgtagagaatgccaaatgagggaatcccccactcaagtcaaactcaggagcaagactgtttacagagtcaacctgtcagtaataatgaagaaatggcaatcaagcaagaaagtggtggtgatggggaggtggaggagtacctctcctttcgttctgtgggtgacgggctgtccacctctgctgtggggtgcgcatcagcagctccgaggagagggccagccctgctgcacatcgaccgacatcagatccaggcagtagagcctagcgcccaggcccttgagctgcagggtttgggtgtggacgtctatgaccaggacgtgctggaacagggagtgcttcagcaggtggacaatgccatccatgaggccagccgtgcctcccagctcgttgacgtggagaaggagtatcggtcggtcctggatgacctcacgtcatgtacgacatccctaaggcaaatcaataaaattattgaacagcttagccctcaagctgccaccagcagagacatcaacaggaaactagattctgtaaaacgacagaagtataataaggaacaacagctaaaaaagatcactgcaaaacaaaagcatctccaggccatccttggaggagcagaggtgaaaattgaactagatcacgccagtctggaggaggatgcagagccggggccatccagtcttggcagcatgctcatgcctgtccaggagactgcctgggaagagctcatccgcactggccagatgacaccttttggtacccagatccctcagaaacaggagaaaaagcccagaaaaatcatgcttaatgaagcatcaggcttcgaaaagtatttggcagatcaagcaaaactgtcttttgaaaggaagaagcaaggttgtaataaaagagcagctagaaaagctccagccccagtcacgcctccagccccagtgcaaaataaaaacaaaccaaacaagaaagccagagttctgtccaaaaaagaggagcgtttgaaaaagcacatcaagaaactccagaagagggctttgcagttccaggggaaagtgggattgccaaaggcaaggagaccttgggagtcagacatgaggccagaggcagagggagactctgagggtgaagagtctgagtatttccccacagaggaggaggaagaggaggaagatgacgaggtggagggggcagaggcggacctgtctggagatggtactgactatgagctgaagcctctgcccaagggcgggaaacggcagaagaaagtgccagtgcaggagattgatgatgactttttcccaagttctggggaagaagctgaagctgcttctgtaggagaaggaggaggaggaggtcggaaagtgggaagataccgagatgatggagatgaagattattataagcagcggttaaggagatggaataaactgagactgcaggacaaagagaaacgtctgaagctggaggacgattctgaggaaagtgatgctgaatttgacgaaggttttaaagtgccaggttttctgttcaaaaagctttttaagtaccagcagacaggtgttaggtggctgtgggaattgcactgccagcaggcaggaggaattctgggagatgaaatgggattgggcaagaccatccagataattgccttcttggcaggtctgagctacagcaagatcaggactcgtggttcaaattacaggtttgaggggttgggtccaactgtaattgtctgtccaacaacagtgatgcatcagtgggtgaaggaatttcacacgtggtggcctccgttcagagtggcaattctacatgaaaccggttcctatacccacaaaaaggagaaactaattcgagatgttgctcattgtcatggaattttgatcacatcttactcctacattcgattgatgcaggatgacattagcaggtatgactggcactatgtgatcttggacgaaggacacaaaattcgaaatccaaatgctgctgtcacccttgcttgcaaacagtttcgcacccctcatcggatcattctgtctggctcaccgatgcaaaataacctccgagagctgtggtcgctctttgacttcatcttcccgggaaagttaggcacgttgcctgtgtttatggagcagttctccgtccccatcaccatggggggatattcaaatgcttccccagtacaggtcaaaactgcttacaagtgtgcatgtgtcttacgagataccataaatccatacctactgcggagaatgaagtcagatgtcaagatgagcctttctttgccagataaaaatgaacaggtcttattttgccgtcttacagatgagcagcataaagtctaccaaaatttcgttgattccaaagaagtttacaggattctcaatggagagatgcagattttctccggacttatagccctaagaaaaatttgcaaccaccctgatctcttttctggaggtcccaagaatctcaaaggtcttcctgatgatgaactagaagaagatcagtttgggtactggaaacgttctgggaaaatgattgttgttgagtctttgttgaaaatatggcacaagcagggtcagcgagtattgctgttttctcagtcaaggcagatgctggacatacttgaagtattccttagagcccaaaagtatacctatctcaagatggatggtaccactacaatagcttcaagacagccactgattacgagatacaatgaggacacatccatatttgtgtttcttctgaccacgcgggtgggcggcttaggtgtcaacctgacgggggcaaacagagttgtcatctatgacccagactggaacccaagcacggacacgcaggcccgggagcgagcatggagaataggccagaagaagcaagtgactgtgtacaggctcctgactgcgggcaccattgaagaaaagatctaccaccgacaaatcttcaagcagtttttgacaaatagagtgctaaaagacccaaaacaaaggcggtttttcaaatccaatgatctctatgagctatttactctgactagtcctgatgcatcccagagcactgaaacaagtgcaatttttgcaggaactggatcagatgttcagacacccaaatgccatctaaaaagaaggattcaaccagcctttggagcagaccatgatgttccaaaacgcaagaagttccctgcttctaacatatctgtaaatgatgccacatcatctgaagagaaatctgaggctaaaggagctgaagtaaatgcagtaacttctaatcgaagtgatcctttgaaagatgaccctcacatgagtagtaatgtaactagcaatgataggcttggagaagagacaaatgcagtatctggaccagaagagttgtcagtgattagtggaaatggggaatgttcaaattcttcaggaacaggcaaaacttctatgccatctggtgatgaaagcattgatgaaaagttaggtctttcttacaaaagagaaagacccagccaggctcaaacagaagctttttgggagaataaacaaatggaaaataatttttataagcacaagtcaaaaacaaaacatcatagtgtggcagaagaagagaccctggagaaacatctgagaccaaagcaaaagcctaagaactctaagcattgcagagacgccaagtttgaaggaactcgaattccacacctggtgaagaaaaggcgttaccagaagcaagacagtgaaaacaagagtgaggccaaggaacagagcaatgacgattatgttttggaaaagcttttcaaaaaatcagttggcgtgcacagtgtcatgaagcacgatgccatcatggatggagccagcccagattatgtactggtggaggcagaagccaaccgagtggcccaggatgccctgaaagcactgaggctctctcgtcagcggtgtctgggagcagtgtctggtgttcccacctggactggccacagggggatttctggtgcaccagcaggaaaaaagagtagatttggtaagaaaaggaattctaacttctctgtgcagcatccttcatcaacatctccaacagagaagtgccaggatggcatcatgaaaaaggagggaaaagataatgtccctgagcattttagtggaagagcagaagatgcagactcttcatccgggcccctcgcttcctcctcactcttggctaaaatgagagctagaaaccacctgattctgccagagcgtttagaaagtgaaagcgggcacctgcaggaagcttctgccctgctgcccaccacagaacacgatgaccttctggtggagatgagaaacttcatcgctttccaggcccacactgatggccaggccagcaccagggagatactgcaggagtttgaatccaagttatctgcatcacagtcttgtgtcttccgagaactattgagaaatctgtgcactttccatagaacttctggtggtgaaggaatttggaaactcaagccagaatactgctaaacaacattgcttcctaaactttcaagtccctttttctaacgggcatttctgattattaatttattattaataatcatgtttgtcaatggaagttggctgcacttgatgtttgtttgcatgatgtctacctcagaattaaaactttaaggaagaagaaactcttctctgaaagttaaaagttttaataatgctagctaaaggagaaaatacttggattgatttttttttttttggcaatctaattatattgtaaatcaggtacctaacagttactccttggagcacatttgttcctttacccaaaagatgctgtcagggagcacagttagaagtttgcagaacagaaatctcaatatttttttttattggtgctaaaaacaggtcttacattcagtcagacctgttcaataagttcatcaatatctgataacagcattattttgatgcttaaactttaaacatttatatttaccatttgccacccacaaaggtcaggtttgttatttgttgtttgataattatattaattttcttggaaagatcctcttttcaaggtactggtaaattggtgagtatttttattagtaaagcatgaaatagtatggtaataaatgataagacatgtatttgtggaaagctgtagggtattcagtttaccctggctttcctttaagcagagggcatctttttctctcctacagtcacaaaatgtgttatcattaaaaaaaatcaaattaaagccaaaagtaggtacataaaaaccacacacatgcatgcacacaaacatcactgcagcccacagcagacccagccgttgttaccatgaagtgacaccactccaggcctctcttgtctgcaggctggcaggctgtcttctctccagttgccttcgtcttgcgcctgcctttgcattccttgcgacgggctttcttgtttctgcggtttggattccagccaaggctgtttgtatctcactactgtttatgtgtttgtggttctgtgatggtgttgctttgatcctcagtttattttcttacccatgtttttcttgtttccttctcaggatgattttatcatctcatctttgaagtgttgttttccgaaattcatcgtattcctgaaatttcttcttagctgtcttagtgcagtttgtttcttggatttgtattctctggcatgctcttttcctctctctcatttttctgtagtatgcctgccctcctaccctgctatttctttacatctctctcatgcttaacatggatagctgtgtccagatcttctgtctgctcatccatgtgactcagagaggagggttctgggcaggggggccttgccggactgcatgagaggacatgagttttgctttctctgctctaatattttgcttaagccaagaatccttttcttagagatgttctatatgattcctgtcaggattttctagttttttttggattatagcttgttcatttcttttgtttttagtttggtttatatataatgagggaagaagatgattacattatttttgtcactttgccatcattgtttagaagtcatagaaagaatttttaaataggccaataagtcttaaacttgagtacttggcttagaagaaagtcaaaactccttcctttttgactaagtggtttgtttctggggagctcttaatttctatttttataatcattagcctataaggaaattgtgtcttccttgttctcagggtgatctgctgaccttgttcactcatgaagcatttgggtatcatacttatagtgtctgaaacataaactgtattgagctagacaaggtatagcctcctcttcaagtagcaaatactatcaaaagctataatgcagtaggagcaaggtggtccttgttccagtttttgtctcagttctgctgctgatgtaccatgatcttgggaaggtggtgtctcagtgtggagatctgacacattgttaccgtgcctcctggctggagggacttggagaacaatgcagttaagtagaatggttttaacaatacagagaaatttattcatttagataaaaatctgatttttagaactttaaaagctttgtacagtgtaaatagatttaatgtatttaacatgctttatcagcacaaataaaggattttaaaattttgtcaaaaaattaaatgttaatactatcaccattaaaaatgttcaagcaatagtctgcctccccacccccacaccatcttgcacctgttccacagctaagtacagccctaggtttggtgtgtattctccatgcatttagagaatcacatgacacagactgctgctataatgtcattttcccattcttcctttactaataaaatttttgagttttacctggacgtctggctgctcagcttaagactacttctcagcctctcttatagttaattgtggccatatgactaagttttaaacttcccaattggccctttaaagaagcagggtatgcactctccttgacattcccctttcttgctggctgggaggccaatgggagcttcagtagtgacctggcatctcaagagatggaagtgatgtgttgaggaaggagaagttggcctgccagtcttgaactgctctcctttgacctgttatttaagagtaaaataaaatactgacttgcttaagctactgtcttttgaagtctattatagcaattagtttgctttaaatatgtaatttatattaatggccttataccatccttattttgcaactaacttttcatttaatattatatgcaagacatttctattcctgtaagtatagctctgcctgcacagaattgttggattaatgatgtagattttaaatgtcagtggatgtagcagaattgcttgcatcaattcaccctccataaaaggacccatttctccaaacccttgccaacagtaagtggtatcaatatcgataggttgttttgttttgttttaaccagtctcgtgattgaaagtaccttgttttcacttgaatttccctgattacgtacaaaatcaaacatttccatgtttattggccatttgtagatctctaccgtacattgcctattagtgttatgttggcctagttttcctgtgggttgtttatcttttaggattgctcccctaaacaaaaacaaaaaggcagttattccaatgatcaacaaatattcttttctccaccagtttaaaatgtcagctttcaactcatcacatgctaagttgtctatttctgtcctgtggatccaggtgttggttctaccaaccacactcctcacgctgtcatttggtgctttgcattgtgttttgccattcatgggcaagttccttttcctttctccccctcttcagtgtcttatacttgggtgttttctgttccagctgaatcaagaattagtttattaaattccagtaaaattgtggtgttcttttgactaggattgcatttgtttacacattaatttgagaataatagacctctttataattaatataatgtttctgattagtgttatgataggcctcattttattaaagtcttttatattcttggatgaaattttaataactttcttcataaatgtcttgcacatttcataataggcttattcctaggtgttttatagatttttagttttggttgtgagtcttttaacttacataaaaatatggagaattagcatattcacatatctattttgtgatgtttatcatacggaagttttaaaatatagtaaattcagtctttccatttttttttgtttatttaagaaccattccctagctagggtcatgaatacattcttatgaattattaatcccatatggatagctagtttccctagcacctttaaaaaatagtttattattttcctcctgatgtataaggccacctttaccaatttacatataatgtacggaaatgtttcttggctctgcattctgttaaattggtccatttatctaactttgcttagtaacccactgtttttatcattgtggtatcataattgattatcacaaatggtagaatgattgtcctcaaagtcttttctggtatatattgatataattgtatagcttttcttggtgtagtaaagtacacagttaaattttctaacattgaaatatcttttagattttcacttccagaatggcaatgtgaagggccctgtggacccactgtcctaggaattagctataactagtgaaaattgtaacaaaaaataaacaccttcctctcatacagagagacacaaacacttaatgccactggaaattgtcctaaaagcatgtagaataaagtaacgcttattcaag

SEQ ID NO: 60 - DNA, 3897 bp, Homo sapiens
actcaaaatggcggcggcggcgtcagcatcagcggcctcctgcccgtatctatcgtggcggcgacgggacccgcctccctgggcgccggagtcatgtgacccacacaatggctgagtggctactctcggcttcctggcaacgccgagcgaaagctatgactgcggccgcgggttcggcgggccgcgccgcggtgcccttgctgctgtgtgcgctgctggcgcccggcggcgcgtacgtgctcgacgactccgacgggctgggccgggagttcgacggcatcggcgcggtcagcggcggcggggcaacctcccgacttctagtaaattacccagagccctatcgttctcagatattggattatctctttaagccgaattttggtgcctctttgcatattttaaaagtggaaataggtggtgatgggcagacaacagacggcactgagccctcccacatgcattatgcactagatgagaattatttccgaggatacgagtggtggttgatgaaagaagctaagaagaggaatcccaatattacactcattgggttgccatggtcattccctggatggctgggaaaaggtttcgactggccttatgtcaatcttcagctgactgcctattatgtcgtgacctggattgtgggcgccaagcgttaccatgatttggacattgattatattggaatttggaatgagaggtcatataatgccaattatattaagatattaagaaaaatgctgaattatcaaggtctccagcgagtgaaaatcatagcaagtgataatctctgggagtccatctctgcatccatgctccttgatgccgaactcttcaaggtggttgatgttataggggctcattatcctggaacccattcagcaaaagatgcaaagttgactgggaagaagctttggtcttctgaagactttagcactttaaatagtgacatgggtgcaggctgctggggtcgcattttaaatcagaattatatcaatggctatatgacttccacaatcgcatggaatttagtggctagttactatgaacagttgccttatgggagatgcgggttgatgacggcccaggagccatggagtgggcactacgtggtagaatctcctgtctgggtatcagctcataccactcagtttactcaacctggctggtattacctgaagacagttggccatttagagaaaggaggaagctacgtagctctgactgatggcttagggaacctcaccatcatcattgaaaccatgagtcataaacattctaagtgcatacggccatttcttccttatttcaatgtgtcacaacaatttgccacctttgttcttaagggatcttttagtgaaataccagagctacaggtatggtataccaaacttggaaaaacatccgaaagatttctttttaagcagctggattctctatggctccttgacagcgatggcagtttcacactgagcctgcatgaagatgagctgttcacactcaccactctcaccactggtcgcaaaggcagctacccgcttcctccaaaatcccagcccttcccaagtacctataaggatgatttcaatgttgattacccattttttagtgaagctccaaactttgctgatcaaactggtgtatttgaatattttacaaatattgaagaccctggcgagcatcacttcacgctacgccaagttctcaaccagagacccattacgtgggctgccgatgcatccaacacaatcagtattataggagactacaactggaccaatctgactataaagtgtgatgtatacatagagacccctgacacaggaggtgtgttcattgcaggaagagtaaataaaggtggtattttgattagaagtgccagaggaattttcttctggatttttgcaaatggatcttacagggttacaggtgatttagctggatggattatatatgctttaggacgtgttgaagttacagcaaaaaaatggtatacactcacgttaactattaagggtcatttcacctctggcatgctgaatgacaagtctctgtggacagacatccctgtgaattttccaaagaatggctgggctgcaattggaactcactcctttgaatttgcacagtttgacaactttcttgtggaagccacacgctaatacttaacagggcatcatagaatactctggattttcttcccttctttttggttttggttcagagccaattcttgtttcattggaacagtatatgaggcttttgagactaaaaataatgaagagtaaaaggggagagaaatttatttttaatttaccctgtggaagattttattagaattaattccaaggggaaaactggtgaatctttaacattacctggtgtgttccctaacattcaaactgtgcattggccatacccttaggagtggtttgagtagtacagacctcgaagccttgctgctaacactgaggtagctctcttcatcttatttgcaagcggtcctgtagatggcagtaacttgatcatcactgagatgtatttatgcatgctgaccgtgtgtccaagtgagccagtgtcttcatcacaagatgatgctgccataatagaaagctgaagaacactagaagtagctttttgaaaaccacttcaacctgttatgctttatgctctaaaaagtatttttttattttcctttttaagatgatacttttgaaatgcaggatatgatgagtgggatgattttaaaaatgcctctttaataaactacctctaacactatttctgcagtaatagatattagcagattaattgggttatttgcattatttaatttttttgattccaagttttggtcttgtaaccactataactctctgtgaacgtttttccaggtggctggaagaaggaagaaaacctgatatagccaatgctgttgtagtcgtttcctcagcctcatctcactgtgctgtggtctgtcctcacatgtgcactggtaacagactcacacagctgatgaatgcttttctctccttatgtgtggaaggaggggagcacttagacatttgctaactcccagaattggatcatctcctaagatgtacttactttttaaagtccaaatatgtttatatttaaatatacgtgagcgtgttcatcatgttgtatgatttatactaagcattaatgtggctctatgtagcaaatcagttattcatgtaggtaaagtaaatctagaattatttataagaattactcattgaactaattctactatttaggaatttgtaagagtctaacataggcttagctacagtgaagttttgcattgcttttgaagacaagaagataagtgctagaataaataagattacagagaaaattttttgttaaaaccaagtgatttccagctgatgtatctaatattttttaaaacgaacattatagaggtgtaatttatttacaataaaatgttcctactttaaatatacaattcagtgagttttgataaattgatatacccatgtaaccaacactccagtcaagcttcagaatatttccatcaccccagaaggttctcttgtatacctgctcagtcagttcctttcactcccaattgttggcagccattgataggaattctatcactataggttagttttctttgttccagaacatcatgaaagcggcgtcatgtactgtgtattcttatgaatggtttctttccatcagcataatgatttgagatttgtccatgttgtgtgattcagtggtttgttccttcttatttctgaagagttttccattgtatgaatataccacaatttgtttcctccccaccagtttctgatactacaattaaaactgtctacatttacaaaaaaaaaaaaaaaa

SEQ ID NO: 61 - DNA, 4563 bp, Homo sapiens
cggcggcggcggcggcagcggcagcagcagctgctacagtggcggtggcggcggcggctgctgctgagcccgggcggcggcggggaccccgggctggggccacgcgggccggaggccccggcaccattggccccagcgcagacgcgaacccgcgctctctgatcagaggcgaagctcggaggtcctacaggtatggatctctggcagctgctgttgaccttggcactggcaggatcaagtgatgctttttctggaagtgaggccacagcagctatccttagcagagcaccctggagtctgcaaagtgttaatccaggcctaaagacaaattcttctaaggagcctaaattcaccaagtgccgttcacctgagcgagagactttttcatgccactggacagatgaggttcatcatggtacaaagaacctaggacccatacagctgttctataccagaaggaacactcaagaatggactcaagaatggaaagaatgccctgattatgtttctgctggggaaaacagctgttactttaattcatcgtttacctccatctggataccttattgtatcaagctaactagcaatggtggtacagtggatgaaaagtgtttctctgttgatgaaatagtgcaaccagatccacccattgccctcaactggactttactgaacgtcagtttaactgggattcatgcagatatccaagtgagatgggaagcaccacgcaatgcagatattcagaaaggatggatggttctggagtatgaacttcaatacaaagaagtaaatgaaactaaatggaaaatgatggaccctatattgacaacatcagttccagtgtactcattgaaagtggataaggaatatgaagtgcgtgtgagatccaaacaacgaaactctggaaattatggcgagttcagtgaggtgctctatgtaacacttcctcagatgagccaatttacatgtgaagaagatttctactttccatggctcttaattattatctttggaatatttgggctaacagtgatgctatttgtattcttattttctaaacagcaaaggattaaaatgctgattctgcccccagttccagttccaaagattaaaggaatcgatccagatctcctcaaggaaggaaaattagaggaggtgaacacaatcttagccattcatgatagctataaacccgaattccacagtgatgactcttgggttgaatttattgagctagatattgatgagccagatgaaaagactgaggaatcagacacagacagacttctaagcagtgaccatgagaaatcacatagtaacctaggggtgaaggatggcgactctggacgtaccagctgttgtgaacctgacattctggagactgatttcaatgccaatgacatacatgagggtacctcagaggttgctcagccacagaggttaaaaggggaagcagatctcttatgccttgaccagaagaatcaaaataactcaccttatcatgatgcttgccctgctactcagcagcccagtgttatccaagcagagaaaaacaaaccacaaccacttcctactgaaggagctgagtcaactcaccaagctgcccatattcagctaagcaatccaagttcactgtcaaacatcgacttttatgcccaggtgagcgacattacaccagcaggtagtgtggtcctttccccgggccaaaagaataaggcagggatgtcccaatgtgacatgcacccggaaatggtctcactctgccaagaaaacttccttatggacaatgcctacttctgtgaggcagatgccaaaaagtgcatccctgtggctcctcacatcaaggttgaatcacacatacagccaagcttaaaccaagaggacatttacatcaccacagaaagccttaccactgctgctgggaggcctgggacaggagaacatgttccaggttctgagatgcctgtcccagactatacctccattcatatagtacagtccccacagggcctcatactcaatgcgactgccttgcccttgcctgacaaagagtttctctcatcatgtggctatgtgagcacagaccaactgaacaaaatcatgccttagcctttctttggtttcccaagagctacgtatttaatagcaaagaattgactggggcaataacgtttaagccaaaacaatgtttaaaccttttttgggggagtgacaggatggggtatggattctaaaatgccttttcccaaaatgttgaaatatgatgttaaaaaaataagaagaatgcttaatcagatagatattcctattgtgcaatgtaaatattttaaagaattgtgtcagactgtttagtagcagtgattgtcttaatattgtgggtgttaatttttgatactaagcattgaatggctatgtttttaatgtatagtaaatcacgctttttgaaaaagcgaaaaaatcaggtggcttttgcggttcaggaaaattgaatgcaaaccatagcacaggctaattttttgttgtttcttaaataagaaacttttttatttaaaaaactaaaaactagaggtgagaaatttaaactataagcaagaaggcaaaaatagtttggatatgtaaaacatttattttgacataaagttgataaagattttttaataatttagacttcaagcatggctattttatattacactacacactgtgtactgcagttggtatgacccctctaaggagtgtagcaactacagtctaaagctggtttaatgttttggccaatgcacctaaagaaaaacaaactcgttttttacaaagcccttttatacctccccagactccttcaacaattctaaaatgattgtagtaatctgcattattggaatataattgttttatctgaatttttaaacaagtatttgttaatttagaaaactttaaagcgtttgcacagatcaacttaccaggcaccaaaagaagtaaaagcaaaaaagaaaacctttcttcaccaaatcttggttgatgccaaaaaaaaatacatgctaagagaagtagaaatcatagctggttcacactgaccaagatacttaagtgctgcaattgcacgcggagtgagttttttagtgcgtgcagatggtgagagataagatctatagcctctgcagcggaatctgttcacacccaacttggttttgctacataattatccaggaagggaataaggtacaagaagcattttgtaagttgaagcaaatcgaatgaaattaactgggtaatgaaacaaagagttcaagaaataagtttttgtttcacagcctataaccagacacatactcatttttcatgataatgaacagaacatagacagaagaaacaaggttttcagtccccacagataactgaaaattatttaaaccgctaaaagaaactttctttctcactaaatcttttataggatttatttaaaatagcaaaagaagaagtttcatcattttttacttcctctctgagtggactggcctcaaagcaagcattcagaagaaaaagaagcaacctcagtaatttagaaatcattttgcaatcccttaatatcctaaacatcattcatttttgttgttgttgttgttgttgagacagagtctcgctctgtcgccaggctagagtgcggtggcgcgatcttgactcactgcaatctccacctcccacaggttcaggcgattcccgtgcctcagcctcctgagtagctgggactacaggcacgcaccaccatgccaggctaatttttttgtattttagcagagacggggtttcaccatgttggccaggatggtctcgatctcctgacctcgtgatccacccgactcggcctcccaaagtgctgggattacaggtgtaagccaccgtgcccagccctaaacatcattcttgagagcattgggatatctcctgaaaaggtttatgaaaaagaagaatctcatctcagtgaagaatacttctcattttttaaaaaagcttaaaactttgaagttagctttaacttaaatagtatttcccatttatcgcagaccttttttaggaagcaagcttaatggctgataattttaaattctctctcttgcaggaaggactatgaaaagctagaattgagtgtttaaagttcaacatgttatttgtaatagatgtttgatagattttctgctactttgctgctatggttttctccaagagctacataatttagtttcatataaagtatcatcagtgtagaacctaattcaattcaaagctgtgtgtttggaagactatcttactatttcacaacagcctgacaacatttctatagccaaaaatagctaaatacctcaatcagtctcagaatgtcattttggtactttggtggccacataagccattattcactagtatgactagttgtgtctggcagtttatatttaactctctttatgtctgtggattttttccttcaaagtttaataaatttattttcttggattcctgatagtgtgcttctgttatcaaacaccaacataaaaatgatctaaacca

SEQ ID NO: 62 - DNA, 7109 bp, Homo sapiens
tggattatgatttttgtttatttttcctgtttatccatatattatttttcaacaatgagtattgattacttatataataattttaaggctgtacacattgcagacagcaccccactgtttgaaaaactcctcctcagtagaacatggcagaccttcatcttccttccctgaaccttttccaaccttaggcttgccattctccaccagtgctaatgtcatgtctcttgaaatctgtattgaagtcagtatttcattcttgccagtttccactgtgtgtttaaatttggagtctggtgtctagcattagctggggttggagcttccactcctctcagcattggtaagcctcctcacccaccccatcccatgtccaagatcacccagttacacacttaccatctacccagttcattcacatcatcagtcccagagctgcagagatgctctttttctacctcctacttctctggctcttagagaggcagcatgggataatggggcaagcgaatagggccttaaagtagagggacaagggttctcttccctatctgccacttattagctatgtgacctcgtgtaagtctcttttctttttgagacagggtctccctctgtcacctaggctggagtacagtggtatgatcatagctcactgcagcctcgaactcctgggctcaagctatccttccaccttagccttctgagcagcagggactacaggcacatgccaccatgtccggctgatttatttatttttatttgggaagatgggggtctcactatgtcgcccaggctggtcatgaactcctggtctcaagcaaccctccaaccttggactcccaaagtgctgggattacaggtgtgagccctggccttgcctcaatttcctcatctgtaaaacggggttagtgaaactcacatcctatcagtggttttgaggatgggccgactcttgtattgcctgctctagtacaatcagcagctaaggcggctcactttccggccgtgctacaataggtaagaactaggatgctttagacgtgtgactgggcagtgggagcccctcacatgatcccgagatgccagacagtgtctctccgcacagggcgtgtgctggtccagaggcccgtttttccagtcgccccacaccccgggtccgcgatcacgctccccccacccatagccgagcctgacgcggcggtggctcatgcgcctttccgtcccagcctttagccacggaccacacgtcccatctcaggcgccccgcccctcccccgccccccgcccccggcgcgcctccccaggctgccggctccggtgtctgagcggccgcgcccgcgagccgtgagcgatgattggctgcgccacggcggcgggcggtccgtgggcgcacacaccctccccgcgcagccaatgggcgtgcgcacgtcactgatccggaggcccgcgggccggcagcccctcaataagccacattgttgcatgaaactccggcgcaggagtcccgggctgccgctggcaacatcgtgtcacccagctaagaaaatccgcgggcccgagccacgcgcctgtgaatcggagaggtcccactgcccgagtggagccgggctgagattcttctcaagttgagcctcagtgatcctgtggccgaagttagcgccttgacgtgggacaaccggacacgtcgccaggagagaactgaggcgccttctagcagttgtgacgccaaaatcacgtctccggagacccgcgccctccgccagccgggcgcaccctcgccggtagccttctttgtgcgccgtccggactcccagctcccggcccggcagccgagccccagcacaaagcagtcggaccgcgccgcccgcctcccctctcgcgtctccgcctcggtttcccaactctgcgccgtcgggccgcggcaggatgattgcctcgcatctgcttgcctacttcttcacggagctcaaccatgaccaagtgcagaaggttgaccagtatctctaccacatgcgcctctctgatgagaccctcttggagatctctaagcggttccgcaaggagatggagaaagggcttggagccaccactcaccctactgcagcagtgaagatgctgcccacctttgtgaggtccactccagatgggacagaacacggagagttcctggctctggatcttggagggaccaacttccgtgtgctttgggtgaaagtaacggacaatgggctccagaaggtggagatggagaatcagatctatgccatccctgaggacatcatgcgaggcagtggcacccagctgtttgaccacattgccgaatgcctggctaacttcatggataagctacaaatcaaagacaagaagctcccactgggttttaccttctcgttcccctgccaccagactaaactagacgagagtttcctggtctcatggaccaagggattcaagtccagtggagtggaaggcagagacgttgtggctctgatccggaaggccatccagaggagaggggactttgatatcgacattgtggctgtggtgaatgacacagttgggaccatgatgacctgtggttatgatgaccacaactgtgagattggtctcattgtgggcacgggcagcaacgcctgctacatggaagagatgcgccacatcgacatggtggaaggcgatgaggggcggatgtgtatcaatatggagtggggggccttcggggacgatggctcgctcaacgacattcgcactgagtttgaccaggagattgacatgggctcactgaacccgggaaagcaactgtttgagaagatgatcagtgggatgtacatgggggagctggtgaggcttatcctggtgaagatggccaaggaggagctgctctttggggggaagctcagcccagagcttctcaacaccggtcgctttgagaccaaagacatctcagacattgaaggggagaaggatggcatccggaaggcccgtgaggtcctgatgcggttgggcctggacccgactcaggaggactgcgtggccactcaccggatctgccagatcgtgtccacacgctccgccagcctgtgcgcagccaccctggccgccgtgctgcagcgcatcaaggagaacaaaggcgaggagcggctgcgctctactattggggtcgacggttccgtctacaagaaacacccccattttgccaagcgtctacataagaccgtgcggcggctggtgcccggctgcgatgtccgcttcctccgctccgaggatggcagtggcaaaggtgcagccatggtgacagcagtggcttaccggctggccgatcaacaccgtgcccgccagaagacattagagcatctgcagctgagccatgaccagctgctggaggtcaagaggaggatgaaggtagaaatggagcgaggtctgagcaaggagactcatgccagtgcccccgtcaagatgctgcccacctacgtgtgtgctaccccggacggcacagagaaaggggacttcttggccttggaccttggaggaacaaatttccgggtcctgctggtccgtgttcggaatgggaagtggggtggagtggagatgcacaacaagatctacgccatcccgcaggaggtcatgcacggcaccggggacgagctctttgaccacattgtccagtgcatcgcggacttcctcgagtacatgggcatgaagggcgtgtccctgcctctgggttttaccttctccttcccctgccagcagaacagcctggacgagagcatcctcctcaagtggacaaaaggcttcaaggcatctggctgcgagggcgaggacgtggtgaccctgctgaaggaagcgatccaccggcgagaggagtttgacctggatgtggttgctgtggtgaacgacacagtcggaactatgatgacctgtggctttgaagaccctcactgtgaagttggcctcattgttggcacgggcagcaatgcctgctacatggaggagatgcgcaacgtggaactggtggaaggagaagaggggcggatgtgtgtgaacatggaatggggggccttcggggacaatggatgcctagatgacttccgcacagaatttgatgtggctgtggatgagctttcactcaaccccggcaagcagaggttcgagaaaatgatcagtggaatgtacctgggtgagattgtccgtaacattctcatcgatttcaccaagcgtggactactcttccgaggccgcatctcagagcggctcaagacaaggggcatctttgaaaccaagttcttgtctcagattgagagtgactgcctggccctgctgcaagtccgagccatcctgcaacacttagggcttgagagcacctgtgacgacagcatcattgttaaggaggtgtgcactgtggtggcccggcgggcagcccagctctgtggcgcaggcatggccgctgtggtggacaggatacgagaaaaccgtgggctggacgctctcaaagtgacagtgggtgtggatgggaccctctacaagctacatcctcactttgccaaagtcatgcatgagacagtgaaggacctggctccgaaatgtgatgtgtctttcctgcagtcagaggatggcagcgggaagggggcggcgctcatcactgctgtggcctgccgcatccgtgaggctggacagcgatagaacccctgaaatcggaagggacttcctctttctctccttcttccctgttttaaattataagatgtcatccccttgtgtcagagacagaccccttggcttttgcttggcagagaggaccccactggactgggttttgtctctgcatctcattgtagagcttggtggctgagcttggccctattaagataaatagagttccaaataaggatttgttcacatgcatcataaccattcccattggttctcctaaaacatgaaaattatctcccttagtaatcccccttgccaaattccatgtccctgtataattctacaggatggggacactaatgaagatacggttgcttcaccttggagcctgaacatgacatttctaagtggggtgcatcccccagcactgatgttgttactgattctcctgtcagagatctgggaggtctccactgaggatgtgagcctgattatcctataggcagacgtggggagggtggaggggtgacagtggaggaaaatccatggatatccacgcagcagcccctctttaacctcatctacaagcatttgccctgtggattccagcatttgccattcctggaatcaaggaatcctgagtctgggcaatgaaaccaaagccaggagttgacgcatcctgcagttgggccagctgtcgcatctcagcggggcgcacatgttatccacaagcaatggacctttggggaagggggagtttttagtttgttttacaaatttttcctgcaaaagtggaatcactgtattttcattttaatttatatttgaaattttatttagttcttgagtagatctgcttcttcatcttgacatgtaatgaatggtcagttgtacgtaatgtatttatatgttaatttgttatgtatatagatgtgcaagtcttgtcagaattggcctcagtgtagttaaagggcagaaggggaagatactgactagtcatagaaatacctcattcgcctgtgggaagagaagggaagcctcttcagggtgagtgaatggcaaagcggttgcttctggctcctccttcccctgtggtcttggaagtgtgtggaaggcagggacagagatggaggccgagccaatagactgaagagaccacagcaattggctcctccatctagagattttcttggcagtattccatgggatgttaagcaaaggaaaccaaaggaatcgtttcaaatggactcatggcttagaaatctttattcttagggcagtcagtagtattctaaagctttctgacaagataaaggaagtcaccaaaatttctttttttaaattgtatctaatcctcaacaacaaaccaaaacagaacaattaaacagccaaataaaacctcagggacaacatttttggtgtatttgagccctcccagcaagtttcaccttgggtttgtattttaaatgttttacaagaattgtccatgtgcttccctaggctgagctggcattggtctgctgacctgtttttgtgtttttcttttttttatacacaacatttatttcaaactattgggagggatgagagtggcttaaaaacttccatccctacttttcaagagtgcagttgattctgaatctgaaagcccgcctctgtcctaaaatacaaacaagcacagacattaaacctggatactatatgataaagagggatgtaactattgaattggatacaaggatcagaatggaaagaaactcacgatgaaattgaacctggtttttgtatatttatcaaacttgtgctgagaatagtgtctgattatacgacttttaagcaaagttgggtgtaattaggtgaaaacagcccaggtcctcccgggagcacagaggggctaggggctggtccttctcgtttgctctagtcttgctttgctgtctggtgtagctcctctgctgctcccatctgcactaattgacccaaaacgtgggtatttcctgctacacaaaagccaaaaggtttcatgtagattttagttcactaaagggtgcccacaaaatagagattaattttaacttaaattttaagcttgaagattaggtactatctgtgaagttacacttttttttttttttttaaaggtagagatgtgtgtgtgtgtaggtattaaagatgtgttgttggtttccaaaaaggaacactggaaaataaattttgaatgtttatgttctcagaatcaggttgacagtcccttgctgacatggctttgctttgtgtaaatacagtggatctcaatcttcggggtgtgatgaatagcgaatcatctcaaatccttgagcactcagtctagtgaagatgttgtcattatgtacaatacataactagtttaattaactatgtgatgttaactattattaataaattttaacattttccaaaataaaaaaaaaaaaaaaaaa

SEQ ID NO: 63 - DNA, 3921 bp, Homo sapiens
catgccttatgcaagagacctcagtcccccggaacaactcgatttccttccaatagaggtctgaggtggactcccacctcccttcgtgaagagttccctcctctcccccttcctaagaaagtcgatcttggctctatttgtgtcttatgttcatcaccctcattcctccggagaaagccgggttggtttatgtctttatttattcccggggccaagacgtccggaacctgtggctgcgcagacccggcactgataggcgaagacggagagaaatttacctcccgccgctgccccccagccaaacgtgacagcgcgcgggccggttgcgtgactcgtgacgtctccaagtcctataggtgcagcggctggtgagatagtcgctatcgcctggttgcctctttattttactggggtatgcctggtaataaacagtaatatttaatttgtcggagaccacaaaccaaccttgagctgggaggtacgtgctcttcttgacagacgttggaagaagacctggcctaaagaggtctcttttggtggtccttttcaaagtcttcacctgagccctgctctccagcgaggcgcactcctggcttttgcgctccaaagaagaggtgggatagttggagagcagaaccttgcgcgggcacagggccctgggcgcaccatggccgacgcagacgagggctttggcctggcgcacacgcctctggagcctgacgcaaaagacctgccctgcgattcgaaacccgagagcgcgctcggggcccccagcaagtccccgtcgtccccgcaggccgccttcacccagcagggcatggagggaatcaaagtgtttctccatgaaagagaactgtggctaaaattccacgaagtgggcacggaaatgatcataaccaaggctggaaggcggatgtttcccagttacaaagtgaaggtgacgggccttaatcccaaaacgaagtacattcttctcatggacattgtacctgccgacgatcacagatacaaattcgcagataataaatggtctgtgacgggcaaagctgagcccgccatgcctggccgcctgtacgtgcacccagactcccccgccaccggggcgcattggatgaggcagctcgtctccttccagaaactcaagctcaccaacaaccacctggacccatttgggcatattattctaaattccatgcacaaataccagcctagattacacatcgtgaaagcggatgaaaataatggatttggctcaaaaaatacagcgttctgcactcacgtctttcctgagactgcgtttatagcagtgacttcctaccagaaccacaagatcacgcaattaaagattgagaataatccctttgccaaaggatttcggggcagtgatgacatggagctgcacagaatgtcaagaatgcaaagtaaagaatatcccgtggtccccaggagcaccgtgaggcaaaaagtggcctccaaccacagtcctttcagcagcgagtctcgagctctctccacctcatccaatttggggtcccaataccagtgtgagaatggtgtttccggcccctcccaggacctcctgcctccacccaacccatacccactgccccaggagcatagccaaatttaccattgtaccaagaggaaagaggaagaatgttccaccacagaccatccctataagaagccctacatggagacatcacccagtgaagaagattccttctaccgctctagctatccacagcagcagggcctgggtgcctcctacaggacagagtcggcacagcggcaagcttgcatgtatgccagctctgcgccccccagcgagcctgtgcccagcctagaggacatcagctgcaacacgtggccaagcatgccttcctacagcagctgcaccgtcaccaccgtgcagcccatggacaggctaccctaccagcacttctccgctcacttcacctcggggcccctggtccctcggctggctggcatggccaaccatggctccccacagctgggagagggaatgttccagcaccagacctccgtggcccaccagcctgtggtcaggcagtgtgggcctcagactggcctgcagtcccctggcacccttcagccccctgagttcctctactctcatggcgtgccaaggactctatcccctcatcagtaccactctgtgcacggagttggcatggtgccagagtggagcgacaatagctaaagtgaggcctgcttcacaacagacatttcctagagaaagagagagagagaggagaaagagagagaaggagagagacagtagccaagagaaccccacggacaagatttttcatttcacccaatgttcacatctgcactcaaggtcgctggatgctgatctaatcagtagcttgaaaccacaattttaaaaatgtgactttcttgttttgtctcaaaacttaaaaaaacaaacacaaaaagatgagtcccaccccccactaccaccacacccatcaaccagccacattcacgctactccccagatctcttcccccattccttcttttgggctctagaaagtcttgcctcattgagtgtttttccctagtgcgtagttggagtctgtccctgtcttggtgttaatgttgacattgttatataataaatgataatatatttttttctttcaattttcttaatgggacccagtcccttatttggggggaggtctgaggcaagtatatttcaaaatatgtacttgcgggattcccttcaagtaaaccatccctgaaacctaaattcacgtttccccttgactaagaaaagcacctacctctgccatgtgatgtttctgaaaagcctctgtatgtccccatttgctttggttttgtcctgccttctccaatatcacgtgctcagttttgcctctacttacccatggagtcaggataacactgacgctccctggcatcctatcttattcagccctaccatcttgccagctctgtctttccagctgtctgtcgctaaaacgtggcctatagcttcccttccggaaagcttgctttgaaaaacttaaaaagcccccgtttacatgtaggcaggactgtgataacagtgcaagctctgtgttgacaagagttgtggacaaaaagccaaaataaatattcttcctgattaaaaaaattttttttgaaaaaaacaaggccagccccaaccttccaaacctccatcaccaacaacccaaactggatgtcaagcaaaatgcacaattcctacagaagaggcaagacacagtcaccaatgatatctcgccaaagaaaccacgcccacaccaatgccaacacaaaactgtgtttactgaaagccgaaaacagtattaaaaaaagtgtgtaagtaaagtgttatggtagggttcttcagatgtaatattttactggtactatttatttataaataggaattctaattaagtaataacatgaaatgaaacccagcataggagctggccaagagcttttaattttattgatactcaaaaccaagtttgtgtttttttgtttttttttgtttttttcctctttcgaatgtgctttgctttttttgattaaaaagaattttttttttccttttttataaacagaccctaataaagagaacagggtaagatgtgaggctgagtgtgtttaagtacgtgagagagtgtgagtgtgtttgtaagtgagtgtccctatgcgattatgtctctttacgttgctaaggggggagggtgaggattaagtactcgtgccttatatttgtgtgccaattaatgcctaataaataccatgtgcttaaacaagtaaaaaaaaaaaaaaaaaaaaaaaaaaaaaaaaaaaaaaaaaaaaaaaaaaaaaaaaaaaaaaaaaaaaaaaaaaaaaaaaaaaaaaaaaaaaaaaa

SEQ ID NO: 64 - DNA, 9059 bp, Homo sapiens
gagaaggacgcgcggcccccagcgcctcttgggtggccgcctcggagcatgacccccgcgggccagcgccgcgcgctctgatccgaggagaccccgcgctcccgcagccatggccaccgggggccggcggggggcggcggccgcgccgctgctggtggcggtggccgcgctgctactgggcgccgcgggccacctgtaccccggagaggtgtgtcccggcatggatatccggaacaacctcactaggttgcatgagctggagaattgctctgtcatcgaaggacacttgcagatactcttgatgttcaaaacgaggcccgaagatttccgagacctcagtttccccaaactcatcatgatcactgattacttgctgctcttccgggtctatgggctcgagagcctgaaggacctgttccccaacctcacggtcatccggggatcacgactgttctttaactacgcgctggtcatcttcgagatggttcacctcaaggaactcggcctctacaacctgatgaacatcacccggggttctgtccgcatcgagaagaacaatgagctctgttacttggccactatcgactggtcccgtatcctggattccgtggaggataattacatcgtgttgaacaaagatgacaacgaggagtgtggagacatctgtccgggtaccgcgaagggcaagaccaactgccccgccaccgtcatcaacgggcagtttgtcgaacgatgttggactcatagtcactgccagaaagtttgcccgaccatctgtaagtcacacggctgcaccgccgaaggcctctgttgccacagcgagtgcctgggcaactgttctcagcccgacgaccccaccaagtgcgtggcctgccgcaacttctacctggacggcaggtgtgtggagacctgcccgcccccgtactaccacttccaggactggcgctgtgtgaacttcagcttctgccaggacctgcaccacaaatgcaagaactcgcggaggcagggctgccaccagtacgtcattcacaacaacaagtgcatccctgagtgtccctccgggtacacgatgaattccagcaacttgctgtgcaccccatgcctgggtccctgtcccaaggtgtgccacctcctagaaggcgagaagaccatcgactcggtgacgtctgcccaggagctccgaggatgcaccgtcatcaacgggagtctgatcatcaacattcgaggaggcaacaatctggcagctgagctagaagccaacctcggcctcattgaagaaatttcagggtatctaaaaatccgccgatcctacgctctggtgtcactttccttcttccggaagttacgtctgattcgaggagagaccttggaaattgggaactactccttctatgccttggacaaccagaacctaaggcagctctgggactggagcaaacacaacctcaccatcactcaggggaaactcttcttccactataaccccaaactctgcttgtcagaaatccacaagatggaagaagtttcaggaaccaaggggcgccaggagagaaacgacattgccctgaagaccaatggggaccaggcatcctgtgaaaatgagttacttaaattttcttacattcggacatcttttgacaagatcttgctgagatgggagccgtactggccccccgacttccgagacctcttggggttcatgctgttctacaaagaggccccttatcagaatgtgacggagttcgacgggcaggatgcgtgtggttccaacagttggacggtggtagacattgacccacccctgaggtccaacgaccccaaatcacagaaccacccagggtggctgatgcggggtctcaagccctggacccagtatgccatctttgtgaagaccctggtcaccttttcggatgaacgccggacctatggggccaagagtgacatcatttatgtccagacagatgccaccaacccctctgtgcccctggatccaatctcagtgtctaactcatcatcccagattattctgaagtggaaaccaccctccgaccccaatggcaacatcacccactacctggttttctgggagaggcaggcggaagacagtgagctgttcgagctggattattgcctcaaagggctgaagctgccctcgaggacctggtctccaccattcgagtctgaagattctcagaagcacaaccagagtgagtatgaggattcggccggcgaatgctgctcctgtccaaagacagactctcagatcctgaaggagctggaggagtcctcgtttaggaagacgtttgaggattacctgcacaacgtggttttcgtccccagaaaaacctcttcaggcactggtgccgaggaccctaggccatctcggaaacgcaggtcccttggcgatgttgggaatgtgacggtggccgtgcccacggtggcagctttccccaacacttcctcgaccagcgtgcccacgagtccggaggagcacaggccttttgagaaggtggtgaacaaggagtcgctggtcatctccggcttgcgacacttcacgggctatcgcatcgagctgcaggcttgcaaccaggacacccctgaggaacggtgcagtgtggcagcctacgtcagtgcgaggaccatgcctgaagccaaggctgatgacattgttggccctgtgacgcatgaaatctttgagaacaacgtcgtccacttgatgtggcaggagccgaaggagcccaatggtctgatcgtgctgtatgaagtgagttatcggcgatatggtgatgaggagctgcatctctgcgtctcccgcaagcacttcgctctggaacggggctgcaggctgcgtgggctgtcaccggggaactacagcgtgcgaatccgggccacctcccttgcgggcaacggctcttggacggaacccacctatttctacgtgacagactatttagacgtcccgtcaaatattgcaaaaattatcatcggccccctcatctttgtctttctcttcagtgttgtgattggaagtatttatctattcctgagaaagaggcagccagatgggccgctgggaccgctttacgcttcttcaaaccctgagtatctcagtgccagtgatgtgtttccatgctctgtgtacgtgccggacgagtgggaggtgtctcgagagaagatcaccctccttcgagagctggggcagggctccttcggcatggtgtatgagggcaatgccagggacatcatcaagggtgaggcagagacccgcgtggcggtgaagacggtcaacgagtcagccagtctccgagagcggattgagttcctcaatgaggcctcggtcatgaagggcttcacctgccatcacgtggtgcgcctcctgggagtggtgtccaagggccagcccacgctggtggtgatggagctgatggctcacggagacctgaagagctacctccgttctctgcggccagaggctgagaataatcctggccgccctccccctacccttcaagagatgattcagatggcggcagagattgctgacgggatggcctacctgaacgccaagaagtttgtgcatcgggacctggcagcgagaaactgcatggtcgcccatgattttactgtcaaaattggagactttggaatgaccagagacatctatgaaacggattactaccggaaagggggcaagggtctgctccctgtacggtggatggcaccggagtccctgaaggatggggtcttcaccacttcttctgacatgtggtcctttggcgtggtcctttgggaaatcaccagcttggcagaacagccttaccaaggcctgtctaatgaacaggtgttgaaatttgtcatggatggagggtatctggatcaacccgacaactgtccagagagagtcactgacctcatgcgcatgtgctggcaattcaaccccaagatgaggccaaccttcctggagattgtcaacctgctcaaggacgacctgcaccccagctttccagaggtgtcgttcttccacagcgaggagaacaaggctcccgagagtgaggagctggagatggagtttgaggacatggagaatgtgcccctggaccgttcctcgcactgtcagagggaggaggcggggggccgggatggagggtcctcgctgggtttcaagcggagctacgaggaacacatcccttacacacacatgaacggaggcaagaaaaacgggcggattctgaccttgcctcggtccaatccttcctaacagtgcctaccgtggcgggggcgggcaggggttcccattttcgctttcctctggtttgaaagcctctggaaaactcaggattctcacgactctaccatgtccaatggagttcagagatcgttcctatacatttctgttcatcttaaggtggactcgtttggttaccaatttaactagtcctgcagaggatttaactgtgaacctggagggcaaggggtttccacagttgctgctcctttggggcaacgacggtttcaaaccaggattttgtgttttttcgttccccccacccgcccccagcagatggaaagaaagcacctgtttttacaaattctttttttttttttttttttttgctggtgtctgagcttcagtataaaagacaaaacttcctgtttgtggaacaaaagttcgaaagaaaaaacaaaacaaaaacacccagccctgttccaggagaatttcaagttttacaggttgagcttcaagatggtttttttggttttttttttttctctcatccaggctgaaggattttttttttctttacaaaatgagttcctcaaattgaccaatagctgctgctttcatattttggataagggtctgtggtcccggcgtgtgctcacgtgtgtatgcacgtgtgtgtgtccattagacacggctgatgtgtgtgcaaagtatccatgcggagttgatgctttgggaattggctcatgaaggttcttctcaagggtgcgagctcatccccctctctccttccttcttattgactgggagactgtgctctcgacagattcttcttgtgtcagaagtctagcctcaggtttctaccctcccttcacattggtggccaagggaggagcatttcatttggagtgattatgaatcttttcaagaccaaaccaagctaggacattaaaaaaaaaaaaagaaaaagaaagaaaaaacaaaatggaaaaaggaaaaaaaaaaagaactgagatgacagagttttgagaatatatttgtaccatatttaatttttaaagtctctggtattagcctcataagttattgactattccccggggttggcggggagtggggacatgagttggtctgcctgttgtggggccgggaaggggagggagtcaggcacaagtggcctctttgtttggtcttaaaggcatccatttctgggaatgaagccatgttcgctgctaacacttttggatgttgtgaggccacgtggagtgtgtgagagactaggttttatggatggtctggttcaggtaccaggtctgctggaaggttcctgttcggataagctggtagctacctagctctgagcctgccttcaagaacacctgtgttcatcctctgattctctgtgtgtacctcttgtggcgtttcctctcccgggtgtgaacatcctaaccgttattgtgcaaacccaagaacgtcagatcccaaagcacaacaacctggatggactttgggaacatctaagcaatgtaagagagaggtgcactgagagtacgtcttggtcccctccaccctgagagcatctgacggtcctcagtactgaactcccggaagctgctctgagcccggtgacctcatctgggccaggtgtggtgcctgagctgaatgctcaggtgcttacagtgttgcaatccctaagagagtagagtctggaggagaaaccgtgaaaaagaccttacacaccaccaagaacttccgaatgggcgtgaatccaccgtttcttctctttgcaaaaagaaccaccacagctgctcaaagaacacagtgaactcatcactttggttcatcaaaaaatcatcgcccatgcgttattcctgagtgcattttcttacaactttttgactgcttccttttcttcttctcttaagagttgtgggcttaagaatgggatagagtcataatggcaacctccaagccctctcaattcttgattaagaacacaggtagacatgaatcccaattgtctattgctatcttatttatatgattcgggaaaatacagcatgtaaaaatattgctgaggagcctcagtgattgggtacaagaagcaagagtacagaaattatttttgccaaatttattttgtaaatatgagggtctgtacctaaatttaaaaaaaaaacacgtagaactaggtattttgttctcttcttagtaaatttgtagtggttgtatactacactagctgcaattttcacatttttctaattcagaaaggtttttcttatattaggggaaaaagtatttattttaatatataaaatcactctgaaaatcactctcataaaaaatggagcgcatgtaaatttttatcaaagaaaaataaacaggtgaatgggggatagtgattttcttttttcagcacagtctacctcagtgtattgttaagatgtgattcaatcatggacatctttgagatttcagaattctacctggaaccggtctgaatcagggaacgtgtgtatcagctgattcgaatgccagggaccagtaagaattttgagggagggagttgggatggagaaggtatggcctttatgcgagcatagatccttttcttcctggctggtaatattcttctctgaatttaatcttcctttaaaaaaaaatcctccatctattgtcactatgttccccaaacataaactaagttccaggctgtcatgatgtatctgatatatggggtaacccagcaaggtgtaccttcctttggtgagagatggctgccggggcaaagacgggctttgattcagagcaagcattcccacctgttccatggaatccccctgaagtgagcacaaaggtgccctgggctccctgatggtttatgcccactcctttcaggctggtgatgcaccttacacacaaacacctaatgcaatgtctttttaaattctccaagtgggatgggagcatgtgagggaaattccaatccaaaacccattaatgtgctgaacgctttttttttttttttttttttttttgcaacaacaccttggacctctgtgttggggtttgactgacctcaagctgatattattggaccttgtgcagctttgataacccatgtgagagtctaggcaggaccagtggggcccaaatcttgctgctcttgtacttttaggcactgcccttgcagactcacctttctccacctgccctggagaaaggtagggtgtgctgggcctgccccttgcaaatgggattcaccagtttcatttatttgactctactgccacagtgaaaagagcaaacagctattgggttgcaaacctcctttgacattaggaaatgttgactttgtaacaataaaactttggtcctagaaagacacggttgtcctgggagtttgtagtgttaagttgcaacaacaacaacaaaaagcaacaaaaccagcttaggataacactttttgttgcttgttcttaaagatgtctcactatgattaaaacccttttcattaatgtagtgaaagccacacaggagttccttcttccaggaggagaataccaagcacatcactttctctctgcatcagtgatgtcaaatacgcatcagaaaatgttcaggttttaggagctgtcctaggtgctgtttcatcattggaagcagtgagaaagagaagcactgctgcttgtctggatataggctgaggatgattgagagaagctgtgggaactgacacaagggtctgcataggtcatcctgtgaccctggggactatgttaccaactgacagacagatctttcactgtatcctagcagggcaggtagtccaccaagaaatgtgcttattggattgggaggtgtttatttgtagtctgctgtaacacgtgtgaaagagcaggagcgtcatcagcatatgacttgcgctggtcatccggtaaatggatgtgctgtagtcccagtgctaatcatttctctccttcacagtgggtggaagtttagggttaaatgtcctttgaatgtcacctggtgagtccttgacaccttaggctcttcagaaacaatggttttgttgaggatggggaacagggaatgccgattttatatacatggtacacagagaggggtgtcacttcagaaaatcttccagcatgttcttcagaatattaatttatatgcgaggtgaggttgggaatgaaaagaacaggtcagcacttttttttttcctagaacatacaaaagaacatggtggactttcagggagtgcaatggaaggtgaatatttccttaagggtccccgagaaatgggagtgaggggaggggacacaatggctttttgagcttacttttaccttctgatactagtcaaggtccagaaccagccaccagccaaatttctatctgggtgcgggccactgaaaatccttgttaaaaaccagatcacaaatctggggctcttggtcccattggagaaggaaggaagagcctcaaaataagtgtgcacccatgcacatattcaggaacagcttgtttagtctttacactttgcctgaaagttgcttctcctcgtccctttgtgtgcctgggtggcctcggccctgtgcgttggcaacgcaggatcaaatgtgctgcagcttttgcagaaaacaactcagaaacacaaaaccccccaacagctcaattattattttttcaatgttttcctacaagagccaagtagcaccatgtacagaagacgcctttttttttggaatattgaaatcgttctgcatgtaaaatatgggataatgacctgtttatattaaaattctgattaaattatctgagaata

SEQ ID NO: 65 - DNA, 4894 bp, Homo sapiens
cgccgcgggaggcggacgagatgcgagcgcggccgcggccccggccgctctgggcgactgtgctggcgctgggggcgctggcgggcgttggcgtaggagggcccaacatctgtaccacgcgaggtgtgagctcctgccagcagtgcctggctgtgagccccatgtgtgcctggtgctctgatgaggccctgcctctgggctcacctcgctgtgacctgaaggagaatctgctgaaggataactgtgccccagaatccatcgagttcccagtgagtgaggcccgagtactagaggacaggcccctcagcgacaagggctctggagacagctcccaggtcactcaagtcagtccccagaggattgcactccggctccggccagatgattcgaagaatttctccatccaagtgcggcaggtggaggattaccctgtggacatctactacttgatggacctgtcttactccatgaaggatgatctgtggagcatccagaacctgggtaccaagctggccacccagatgcgaaagctcaccagtaacctgcggattggcttcggggcatttgtggacaagcctgtgtcaccatacatgtatatctccccaccagaggccctcgaaaacccctgctatgatatgaagaccacctgcttgcccatgtttggctacaaacacgtgctgacgctaactgaccaggtgacccgcttcaatgaggaagtgaagaagcagagtgtgtcacggaaccgagatgccccagagggtggctttgatgccatcatgcaggctacagtctgtgatgaaaagattggctggaggaatgatgcatcccacttgctggtgtttaccactgatgccaagactcatatagcattggacggaaggctggcaggcattgtccagcctaatgacgggcagtgtcatgttggtagtgacaatcattactctgcctccactaccatggattatccctctttggggctgatgactgagaagctatcccagaaaaacatcaatttgatctttgcagtgactgaaaatgtagtcaatctctatcagaactatagtgagctcatcccagggaccacagttggggttctgtccatggattccagcaatgtcctccagctcattgttgatgcttatgggaaaatccgttctaaagtagagctggaagtgcgtgacctccctgaagagttgtctctatccttcaatgccacctgcctcaacaatgaggtcatccctggcctcaagtcttgtatgggactcaagattggagacacggtgagcttcagcattgaggccaaggtgcgaggctgtccccaggagaaggagaagtcctttaccataaagcccgtgggcttcaaggacagcctgatcgtccaggtcacctttgattgtgactgtgcctgccaggcccaagctgaacctaatagccatcgctgcaacaatggcaatgggacctttgagtgtggggtatgccgttgtgggcctggctggctgggatcccagtgtgagtgctcagaggaggactatcgcccttcccagcaggacgaatgcagcccccgggagggtcagcccgtctgcagccagcggggcgagtgcctctgtggtcaatgtgtctgccacagcagtgactttggcaagatcacgggcaagtactgcgagtgtgacgacttctcctgtgtccgctacaagggggagatgtgctcaggccatggccagtgcagctgtggggactgcctgtgtgactccgactggaccggctactactgcaactgtaccacgcgtactgacacctgcatgtccagcaatgggctgctgtgcagcggccgcggcaagtgtgaatgtggcagctgtgtctgtatccagccgggctcctatggggacacctgtgagaagtgccccacctgcccagatgcctgcacctttaagaaagaatgtgtggagtgtaagaagtttgaccggggagccctacatgacgaaaatacctgcaaccgttactgccgtgacgagattgagtcagtgaaagagcttaaggacactggcaaggatgcagtgaattgtacctataagaatgaggatgactgtgtcgtcagattccagtactatgaagattctagtggaaagtccatcctgtatgtggtagaagagccagagtgtcccaagggccctgacatcctggtggtcctgctctcagtgatgggggccattctgctcattggccttgccgccctgctcatctggaaactcctcatcaccatccacgaccgaaaagaattcgctaaatttgaggaagaacgcgccagagcaaaatgggacacagccaacaacccactgtataaagaggccacgtctaccttcaccaatatcacgtaccggggcacttaatgataagcagtcatcctcagatcattatcagcctgtgccacgattgcaggagtccctgccatcatgtttacagaggacagtatttgtggggagggatttggggctcagagtggggtaggttgggagaatgtcagtatgtggaagtgtgggtctgtgtgtgtgtatgtgggggtctgtgtgtttatgtgtgtgtgttgtgtgtgggagtgtgtaatttaaaattgtgatgtgtcctgataagctgagctccttagcctttgtcccagaatgcctcctgcagggattcttcctgcttagcttgagggtgactatggagctgagcaggtgttcttcattacctcagtgagaagccagctttcctcatcaggccattgtccctgaagagaagggcagggctgaggcctctcattccagaggaagggacaccaagccttggctctaccctgagttcataaatttatggttctcaggcctgactctcagcagctatggtaggaactgctgggcttggcagcccgggtcatctgtacctctgcctcctttcccctccctcaggccgaaggaggagtcagggagagctgaactattagagctgcctgtgccttttgccatcccctcaacccagctatggttctctcgcaagggaagtccttgcaagctaattctttgacctgttgggagtgaggatgtctgggccactcaggggtcattcatggcctgggggatgtaccagcatctcccagttcataatcacaacccttcagatttgccttattggcagctctactctggaggtttgtttagaagaagtgtgtcacccttaggccagcaccatctctttacctcctaattccacaccctcactgctgtagacatttgctatgagctggggatgtctctcatgaccaaatgcttttcctcaaagggagagagtgctattgtagagccagaggtctggccctatgcttccggcctcctgtccctcatccatagcacctccacatacctggccctgtgccttggtgtgctgtatccatccatggggctgattgtatttaccttctacctcttggctgccttgtgaaggaattattcccatgagttggctgggaataagtgccaggatggaatgatgggtcagttgtatcagcacgtgtggcctgttcttctatgggttggacaacctcattttaactcagtctttaatctgagaggccacagtgcaattttattttatttttctcatgatgaggttttcttaacttaaaagaacatgtatataaacatgcttgcattatatttgtaaatttatgtgatggcaaagaaggagagcataggaaaccacacagacttgggcagggtacagacactcccacttggcatcattcacagcaagtcactggccagtggctggatctgtgaggggctctctcatgatagaaggctatggggatagatgtgtggacacattggacctttcctgaggaagagggactgttcttttgtcccagaaaagcagtggctccattggtgttgacatacatccaacattaaaagccacccccaaatgcccaagaaaaaaagaaagacttatcaacatttgttccatgagcagaaaactggagctctggcctcagtgttacagctaaataatctttaattaaggcaagtcactttcttcttcttaaagctgttttctagtttgagaaatgatgggattttagcagccagtcttgaaggtctctttcagtatcaacattctaagatgctgggacttactgtgtcatcaaatgtgcggttaagattctctgggatattgatactgtttgtgtttttagttgggagatctgagagacctggctttggcaagagcagatgtcattccatatcacctttctcaatgaaagtctcattctatcctctctccaaacccgttttccaacatttgttaatagttacgtctctcctgatgtagcacttaagcttcatttagttattatttctttcttcactttgcacacatttgcatccacatattagggaagaggaatccataagtagctgaaatatctattctgtattattgtgttaacattgagaataagccttggaattagatatggggcaatgactgagccctgtctcacccatggattactccttactgtagggaatggcagtatggtagagggataaatagggggcggggagggatagtcatggatccaagaagtccttagaaatagtggcagggaacaggtgtggaagctcatgcctgtaattataaccttcagctactaagacaggtgtggtggctcacgcctgtgattataatcttcagttactaagacagagtccatgagagtgttaatgggacattttctttagataagatgttttatatgaagaaactgtatcaaagggggaagaaaatgtatttaacaggtgaatcaaatcaggaatcttgtctgagctactggaatgaagttcacaggtcttgaagacca

SEQ ID NO: 66 - DNA, 4772 bp, Homo sapiens
gctcagttgccgggcgggggagggcgcgtccggtttttctcaggggacgttgaaattatttttgtaacgggagtcgggagaggacggggcgtgccccgacgtgcgcgcgcgtcgtcctccccggcgctcctccacagctcgctggctcccgccgcggaaaggcgtcatgccgcccaaaaccccccgaaaaacggccgccaccgccgccgctgccgccgcggaacccccggcaccgccgccgccgccccctcctgaggaggacccagagcaggacagcggcccggaggacctgcctctcgtcaggcttgagtttgaagaaacagaagaacctgattttactgcattatgtcagaaattaaagataccagatcatgtcagagagagagcttggttaacttgggagaaagtttcatctgtggatggagtattgggaggttatattcaaaagaaaaaggaactgtggggaatctgtatctttattgcagcagttgacctagatgagatgtcgttcacttttactgagctacagaaaaacatagaaatcagtgtccataaattctttaacttactaaaagaaattgataccagtaccaaagttgataatgctatgtcaagactgttgaagaagtatgatgtattgtttgcactcttcagcaaattggaaaggacatgtgaacttatatatttgacacaacccagcagttcgatatctactgaaataaattctgcattggtgctaaaagtttcttggatcacatttttattagctaaaggggaagtattacaaatggaagatgatctggtgatttcatttcagttaatgctatgtgtccttgactattttattaaactctcacctcccatgttgctcaaagaaccatataaaacagctgttatacccattaatggttcacctcgaacacccaggcgaggtcagaacaggagtgcacggatagcaaaacaactagaaaatgatacaagaattattgaagttctctgtaaagaacatgaatgtaatatagatgaggtgaaaaatgtttatttcaaaaattttataccttttatgaattctcttggacttgtaacatctaatggacttccagaggttgaaaatctttctaaacgatacgaagaaatttatcttaaaaataaagatctagatgcaagattatttttggatcatgataaaactcttcagactgattctatagacagttttgaaacacagagaacaccacgaaaaagtaaccttgatgaagaggtgaatgtaattcctccacacactccagttaggactgttatgaacactatccaacaattaatgatgattttaaattcagcaagtgatcaaccttcagaaaatctgatttcctattttaacaactgcacagtgaatccaaaagaaagtatactgaaaagagtgaaggatataggatacatctttaaagagaaatttgctaaagctgtgggacagggttgtgtcgaaattggatcacagcgatacaaacttggagttcgcttgtattaccgagtaatggaatccatgcttaaatcagaagaagaacgattatccattcaaaattttagcaaacttctgaatgacaacatttttcatatgtctttattggcgtgcgctcttgaggttgtaatggccacatatagcagaagtacatctcagaatcttgattctggaacagatttgtctttcccatggattctgaatgtgcttaatttaaaagcctttgatttttacaaagtgatcgaaagttttatcaaagcagaaggcaacttgacaagagaaatgataaaacatttagaacgatgtgaacatcgaatcatggaatcccttgcatggctctcagattcacctttatttgatcttattaaacaatcaaaggaccgagaaggaccaactgatcaccttgaatctgcttgtcctcttaatcttcctctccagaataatcacactgcagcagatatgtatctttctcctgtaagatctccaaagaaaaaaggttcaactacgcgtgtaaattctactgcaaatgcagagacacaagcaacctcagccttccagacccagaagccattgaaatctacctctctttcactgttttataaaaaagtgtatcggctagcctatctccggctaaatacactttgtgaacgccttctgtctgagcacccagaattagaacatatcatctggacccttttccagcacaccctgcagaatgagtatgaactcatgagagacaggcatttggaccaaattatgatgtgttccatgtatggcatatgcaaagtgaagaatatagaccttaaattcaaaatcattgtaacagcatacaaggatcttcctcatgctgttcaggagacattcaaacgtgttttgatcaaagaagaggagtatgattctattatagtattctataactcggtcttcatgcagagactgaaaacaaatattttgcagtatgcttccaccaggccccctaccttgtcaccaatacctcacattcctcgaagcccttacaagtttcctagttcacccttacggattcctggagggaacatctatatttcacccctgaagagtccatataaaatttcagaaggtctgccaacaccaacaaaaatgactccaagatcaagaatcttagtatcaattggtgaatcattcgggacttctgagaagttccagaaaataaatcagatggtatgtaacagcgaccgtgtgctcaaaagaagtgctgaaggaagcaaccctcctaaaccactgaaaaaactacgctttgatattgaaggatcagatgaagcagatggaagtaaacatctcccaggagagtccaaatttcagcagaaactggcagaaatgacttctactcgaacacgaatgcaaaagcagaaaatgaatgatagcatggatacctcaaacaaggaagagaaatgaggatctcaggaccttggtggacactgtgtacacctctggattcattgtctctcacagatgtgactgtataactttcccaggttctgtttatggccacatttaatatcttcagctctttttgtggatataaaatgtgcagatgcaattgtttgggtgattcctaagccacttgaaatgttagtcattgttatttatacaagattgaaaatcttgtgtaaatcctgccatttaaaaagttgtagcagattgtttcctcttccaaagtaaaattgctgtgctttatggatagtaagaatggccctagagtgggagtcctgataacccaggcctgtctgactactttgccttcttttgtagcatataggtgatgtttgctcttgtttttattaatttatatgtatatttttttaatttaacatgaacacccttagaaaatgtgtcctatctatcttccaaatgcaatttgattgactgcccattcaccaaaattatcctgaactcttctgcaaaaatggatattattagaaattagaaaaaaattactaattttacacattagattttattttactattggaatctgatatactgtgtgcttgttttataaaattttgcttttaattaaataaaagctggaagcaaagtataaccatatgatactatcatactactgaaacagatttcatacctcagaatgtaaaagaacttactgattattttcttcatccaacttatgtttttaaatgaggattattgatagtactcttggtttttataccattcagatcactgaatttataaagtacccatctagtacttgaaaaagtaaagtgttctgccagatcttaggtatagaggaccctaacacagtatatcccaagtgcactttctaatgtttctgggtcctgaagaattaagatacaaattaattttactccataaacagactgttaattataggagccttaatttttttttcatagagatttgtctaattgcatctcaaaattattctgccctccttaatttgggaaggtttgtgttttctctggaatggtacatgtcttccatgtatcttttgaactggcaattgtctatttatcttttatttttttaagtcagtatggtctaacactggcatgttcaaagccacattatttctagtccaaaattacaagtaatcaagggtcattatgggttaggcattaatgtttctatctgattttgtgcaaaagcttcaaattaaaacagctgcattagaaaaagaggcgcttctcccctcccctacacctaaaggtgtatttaaactatcttgtgtgattaacttatttagagatgctgtaacttaaaataggggatatttaaggtagcttcagctagcttttaggaaaatcactttgtctaactcagaattatttttaaaaagaaatctggtcttgttagaaaacaaaattttattttgtgctcatttaagtttcaaacttactattttgacagttattttgataacaatgacactagaaaacttgactccatttcatcattgtttctgcatgaatatcatacaaatcagttagtttttaggtcaagggcttactatttctgggtcttttgctactaagttcacattagaattagtgccagaattttaggaacttcagagatcgtgtattgagatttcttaaataatgcttcagatattattgctttattgcttttttgtattggttaaaactgtacatttaaaattgctatgttactattttctacaattaatagtttgtctattttaaaataaattagttgttaagagtcttaa

SEQ ID NO: 67 - DNA, 8501 bp, Homo sapiens
agacggcggcggcgcccgtaggatgcagggatcgctcccccggggccgctgagcctgcgcccagtgccccgagccccgcgccgagccgagtccgcgccaagcagcagccgcccaccccggggcccggccgggggaccagcagcttccccacaggcaacgtgaggagagcctgtgcccagaagcaggatgagaagatggcaaacttcctattacctcggggcaccagcagcttccgcaggttcacacgggagtccctggcagccatcgagaagcgcatggcagagaagcaagcccgcggctcaaccaccttgcaggagagccgagaggggctgcccgaggaggaggctccccggccccagctggacctgcaggcctccaaaaagctgccagatctctatggcaatccaccccaagagctcatcggagagcccctggaggacctggaccccttctatagcacccaaaagactttcatcgtactgaataaaggcaagaccatcttccggttcagtgccaccaacgccttgtatgtcctcagtcccttccaccccatccggagagcggctgtgaagattctggttcactcgctcttcaacatgctcatcatgtgcaccatcctcaccaactgcgtgttcatggcccagcacgaccctccaccctggaccaagtatgtcgagtacaccttcaccgccatttacacctttgagtctctggtcaagattctggctcgaggcttctgcctgcacgcgttcactttccttcgggacccatggaactggctggactttagtgtgattatcatggcatacacaactgaatttgtggacctgggcaatgtctcagccttacgcaccttccgagtcctccgggccctgaaaactatatcagtcatttcagggctgaagaccatcgtgggggccctgatccagtctgtgaagaagctggctgatgtgatggtcctcacagtcttctgcctcagcgtctttgccctcatcggcctgcagctcttcatgggcaacctaaggcacaagtgcgtgcgcaacttcacagcgctcaacggcaccaacggctccgtggaggccgacggcttggtctgggaatccctggacctttacctcagtgatccagaaaattacctgctcaagaacggcacctctgatgtgttactgtgtgggaacagctctgacgctgggacatgtccggagggctaccggtgcctaaaggcaggcgagaaccccgaccacggctacaccagcttcgattcctttgcctgggcctttcttgcactcttccgcctgatgacgcaggactgctgggagcgcctctatcagcagaccctcaggtccgcagggaagatctacatgatcttcttcatgcttgtcatcttcctggggtccttctacctggtgaacctgatcctggccgtggtcgcaatggcctatgaggagcaaaaccaagccaccatcgctgagaccgaggagaaggaaaagcgcttccaggaggccatggaaatgctcaagaaagaacacgaggccctcaccatcaggggtgtggataccgtgtcccgtagctccttggagatgtcccctttggccccagtaaacagccatgagagaagaagcaagaggagaaaacggatgtcttcaggaactgaggagtgtggggaggacaggctccccaagtctgactcagaagatggtcccagagcaatgaatcatctcagcctcacccgtggcctcagcaggacttctatgaagccacgttccagccgcgggagcattttcacctttcgcaggcgagacctgggttctgaagcagattttgcagatgatgaaaacagcacagcgggggagagcgagagccaccacacatcactgctggtgccctggcccctgcgccggaccagtgcccagggacagcccagtcccggaacctcggctcctggccacgccctccatggcaaaaagaacagcactgtggactgcaatggggtggtctcattactgggggcaggcgacccagaggccacatccccaggaagccacctcctccgccctgtgatgctagagcacccgccagacacgaccacgccatcggaggagccaggcgggccccagatgctgacctcccaggctccgtgtgtagatggcttcgaggagccaggagcacggcagcgggccctcagcgcagtcagcgtcctcaccagcgcactggaagagttagaggagtctcgccacaagtgtccaccatgctggaaccgtctcgcccagcgctacctgatctgggagtgctgcccgctgtggatgtccatcaagcagggagtgaagttggtggtcatggacccgtttactgacctcaccatcactatgtgcatcgtactcaacacactcttcatggcgctggagcactacaacatgacaagtgaattcgaggagatgctgcaggtcggaaacctggtcttcacagggattttcacagcagagatgaccttcaagatcattgccctcgacccctactactacttccaacagggctggaacatcttcgacagcatcatcgtcatccttagcctcatggagctgggcctgtcccgcatgagcaacttgtcggtgctgcgctccttccgcctgctgcgggtcttcaagctggccaaatcatggcccaccctgaacacactcatcaagatcatcgggaactcagtgggggcactggggaacctgacactggtgctagccatcatcgtgttcatctttgctgtggtgggcatgcagctctttggcaagaactactcggagctgagggacagcgactcaggcctgctgcctcgctggcacatgatggacttctttcatgccttcctcatcatcttccgcatcctctgtggagagtggatcgagaccatgtgggactgcatggaggtgtcggggcagtcattatgcctgctggtcttcttgcttgttatggtcattggcaaccttgtggtcctgaatctcttcctggccttgctgctcagctccttcagtgcagacaacctcacagcccctgatgaggacagagagatgaacaacctccagctggccctggcccgcatccagaggggcctgcgctttgtcaagcggaccacctgggatttctgctgtggtctcctgcggcagcggcctcagaagcccgcagcccttgccgcccagggccagctgcccagctgcattgccaccccctactccccgccacccccagagacggagaaggtgcctcccacccgcaaggaaacacggtttgaggaaggcgagcaaccaggccagggcacccccggggatccagagcccgtgtgtgtgcccatcgctgtggccgagtcagacacagatgaccaagaagaagatgaggagaacagcctgggcacggaggaggagtccagcaagcaggaatcccagcctgtgtccggtggcccagaggcccctccggattccaggacctggagccaggtgtcagcgactgcctcctctgaggccgaggccagtgcatctcaggccgactggcggcagcagtggaaagcggaaccccaggccccagggtgcggtgagaccccagaggacagttgctccgagggcagcacagcagacatgaccaacaccgctgagctcctggagcagatccctgacctcggccaggatgtcaaggacccagaggactgcttcactgaaggctgtgtccggcgctgtccctgctgtgcggtggacaccacacaggccccagggaaggtctggtggcggttgcgcaagacctgctaccacatcgtggagcacagctggttcgagacattcatcatcttcatgatcctactcagcagtggagcgctggccttcgaggacatctacctagaggagcggaagaccatcaaggttctgcttgagtatgccgacaagatgttcacatatgtcttcgtgctggagatgctgctcaagtgggtggcctacggcttcaagaagtacttcaccaatgcctggtgctggctcgacttcctcatcgtagacgtctctctggtcagcctggtggccaacaccctgggctttgccgagatgggccccatcaagtcactgcggacgctgcgtgcactccgtcctctgagagctctgtcacgatttgagggcatgagggtggtggtcaatgccctggtgggcgccatcccgtccatcatgaacgtcctcctcgtctgcctcatcttctggctcatcttcagcatcatgggcgtgaacctctttgcggggaagtttgggaggtgcatcaaccagacagagggagacttgcctttgaactacaccatcgtgaacaacaagagccagtgtgagtccttgaacttgaccggagaattgtactggaccaaggtgaaagtcaactttgacaacgtgggggccgggtacctggcccttctgcaggtggcaacatttaaaggctggatggacattatgtatgcagctgtggactccagggggtatgaagagcagcctcagtgggaatacaacctctacatgtacatctattttgtcattttcatcatctttgggtctttcttcaccctgaacctctttattggtgtcatcattgacaacttcaaccaacagaagaaaaagttagggggccaggacatcttcatgacagaggagcagaagaagtactacaatgccatgaagaagctgggctccaagaagccccagaagcccatcccacggcccctgaacaagtaccagggcttcatattcgacattgtgaccaagcaggcctttgacgtcaccatcatgtttctgatctgcttgaatatggtgaccatgatggtggagacagatgaccaaagtcctgagaaaatcaacatcttggccaagatcaacctgctctttgtggccatcttcacaggcgagtgtattgtcaagctggctgccctgcgccactactacttcaccaacagctggaatatcttcgacttcgtggttgtcatcctctccatcgtgggcactgtgctctcggacatcatccagaagtacttcttctccccgacgctcttccgagtcatccgcctggcccgaataggccgcatcctcagactgatccgaggggccaaggggatccgcacgctgctctttgccctcatgatgtccctgcctgccctcttcaacatcgggctgctgctcttcctcgtcatgttcatctactccatctttggcatggccaacttcgcttatgtcaagtgggaggctggcatcgacgacatgttcaacttccagaccttcgccaacagcatgctgtgcctcttccagatcaccacgtcggccggctgggatggcctcctcagccccatcctcaacactgggccgccctactgcgaccccactctgcccaacagcaatggctctcggggggactgcgggagcccagccgtgggcatcctcttcttcaccacctacatcatcatctccttcctcatcgtggtcaacatgtacattgccatcatcctggagaacttcagcgtggccacggaggagagcaccgagcccctgagtgaggacgacttcgatatgttctatgagatctgggagaaatttgacccagaggccactcagtttattgagtattcggtcctgtctgactttgccgatgccctgtctgagccactccgtatcgccaagcccaaccagataagcctcatcaacatggacctgcccatggtgagtggggaccgcatccattgcatggacattctctttgccttcaccaaaagggtcctgggggagtctggggagatggacgccctgaagatccagatggaggagaagttcatggcagccaacccatccaagatctcctacgagcccatcaccaccacactccggcgcaagcacgaagaggtgtcggccatggttatccagagagccttccgcaggcacctgctgcaacgctctttgaagcatgcctccttcctcttccgtcagcaggcgggcagcggcctctccgaagaggatgcccctgagcgagagggcctcatcgcctacgtgatgagtgagaacttctcccgaccccttggcccaccctccagctcctccatctcctccacttccttcccaccctcctatgacagtgtcactagagccaccagcgataacctccaggtgcgggggtctgactacagccacagtgaagatctcgccgacttccccccttctccggacagggaccgtgagtccatcgtgtgagcctcggcctggctggccaggacacactgaaaagcagcctttttcaccatggcaaacctaaatgcagtcagtcacaaaccagcctggggccttcctggctttgggagtaagaaatgggcctcagccccgcggatcaaccaggcagagttctgtggcgccgcgtggacagccggagcagttggcctgtgcttggaggcctcagatagacctgtgacctggtctggtcaggcaatgccctgcggctctggaaagcaacttcatcccagctgctgaggcgaaatataaaactgagactgtatatgttgtgaatgggctttcataaatttattatatttgatatttttttacttgagcaaagaactaaggatttttccatggacatgggcagcaattcacgctgtctcttcttaaccctgaacaagagtgtctatggagcagccggaagtctgttctcaaagcagaagtggaatccagtgtggctcccacaggtcttcactgcccaggggtcgaatggggtccccctcccacttgacctgagatgctgggagggctgaacccccactcacacaagcacacacacacagtcctcacacacggaggccagacacaggccgtgggacccaggctcccagcctaagggagacaggcctttccctgccggccccccaaggatggggttcttgtccacggggctcactctggccccctattgtctccaaggtcccattttccccctgtgttttcacgcaggtcatattgtcagtcctacaaaaataaaaggcttccagaggagagtggcctgggtcccagggctggccctaggcactgatagttgccttttcttcccctcctgtaagagtattaacaaaaccaaaggacacaagggtgcaagccccattcacggcctggcatgcagcttgtccttgctcctggaacctggcaggccctgcccagccagccatcggaagagagggctgagccatgggggtttggggctaagaagttcaccagccctgagccatggcggcccctcagcctgcctgaagagaggaaactggcgatctcccagggctctctggaccatacgcggaggagttttctgtgtggtctccagctcctctccagacacagagacatgggagtggggagcggagcttggccctgcgccctgtgcagggaaagggatggtcaggcccagttctcgtgcccttagaggggaatgaaccatggcacctttgagagagggggcactgtggtcaggcccagcctctctggctcagcccgggatcctgatggcacccacacagaggacctctttggggcaagatccaggtggtcccataggtcttgtgaaaaggctttttcagggaaaaatattttactagtccaatcacccccaggacctcttcagctgctgacaatcctatttagcatatgcaaatcttttaacatagagaactgtcaccctgaggtaacagggtcaactggcgaagcctgagcaggcaggggcttggctgccccattccagctctcccatggagcccctccaccgggcgcatgcctcccaggccacctcagtctcacctgccggctctgggctggctgctcctaacctacctcgccgagctgtcggagggctggacatttgtggcagtgctgaagggggcattgccggcgagtaaagtattatgtttcttcttgtcaccccagttcccttggtggcaaccccagacccaacccatgcccctgacagatctagttctcttctcctgtgttccctttgagtccagtgtgggacacggtttaactgtcccagcgacatttctccaagtggaaatcctatttttgtagatctccatgctttgctctcaaggcttggagaggtatgtgcccctcctgggtgctcaccgcctgctacacaggcaggaatgcggttgggaggcaggtcgggctgccagcccagctggccggaaggagactgtggtttttgtgtgtgtggacagcccgggagctttgagacaggtgcctggggctggctgcagacggtgtggttgggggtgggaggtgagctagacccaacccttagcttttagcctggctgtcacctttttaatttccagaactgcacaatgaccagcaggagggaaggacagacatcaagtgccagatgttgtctgaactaatcgagcacttctcaccaaacttcatgtataaataaaatacatatttttaaaacaaaccaataaatggcttacatga

SEQ ID NO: 68 - DNA, 9805 bp, Homo sapiens
agagaggacttatctccagcatctagcactacagagcagaggctgtgtggagaatggctgaaaaatcagaattggttgtagaagcagttttctttctggttgtgagtatgagcccggcagacaccatgagcgctgttgcaggggagtcggcctgtgcttgacacatgtgtttcccattgatagctggagacagcccagtagctgtgagtcggtctgacaaagccatattgaagtacggagtacggtttcaaagcagtcagaaaaagaacgggaatgctgttcaggaaattcttcaggcatgggcagggacttggctgcagttctgcagttggaaaatctgactggggcagcttctgagcgcaggctgggcctgcacacactcagcgggccgagtggccacctccttcagagctgctcagcacgccctgggatcgcgggcggttttcatcggccggtttgtgaaacggacaagagagagacattactgccgggagtgttgagtgaagggaccaggtggagatgatgcctcaggagcagtacactcaccaccggagcaccatgcctggctctgtggggccacaggtatacaaggtggggatttatggctggcggaaacgatgcctgtatttctttgtcctgctcctcatgattttaatactggtgaacttggccatgaccatctggattctcaaagtcatgaacttcacaattgatggaatgggaaacctgaggatcacagaaaaaggtctaaagctagaaggagactctgaattcttacaacctctctacgccaaagaaatccagtcccgaccaggtaatgccctgtacttcaagtctgccagaaatgttacagtgaacattctcaatgaccagactaaagtgctaactcagcttataacaggtccaaaagccgtagaagcttatggtaaaaaatttgaggtaaaaactgtttctggaaaattgctcttctctgcagacaataatgaagtggtagtaggagctgaaagattacgagttttaggagcggagggcacagtgttccctaaatctatagaaacacctaatgtcagggcagaccccttcaaagaactaaggttggagtccccaacccggtctctagtgatggaggccccaaaaggagtggaaatcaatgcagaagctggcaatatggaagccacctgcaggacagagctgagactggaatccaaagatggagagattaagttagatgctgcgaaaatcaggctacctagactgcctcatggatcctacacgcctacaggaacgaggcagaaggtcttcgagatctgcgtctgcgccaatgggagattattcctgtctcaggcaggagctgggtccacttgtcagataaacacaagtgtctgcctctgaaagactatccatagtggacattgttggcagcataaaggccttttttggctttagacactggctgccagctatttttactagaacacagaaagcctatcaaagaccttgtgtgtatgtgtacgtgtgtgtgcgtgcttgagtgtgttcgcgtgtgtgggtggatataaatatatataaatatatataaataaatatatatatcctctgtataaaatgaggtttcagtacaaaaggaaccatgggtgaccctgcgatatccactgtcattttccatcccatccccaccacctgagtgacagaaatctaaacacacatccgtcccaacattccccagaccattcagaatcacacagcgtattaaacactgacagaatcttcatctagatattcgagtagcagcatatcttctcttttagtgtcattacgagggagtgatggcgggaatctcagtcgcactcaagctctgagacctttgtatcaaaaataggcatttgatttcctgttttagctttagtaaggctggctaacttccccctcttcaagctaggaactggcaatgctgtagaagtcagccgtaggaattcaaaatggctggcctaccttggctaccagacatattggggtttttgtagttgaatgaatgaggaggatgaatttcagcaaattttgaactgctcacccaacttctgctatcttgctccctccaaactcacagattctcctacagtcaaattaggagctgtaaatcagcacaaaataagataacagctgttcctcagtgagctggaagctacttaatggcctgatgggcaatgaacaaacgggtgatatgtctctgtttaagggaaaaatggcttaaaagctgttctgttctcacttctgactttaaccaaaagatttcaacccacaatgatcaggtcaatcaaaatccctaagagcagaactcctaccccaaaagaagcctggaagtctaattaagagtagcataaggaacctaattatgtttaccatgtttcttgggattggtgggaaatgtcaaaacatgccctttatttttaaaggcattcacaaactctctgactttgttcttcttatatattttttcagtgccgggatattcatattcctaaagccactattgtgttttctctaagaagcactacatgccaccagaattgtgcactgaaagataatacaaactgagtgtctttatgagaatcactgtgtcccctgaggcccagcagtacctgcttccctgtatgtggaagcagcacctcattcccgccatcagctacctctcatcaccccaccttcatcatcatgctccagggtcaccctggccagctcttgtgctgggacaggggattacaccatctctgttcaaagagggggaaatgtgcctatgccttaagtcaatgcactcagcaaggagaagcacatcttatttatcttgttacctatagtttactttgggtgattggaggggaatgacttagttatgactggacatcttaaaagctgatagacaagccaaatggctggcagatgatgtggatttcaaagagcccagaatgaactcatcactggcttagacagtcctggatgccatttggaaagtagtggccctgcaagcctaaatgaagtagtatttgtaggcctgggtggcatttggatttttcttttccctcaacaaggttttactttttcttactttacaagcaagggaagttttgtgataggagagaaataaaagatttgatattttttgagatgacactcaagcatcaggctgagatttgcacacatgggatgtaaaagcaagctgtgtgttgcttagtcacttacttagaagtagatggtgggggacagcggcgtgggtcctagcctggccagtgatgctgctggcgtccagaccccagactcactccaagcactcttgttcaatatctcatgcagaagagttgggctggtcactcttaggggtgagaccccgtgattggttggtttgtagcactaaggtctaaaaaggaaaaccataaaagacatcagattacgctggatcagtataattaatattccatagggccatgttgccagaatctgtatgtatcaatacagggtttttccaagccaggaaacgccctccttggctactaggagcacctatcccatatcattcagataaacaatgatagctacaaagtcatttgtggctagataggttaagacaggtgattttttaaagtagactgtctttgcattttgccatctgaagttcattaatctttagatgacaaaaaagcaaaaagttcccagaacgtttttgcttagattttgttctaatcaccacgtgaaggaatgagattagcaccacaagtttcatgccaataaaagagactggtgtgatcccacatgcaaaatttaatcctaagggtagtgagatcacaaacagaataaaaataagagcaatcaaccatataaatcaagtacctattgggaacagacataacattcaatttttcatttatgctaagtgaccacagtatacaaagtaataagcaggaaatttgatatgggttaaattatgcattttgttcagattttggaaattggtatgcattataagtttctcaatgtacatctttttatcccaacaccctcaaactagaatatttgtcagtggtcaagagaaaaaattttacctgaattcttgggggccggcggggagcttttacattaaaaatctactaacgcctactttttaaaaaatgagattctttctaatctttatatatgacattttctagacaatcgcacctttgggtatattaaacagctggtatcataacaaagaatccaaatgaaccttcaatatactagaagttctagtaggttaatattgttcagaagatttttacaaattaaaaactgatttccaaatatgttcaacatttacttctatttgatatctgctcaagaagtcatagaagtcttgggaaactattcgagtatcacagaggttttcaaaagcccttatggtgacatctacctaggtaaaagcctgacatgtggctttataattgttatgttacccaagggataaacttgaactggctttgaacatcctttaggtcattttctctttggataattttcatcgcatatccagcaactatagaccaaagtttgcttaaggtttgaccctagagcagaggtgggcaaactatgacctggaaaccaaatctgacttaccaccttttcctgtagttaaagttttattgtcacatagccacatacattcatttacatgttttctgattttacactacagcagcaggatggagtagttgtgtcagagactatgtatcccacaaagcatagattacttactatttagtcctttacaggcaaagtttcctcacccctgacctagaggtttttgtggtatgcattggatatagcaggaaagaaagcacatttccaaacagcagggagtaagcttacatttctgtgtaggtttgggaatatagttacttggcaaagtctttcaggaaggaagcccttccttatgttacatgtggaaagcctgccttccaagacatgtggaagtaattgatccacctgccagagaaacacaggctcagaggatgcctgggaacagggaggatgggattagtggaagcttaatggaaaaggaaagttatgatcctccaagacccttaattgatagaccataccaggttctgcaggtcagcatcattgtgtaatgagagtgaagtaggggaccctgtggttcaaccttagaatctgtttcctgtaggctctttctgctgtctatattcattaaagttttccacttcaccctcccatagtctagagggatgcccattccatggtcctccagagaatagttttgacttaacatgtctgtttagcccacatcacgtcagttatcaacaccgccactgtgcttactgttcctacagccacaccaggcttgaagagttagtgagaccaacaaataattggaagtattggaaaaagcaaaatacatggggacaaaaaaaatacagtgaaattctttttatcaaactgatgctgtgagaaaccagatgaatgccagtttggctttatttctaagaatctgggtcttcattctctggtgtagaaggaatgcaaaaaactataacaacaacaacaaaaacatattttgaaaagacatattctgacatctctgcttgtgtgtggtaaggcaggttcctatcagacatttatccctttggtcaagatcccttttgctcatccagggtttcatactcaatatcgcttaaaaaaaaaaaagtatcagctagggatgactctggaagtatgagtatcatggtggggaggaaggaattttttttaaatgtaaatgacccccatttaccagaccctaatcaaagtcacttaagggaatccctcagccttttatttggaaacagttgaaataaactggcagcagctagatcagagtatcttgctttattttataaaggccaaaggtagtatgaagtttggaccaaaaaggtaaatagatccattccagcacctgatactgatttttcaaggctctatgaaaggtcaaaaatttcattaaacaagaccagttctccctcttccccctgtcccaagaaatcttaggcatgaaaaggataaggaaacagctcctggaatgatacatttgcatagtgccctagtagcaggttgggaaaaagttataatataagaaacaaccttcgaaaacaggccttttatctcaaagataaaatgtctttcttgtggtctttcatcactatctccgtggtggaaggttcccctagttccaacatatttccattaaaatagtcaaagccacggcattgggatgtcagatgcctctctttctttgtggtaatcggaatttaaaattatacagttgcctctgaatttctcatgcacaaagccaaaccactgataagagataaagcagtctgaagcctgctgcttcagccagcacagcacaccacacacgctcgcactttcaaaagcaatgtgatttctatggttcttaaaagctttcttcataagggagtccctgaaatttctcaaggcaggtttgaatggcaaagggaaaataattacttgtgggaggtcctccttttgagtattgttagagcatacatgtaaaagaaaataacctttttggggcaactcatgctcacacatgctgttttctttggttctccccctaccttccttttgtagatattgacagaataggaggaaatgagcatccttatttgagaaagagcaagaatgtcatgagcccttgatgcaatagtaagtgtgatgtcatcatacagtgttaatgatgctatcaaatccatcaataaacagtctcaaaccttccaacaacagtgctcactgctgctcctcaacttcagcccagcaagcagtaatatcatcacccattttgagatatgcaggtggaatagaacaaagaaacagccactgtaatcgagaagcatgtttactgtctaaatccacctgttgcagtaggaagccagagtggggttccaaatgcctcattaagtatgtggacagcctcactagtaagtgagtgaatttggcttcatcactgaacattagctaaggtcagcttaataacacaaatatgaggccgacttctttgcgagaagagaaaagaaaacatctgcttgatttaaaatccaccccacatgcctagagttgtctaatagtccctcactttccaatggcttcacatcctacttctacatttggggttttttggtgaaatcagagatagctcaggatttcataaaacgagaaactccaaactggtctattaggttccatgggaacacttgtagccaaaggattgtctgagggcaggaagacgacacttgtcaacaaggaagacagtgtttctttagttcccatattcatctaattcatggggttctaacattttggggggccatagattcttttgacaatctgagccaatctatgaaacttctccccaaaaagaaccaccccacaaaatcttgcaaaacgtaagagattttcctggatctgaagctacccgaagacatgggaagagttgtattctattattcaattttaagaatatttattaatattcactgagctattgctagccactgtgctaaacattttacatacattctcctatttcatcctcaaaacaatcctttgagttgggttttaatatagttccaatattcggatgtgaaaactgaggcttatagtggctaagaaacttgcccaaagccactacctagaaaatggcagagctggaatgtaggtttaactcctgaccactatgctataaagtcaccacatgtcaaactaattttcaagttgttgggacatgtcccctactaggttttaaactagatcttccttggtagatgaagctatagaacttctattttccctgctttctgtagtctctcacagtgacagcatctatactaaagtatagatacctaaggggaaaatatagaaagcctgcctgaataatagaatctagaacaacaacaaaaatattaattttttctgtgtatgcttaggtcaagcttaaaaaaaaaaaaaaaagaccggaaaatacctgggttgttagcctcacatttaggaaaaaattgtaatactcagttatctgtgtgtgtggctaaacaagtcagcatttctgcacacatacatctctttcctttatacttcccttcaaaagacaaatatcttacttttgatctttgacactatttggtcagtattcttctttacctttacttgtggcaaaactcaaggaagcgatcaaatagagggaagctcatttctatcattgtctctgtttccctataagaaagaactaccagggactcactgactgcattaggcatacaatgtcagagctgagctgaccactctggtcctgtaatgtctttggcctcacaccttggcagccatcattaatgggccatacccttccccaggtgcagaattctcctccccagagcactcaggccgttactaccaatttatctgagttggaaataagactcatttgccagttcttatttttaaagtggcaccctttaactttgaacctgtgtattttacactggcatcctagattcagcaatgaggtttggtggtgtttcaactaggaagggagaaaatgagtgcatctgaagttccttacagcttggtttctttggaatgctttcatcttctaagcaaagggatcagggtttgatctgtaagagttaaaaagacaaagtcattttgaagaattaactcagccagggatcatgcaaaaagattagaaaccataatgcccttgttaaagccctgctgtcaacctgccttcacccagagcttagagggccacagcagcaaagaggttggggtccatccctctctgatgtgctttttccacaacacatatctggtcctctggcaggattgtggatagagctcctcaccatacccaaaagactcagccccagtgccagtgctttcctggttcaacaacccaccacaaaaccttagtaaaaggatgagccaaaaatgaaaaagactcgactctacagtaagtcagtcagggatttcctttttaatggtttaagacatccaaatggcaagccaggaatagataccattaaagggtctcataggactaaccttaccagagccagaaatctagctctctggaagagatgcaagattctagaaaagtaaagggaagtgtcggcacatctaaatttagtgaacacaaaattaatttttatctagtctgtgacggagggaataaagtttttcatgtatcaaccacctcccccagtcaggtttctccctttttgagattatgaagaagctgagacatacttcttaaggaggtcgtgttttagaaggaaaaggcagaggctatccatcattatgctggctagatgcgcttctgaagaagccggattctgatgttcttaaccaaaatggtgaggtcatggaagtcccatttgcttggagattttgaaaaaaaaaaaaaaaaaaaacccattcccataaagtaattgagttcagcctttggattatttttggtttggtttttctctggttttgggtgtgatgtaagaagagctttttagttttgttttgaataacatcaatccttgcacactctatgcaaaaattttgtaagcatttcaataatgctatgaattacaaggaactattttaactttattacactttctgtataaaaaatttgtatttaatattatttcgaccacagtcttgtaaaatatattaataaaaataatgattggtaagaaggaaaaaaaaaaaaaaaaaa

SEQ ID NO: 69 - DNA, 8626 bp, Homo sapiens
acgacgggggaggtgctgtacgtccaagatggcggcgccctgtaggctggagggactgtgaggtaaacagctgagggggaggagacggtggtgaccatgaaagacaccaggttgacagcactggaaactgaagtaccagttgtcgctagaacagtttggtagtggccccaatgaagaaccttcagaacctgtagcacacgtcctggagccagcacagcgccttcgagcgagagaatggcccaacaagcaaatgtcggggagcttcttgccatgctggactcccccatgctgggtgtgcgggacgacgtgacagctgtctttaaagagaacctcaattctgaccgtggccctatgcttgtaaacaccttggtggattattacctggaaaccagctctcagccggcattgcacatcctgaccaccttgcaagagccacatgacaagcacctcttggacaggattaacgaatatgtgggcaaagccgccactcgtttatccatcctctcgttactgggtcatgtcataagactgcagccatcttggaagcataagctctctcaagcacctcttttgccttctttactaaaatgtctcaagatggacactgacgtcgttgtcctcacaacaggcgtcttggtgttgataaccatgctaccaatgattccacagtctgggaaacagcatcttcttgatttctttgacatttttggccgtctgtcatcatggtgcctgaagaaaccaggccacgtggcggaagtctatctcgtccatctccatgccagtgtgtacgcactctttcatcgcctttatggaatgtacccttgcaacttcgtctcctttttgcgttctcattacagtatgaaagaaaacctggagacttttgaagaagtggtcaagccaatgatggagcatgtgcgaattcatccggaattagtgactggatccaaggaccatgaactggaccctcgaaggtggaagagattagaaactcatgatgttgtgatcgagtgtgccaaaatctctctggatcccacagaagcctcatatgaagatggctattctgtgtctcaccaaatctcagcccgctttcctcatcgttcagccgatgtcaccaccagcccttatgctgacacacagaatagctatgggtgtgctacttctaccccttactccacgtctcggctgatgttgttaaatatgccagggcagctacctcagactctgagttccccatcgacacggctgataactgaaccaccacaagctactctttggagcccatctatggtttgtggtatgaccactcctccaacttctcctggaaatgtcccacctgatctgtcacacccttacagtaaagtctttggtacaactgcaggtggaaaaggaactcctctgggaaccccagcaacctctcctcctccagccccactctgtcattcggatgactacgtgcacatttcactcccccaggccacagtcacaccccccaggaaggaagagagaatggattctgcaagaccatgtctacacagacaacaccatcttctgaatgacagaggatcagaagagccacctggcagcaaaggttctgtcactctaagtgatcttccagggtttttaggtgatctggcctctgaagaagatagtattgaaaaagataaagaagaagctgcaatatctagagaactttctgagatcaccacagcagaggcagagcctgtggttcctcgaggaggctttgactctcccttttaccgagacagtctcccaggttctcagcggaagacccactcggcagcctccagttctcagggcgccagcgtgaaccctgagcctttacactcctccctggacaagcttgggcctgacacaccaaagcaagcctttactcccatagacctgccctgcggcagtgctgatgaaagccctgcgggagacagggaatgccagacttctttggagaccagtatcttcactcccagtccttgtaaaattccacctccgacgagagtgggctttggaagcgggcagcctcccccgtatgatcatctttttgaggtggcattgccaaagacagcccatcattttgtcatcaggaagactgaggagctgttaaagaaagcaaaaggaaacacagaggaagatggtgtgccctctacctccccaatggaagtgctggacagactgatacagcagggagcagacgcgcacagcaaggagctgaacaagttgcctttacccagcaagtctgtcgactggacccactttggaggctctcctccttcagatgagatccgcaccctccgagaccagttgcttttactgcacaaccagttactctatgagcgttttaagaggcagcagcatgccctccggaacaggcggctcctccgcaaggtgatcaaagcagcagctctggaggaacataatgctgccatgaaagatcagttgaagttacaagagaaggacatccagatgtggaaggttagtctgcagaaagaacaagctagatacaatcagctccaggagcagcgtgacactatggtaaccaagctccacagccagatcagacagctgcagcatgaccgagaggaattctacaaccagagccaggaattacagacgaagctggaggactgcaggaacatgattgcggagctgcggatagaactgaagaaggccaacaacaaggtgtgtcacactgagctgctgctcagtcaggtttcccaaaagctctcaaacagtgagtcggtccagcagcagatggagttcttgaacaggcagctgttggttcttggggaggtcaacgagctctatttggaacaactgcagaacaagcactcagataccacaaaggaagtagaaatgatgaaagccgcctatcggaaagagctagaaaaaaacagaagccatgttctccagcagactcagaggcttgatacctcccaaaaacggattttggaactggaatctcacctggccaagaaagaccaccttcttttggaacagaagaaatatctagaggatgtcaaactccaggcaagaggacagctgcaggccgcagagagcaggtatgaggctcagaaaaggataacccaggtgtttgaattggagatcttagatttatatggcaggttggagaaagatggcctcctgaaaaaacttgaagaagaaaaagcagaagcagctgaagcagcagaagaaaggcttgactgttgtaatgacgggtgctcagattccatggtagggcacaatgaagaggcatctggccacaacggtgagaccaagacccccaggcccagcagcgcccggggcagtagtggaagcagaggtggtggaggcagcagcagcagcagcagcgagctttctaccccagagaaacccccacaccagagggcaggcccattcagcagtcggtgggagacgactatgggagaagcgtctgccagcatccccaccactgtgggctcacttcccagttcaaaaagcttcctgggtatgaaggctcgagagttatttcgtaataagagcgagagccagtgtgatgaggacggcatgaccagtagcctttctgagagcctaaagacagaactgggcaaagacttgggtgtggaagccaagattcccctgaacctagatggccctcacccgtctcccccgaccccggacagtgttggacagctacatatcatggactacaatgagactcatcatgaacacagctaaggaatgatggtcaatcagtgttaacttgcatattgttggcacagaacaggaggtgtgaatgcacgtttcaaagctttcctgtttccagggtctgagtgcaagttcatgtgtggaaatgggacggaggtcctttggacagctgactgaatgcagaacggtttttggatctggcattgaaatgcctcttgaccttcccctccacccgccctaaccccctctcatttacctcgcagtgtgttctaatccaagggccagttggtgttcctcagtagctttactttcttcctttcccccccaaatggttgcgtcctttgaacctgtgcaatatgaggccaaatttaatctttgagtctaacacaccactttctgctttcccgaagttcagataactgggttggctctcaattagaccaggtagtttgttgcattgcaggtaagtctggttttgtcccttccaggaggacatagcctgcaaagctggttgtctttacatgaaagcgtttacatgagactttccgactgcttttttgattctgaagttcagcatctaaagcagcaggtctagaagaacaacggtttattcatacttgcattcttttggcagttctgataagcttcctagaaagttctgtgtaaacagaagcctgtttcagaaatctggagctggcactgtggagaccacacaccctttgggaaagctcttgtctcttcttcccccactacctcttatttatttggtgtttgcttgaatgctggtactattgtgaccacaggctggtgtgtaggtggtaaaacctgttctccataggagggaaggagcagtcactgggagaggttacccgagaagcacttgagcatgaggaactgcacctttaggccatctcagcttgctgggccttttgttaaacccttctgtctactggcctccctttgtgtgcatacgcctcttgttcatgtcagcttatatgtgacactgcagcagaaaggctctgaaggtccaaagagtttctgcaaagtgtatgtgaccatcatttcccaggccattagggttgcctcactgtagcaggttctaggctaccagaagaggggcagctttttcataccaattccaactttcaggggctgactctccagggagctgatgtcatcacactctccatgttagtaatggcagagcagtctaaacagagtccgggagaatgctggcaaaggctggctgtgtatacccactaggctgccccacgtgctcccgagagatgacactagtcagaaaattggcagtggcagagaatccaaactcaacaagtgctcctgaaagaaacgctagaagcctaagaactgtggtctggtgttccagctgaggcagggggatttggtaggaaggagccagtgaacttggctttcctgtttctatctttcattaaaaagaatagaaggattcagtcataaagaggtaaaaaactgtcacggtacgaaatcttagtgcccacggaggcctcgagcagagagaatgaaagtcttttttttttttttttttttttagcatggcaataaatattctagcatccctaactaaaggggactagacagttagagactctgtcaccctagctataccagcagaaaacctgttcaggcaggctttctgggtgtgactgattcccagcctgtggcagggcgtggtcccaactactcagcctagcacaggctggcagttggtactgaattgtcagatgtggagtattagtgacaccacacatttaattcagctttgtccaaaggaaagcttaaaacccaatacagtctagtttcctggttccgttttagaaaaggaaaacgtgaacaaacttagaaagggaaggaaatcccatcagtgaatcctgaaactggttttaagtgctttccttctcctcatgcccaagagatctgtgccatagaacaagataccaggcacttaaagccttttcctgaattggaaaggaaaagaggcccaagtgcaaaagaaaaaacattttagaaacggacagcttataaaaataaagggaagaaaggaggcagcatggagagaggcctgtgctagaagctccatggacgtgtctgcacagggtcctcagctcatccatgcggcctgggtgtccttttactcagctttataacaaatgtggctccaagctcaggtgcctttgagttctaggaggctgtgggttttattcaactacggttgggagaatgagacctggagtcatgttgaaggtgcccaacctaaaaatgtaggctttcatgttgcaaagaactccagagtcagtagttaggtttggtttggttttggacatgataaacctgccaagagtcaacaggtcacttgatcatgctgcagtgggtagttctaaggatggaaaggtgacagtattactctcgagaggcaattcagtcctgggcaaaggtattagtacaataagcgttaagggcagagtctaccttgaaaccaattaagcagcttggtattcataaatattgggattggatggcctccatccagaaatcactatgggtgagcatacctgtctcagctgtttggccaatgtgcataacctactcggatccccacctgacactaaccagagtcagcacaggccccgaggagcccgaagtctgctgctgtgcagcatggaattcctttaaaaaggtgcactacagttttagcggggagggggataggaagacgcagagcaaatgagctccggagtccctgcaggtgaataaacacacagatctgcatctgatagaactttgatggattttcaaaaagccgttgacaaggctctgctatacagtctataaaaattgttattatgggattggaagaaacacgtggtcatgaatagaaaaaaaacaaacccaaaggtaggaaggtcaaggtcatttcttagatggagaagttgtgaaagatgtccttggagatgagttttaggaccagcattactaaggcaggtgggcagacagtgacctctctaggtgtgtccacagagtttttcaggagagaaaactgcctgacctttgggactaagctgcggaatcttcttactaagcttgaagagtggagaggcgagaggtgagctactttgtgagccaaagcttatgtgacatggttggggaaacagtccaaactgttctgagaaggtgaactgttacgacccaggacaattagaaaaattcacccaccatgccgcacattactgggtaaaagcagggcagcagggaacaaaactccagactcttgggccgtccccatttgcaacagcacacatagtttctggtatatttgttgggaaagataaaactctagcagttgttgaggggaggatgtataaaatggtcatggggatgaaaggatctctgagaccacagaggctcagactcactgttaagaatagaaaactgggtatgcgtttcatgtagccagcagaactgaagtgtgctgtgacaagccaatgtgaatttctaccaaatagtagagcataccacttgaagaaggaaagaaccgaagagcaaacaaaagttctgcgtaatgagactcaccttttctcgctgaaagcactaagaggtgggaggaggcctgcacaggctggaggagggtttgggcagagcgaagacccggccaggaccttggtgagatggggtgccgcccacctcctgcggatactcttggagagttgttcccccagggggctctgccccacctggagaaggaagctgcctggtgtggagtgactcaaatcagtatacctatctgctgcaccttcactctccagggtacatgctttaaaaccgacccgcaacaagtattggaaaaatgtatccagtctgaagatgtttgtgtatctgtttacatccagagttctgtgacacatgccccccagattgctgcaaagatcccaaggcattgattgcacttgattaagcttttgtctgtaggtgaaagaacaagtttaggtcgaggactggcccctaggctgctgctgtgacccttgtcccatgtggcttgtttgcctgtccgggactcttcgatgtgcccaggggagcgtgttcctgtctcttccatgccgtcctgcagtccttatctgctcgcctgagggaagagtagctgtagctacaagggaagcctgcctggaagagccgagcacctgtgcccatggcttctggtcatgaaacgagttaatgatggcagaggagcttcctccccacttcgcagcgccacattatccatcctctgagataagtaggctggtttaaccattggaatggacctttcagtggaaaccctgagagtctgagaacccccagaccaacccttccctccctttccccacctcttacagtgtttggacaggagggtatggtgctgctctgtgtagcaagtactttggcttatgaaagaggcagccacgcattttgcactaggaagaatcagtaatcacttttcagaagacttctatggaccacaaatatattacggaggaacagattttgctaagacataatctagttttataactcaatcatgaatgaaccatgtgtggcaaacttgcagtttaaaggggtcccatcagtgaaagaaactgattttttttaacggactgcttttagttaaattgaagaaagtcagctcttgtcaaaaggtctaaactttcccgcctcaatcctaaaagcatgtcaacaatccacatcagatgccataaatatgaactgcaggataaaatggtacaatcttagtgaatgggaattggaatcaaaagagtttgctgtccttcttagaatgttctaaaatgtcaaggcagttgcttgtgtttaactgtgaacaaataaaaatttattgttttgcactacaaaaaaaaaa

SEQ ID NO: 70 - DNA, 2175 bp, Homo sapiens
gttgtatatcagggccgcgctgagctgcgccagctgaggtgtgagcagctgccgaagtcagttccttgtggagccggagctgggcgcggattcgccgaggcaccgaggcactcagaggaggcgccatgtcagaaccggctggggatgtccgtcagaacccatgcggcagcaaggcctgccgccgcctcttcggcccagtggacagcgagcagctgagccgcgactgtgatgcgctaatggcgggctgcatccaggaggcccgtgagcgatggaacttcgactttgtcaccgagacaccactggagggtgacttcgcctgggagcgtgtgcggggccttggcctgcccaagctctaccttcccacggggccccggcgaggccgggatgagttgggaggaggcaggcggcctggcacctcacctgctctgctgcaggggacagcagaggaagaccatgtggacctgtcactgtcttgtacccttgtgcctcgctcaggggagcaggctgaagggtccccaggtggacctggagactctcagggtcgaaaacggcggcagaccagcatgacagatttctaccactccaaacgccggctgatcttctccaagaggaagccctaatccgcccacaggaagcctgcagtcctggaagcgcgagggcctcaaaggcccgctctacatcttctgccttagtctcagtttgtgtgtcttaattattatttgtgttttaatttaaacacctcctcatgtacataccctggccgccccctgccccccagcctctggcattagaattatttaaacaaaaactaggcggttgaatgagaggttcctaagagtgctgggcatttttattttatgaaatactatttaaagcctcctcatcccgtgttctccttttcctctctcccggaggttgggtgggccggcttcatgccagctacttcctcctccccacttgtccgctgggtggtaccctctggaggggtgtggctccttcccatcgctgtcacaggcggttatgaaattcaccccctttcctggacactcagacctgaattctttttcatttgagaagtaaacagatggcactttgaaggggcctcaccgagtgggggcatcatcaaaaactttggagtcccctcacctcctctaaggttgggcagggtgaccctgaagtgagcacagcctagggctgagctggggacctggtaccctcctggctcttgatacccccctctgtcttgtgaaggcagggggaaggtggggtcctggagcagaccaccccgcctgccctcatggcccctctgacctgcactggggagcccgtctcagtgttgagccttttccctctttggctcccctgtaccttttgaggagccccagctacccttcttctccagctgggctctgcaattcccctctgctgctgtccctcccccttgtcctttcccttcagtaccctctcagctccaggtggctctgaggtgcctgtcccacccccacccccagctcaatggactggaaggggaagggacacacaagaagaagggcaccctagttctacctcaggcagctcaagcagcgaccgccccctcctctagctgtgggggtgagggtcccatgtggtggcacaggcccccttgagtggggttatctctgtgttaggggtatatgatgggggagtagatctttctaggagggagacactggcccctcaaatcgtccagcgaccttcctcatccaccccatccctccccagttcattgcactttgattagcagcggaacaaggagtcagacattttaagatggtggcagtagaggctatggacagggcatgccacgtgggctcatatggggctgggagtagttgtctttcctggcactaacgttgagcccctggaggcactgaagtgcttagtgtacttggagtattggggtctgaccccaaacaccttccagctcctgtaacatactggcctggactgttttctctcggctccccatgtgtcctggttcccgtttctccacctagactgtaaacctctcgagggcagggaccacaccctgtactgttctgtgtctttcacagctcctcccacaatgctgaatatacagcaggtgctcaataaatgattcttagtgactttacttgtaaaaaaaaaaaaaaaaaa

SEQ ID NO: 71 - DNA, 3540 bp, Homo sapiens
ggtggtggaatatagagctcatgtgatccgtcacatgacagcagatccgcggaagggcagaatgggactccaagcctgcctcctagggctctttgccctcatcctctctggcaaatgcagttacagcccggagcccgaccagcggaggacgctgcccccaggctgggtgtccctgggccgtgcggaccctgaggaagagctgagtctcacctttgccctgagacagcagaatgtggaaagactctcggagctggtgcaggctgtgtcggatcccagctctcctcaatacggaaaatacctgaccctagagaatgtggctgatctggtgaggccatccccactgaccctccacacggtgcaaaaatggctcttggcagccggagcccagaagtgccattctgtgatcacacaggactttctgacttgctggctgagcatccgacaagcagagctgctgctccctggggctgagtttcatcactatgtgggaggacctacggaaacccatgttgtaaggtccccacatccctaccagcttccacaggccttggccccccatgtggactttgtggggggactgcaccgttttcccccaacatcatccctgaggcaacgtcctgagccgcaggtgacagggactgtaggcctgcatctgggggtaaccccctctgtgatccgtaagcgatacaacttgacctcacaagacgtgggctctggcaccagcaataacagccaagcctgtgcccagttcctggagcagtatttccatgactcagacctggctcagttcatgcgcctcttcggtggcaactttgcacatcaggcatcagtagcccgtgtggttggacaacagggccggggccgggccgggattgaggccagtctagatgtgcagtacctgatgagtgctggtgccaacatctccacctgggtctacagtagccctggccggcatgagggacaggagcccttcctgcagtggctcatgctgctcagtaatgagtcagccctgccacatgtgcatactgtgagctatggagatgatgaggactccctcagcagcgcctacatccagcgggtcaacactgagctcatgaaggctgccgctcggggtctcaccctgctcttcgcctcaggtgacagtggggccgggtgttggtctgtctctggaagacaccagttccgccctaccttccctgcctccagcccctatgtcaccacagtgggaggcacatccttccaggaacctttcctcatcacaaatgaaattgttgactatatcagtggtggtggcttcagcaatgtgttcccacggccttcataccaggaggaagctgtaacgaagttcctgagctctagcccccacctgccaccatccagttacttcaatgccagtggccgtgcctacccagatgtggctgcactttctgatggctactgggtggtcagcaacagagtgcccattccatgggtgtccggaacctcggcctctactccagtgtttggggggatcctatccttgatcaatgagcacaggatccttagtggccgcccccctcttggctttctcaacccaaggctctaccagcagcatggggcaggactctttgatgtaacccgtggctgccatgagtcctgtctggatgaagaggtagagggccagggtttctgctctggtcctggctgggatcctgtaacaggctggggaacacccaacttcccagctttgctgaagactctactcaacccctgaccctttcctatcaggagagatggcttgtcccctgccctgaagctggcagttcagtcccttattctgccctgttggaagccctgctgaaccctcaactattgactgctgcagacagcttatctccctaaccctgaaatgctgtgagcttgacttgactcccaaccctaccatgctccatcatactcaggtctccctactcctgccttagattcctcaataagatgctgtaactagcattttttgaatgcctctccctccgcatctcatctttctcttttcaatcaggcttttccaaagggttgtatacagactctgtgcactatttcacttgatattcattccccaattcactgcaaggagacctctactgtcaccgtttactctttcctaccctgacatccagaaacaatggcctccagtgcatacttctcaatctttgctttatggcctttccatcatagttgcccactccctctccttacttagcttccaggtcttaacttctctgactactcttgtcttcctctctcatcaatttctgcttcttcatggaatgctgaccttcattgctccatttgtagatttttgctcttctcagtttactcattgtcccctggaacaaatcactgacatctacaaccattaccatctcactaaataagactttctatccaataatgattgatacctcaaatgtaagatgcgtgatactcaacatttcatcgtccaccttcccaaccccaaacaattccatctcgtttcttcttggtaaatgatgctatgctttttccaaccaagccagaaacctgtgtcatcttttcaccccaccttcaatcaacaagtcctcaatcaacaagtcctactgactgcacatcttaaatatatctttatcagtccacaagtccttccaattatatttcccaagtatatctagaacttatccacttatatccccactgctactaccttagtttagggctatattctcttgaaaaaaagtgtccttacttcctgccaatccccaagtcatcttccagagtaaaatgcaaatcccatcaggccacttggatgaaaacccttcaaggattactggatagaattcaggctttcccctccagcccccaatcatagctcacaaaccttccttgctatttgttcttaagtaaaaaatcatttttcctcctccctccccaaaccccaaggaactctcactcttgctcaagctgttccgtccccttaccacccctgatacaactgccaggttaatttccagaattcttgcaagactcagttcagaagtcaccttctttcgtgaatgttttgattccctgaggctactttattttggtatggctgaaaaatcctagattttctaaacaaaacctgtttgaatcttggttctgatatggactaggagagagactgggtcaagtaagcttatctccctgaggctgtttcctcgtctgttaagtgtgaatatcaatacctgcctttcataatcaccagggaataaagtggaataatgttgataacagtgcttggcacctggaagtaggtggcagatgttaacgcccttcctcccttgcactgcgccccctgtgcctacctctagcattgtaacgaccacgtagtattgaaatggccagtttacttgtctgccttcctttccaagaccgttggtgcctagaggactagaatcgtgtcctatttaactttgtgttcccaggtcctagctcaggagttggcaaataagaattaaatgtctgctacaccgaaaaccaaaaaaa

SEQ ID NO: 72 - DNA, 6930 bp, Homo sapiens
gaccgttgcttggcagacactggatggttatgagcctgaacaagctgaaaaggggcaggaaaagaagtggaggcagcattcttcctatttaaagctgcatcgcttgaaaaaagttttcgcagactgtgctggagctggtgctgaaaaagggggtttgcagaggctgccctggggctggtgctgaaagaagagcccacagctgacttcatggtgctacaataacctcagaatctacttttcactctcaggagaacccacatgtctaatatttagacatgatggcaaactgggcggaagcaagacctctcctcattcttattgttttattagggcaatttgtctcaataaaagcccaggaagaagacgaggatgaaggatatggtgaagaaatagcctgcactcagaatggccagatgtacttaaacagggacatttggaaacctgccccttgtcagatctgtgtctgtgacaatggagccattctctgtgacaagatagaatgccaggatgtgctggactgtgccgaccctgtaacgccccctggggaatgctgtcctgtctgttcacaaacacctggaggtggcaatacaaattttggtagaggaagaaagggacaaaagggagaaccaggattagtgcctgttgtaacaggcatacgtggtcgtccaggaccggcaggacctccaggatcacagggaccaagaggagagcgagggccaaaaggaagacctggccctcgtggacctcagggaattgatggagaaccaggtgttcctggtcaacctggtgctccaggacctcctggacatccgtcccacccaggacccgatggcttgagcaggccgttttcagctcaaatggctgggttggatgaaaaatctggacttgggagtcaagtaggactaatgcctggctctgtgggtcctgttggcccaaggggaccacagggtttacaaggacagcaaggtggtgcaggacctacaggacctcctggtgaacctggtgatcctggaccaatgggtccgattggttcacgtggaccagagggccctcctggtaaacctggggaagatggtgaacctggcagaaatggaaatcctggtgaagtgggatttgcaggatctccgggagctcgtggatttcctggggctcctggtcttccaggtctgaagggtcaccgaggacacaaaggtcttgaaggccctaaaggtgaagttggagcacctggttccaagggtgaagctggccccactggtccaatgggtgccatgggtcctctgggtccgaggggaatgccaggagagagagggagacttgggccacagggtgctcctggacaacgaggtgcacatggtatgcctggaaaacctggaccaatgggtcctcttgggataccaggctcttctggttttccaggaaatcctggaatgaagggagaagcaggtcctacaggggcgcgaggccctgaaggtcctcaggggcagagaggtgaaactgggcccccaggtccagttggctctccaggtcttcctggtgcaataggaactgatggtactcctggtgccaaaggcccaacgggctctccgggtacctctggtcctcctggctcagcagggcctcctggatctccaggacctcagggtagcactggtcctcagggaattcgaggccaaccgggtgatccaggagttccaggtttcaaaggagaagctggcccaaaaggggaaccagggccacatggtattcagggtccgataggcccacccggtgaagaaggcaaaagaggtcccagaggtgacccaggaacagttggtcctccagggccagtgggagaaaggggtgctcctggcaatcgtggttttccaggctctgatggtttacctgggccaaagggtgctcaaggagaacggggtcctgtaggttcttcaggacccaaaggaagccagggggatccaggacgtccaggggaacctgggcttccaggtgctcggggtttgacaggaaatcctggtgttcaaggtcctgaaggaaaacttggacctttgggtgcgccaggggaagatggccgtccaggtcctccaggctccataggaatcagagggcagcccgggagcatgggccttccaggccccaaaggtagcagtggtgaccctgggaaacctggagaagcaggaaatgctggagttcctgggcagaggggagctcctggaaaagatggtgaagttggtccttctggtcctgtgggcccgccgggtctagctggtgaaagaggagaacaaggacctccaggccccacaggttttcaggggcttcctggtcctccagggcctcctggagaaggtggaaaaccaggtgatcaaggtgttcctggagatcccggagcagttggcccgttaggacctagaggagaacgaggaaatcctggggaaagaggagaacctgggataactggactccctggtgagaagggaatggctggaggacatggtcctgatggcccaaaaggcagtccaggtccatctgggacccctggagatacaggcccaccaggtcttcaaggtatgccgggagaaagaggaattgcaggaactcctggccccaagggtgacagaggtggcataggagaaaaaggtgctgaaggcacagctggaaatgatggtgcaagaggtcttccaggtcctttgggccctccaggtccggcaggtcctactggagaaaagggtgaacctggtcctcgaggtttagttggccctcctggctcccggggcaatcctggttctcgaggtgaaaatgggccaactggagctgttggttttgccggaccccagggtcctgacggacagcctggagtaaaaggtgaacctggagagccaggacagaagggagatgctggttctcctggaccacaaggtttagcaggatcccctggccctcatggtcctaatggtgttcctggactaaaaggtggtcgaggaacccaaggtccgcctggtgctacaggatttcctggttctgcgggcagagttggacctccaggccctgctggagctccaggacctgcgggacccctaggggaacccgggaaggagggacctccaggtcttcgtggggaccctggctctcatgggcgtgtgggagatcgaggaccagctggcccccctggtggcccaggagacaaaggggacccaggagaagatgggcaacctggtccagatggcccccctggtccagctggaacgaccgggcagagaggaattgttggcatgcctgggcaacgtggagagagaggcatgcccggcctaccaggcccagcgggaacaccaggaaaagtaggaccaactggtgcaacaggagataaaggtccacctggacctgtggggcccccaggctccaatggtcctgtaggggaacctggaccagaaggtccagctggcaatgatggtaccccaggacgggatggtgctgttggagaacgtggtgatcgtggagaccctgggcctgcaggtctgccaggctctcagggtgcccctggaactcctggccctgtgggtgctccaggagatgcaggacaaagaggagatccgggttctcggggtcctataggaccacctggtcgagctgggaaacgtggattacctggaccccaaggacctcgtggtgacaaaggtgatcatggagaccgaggcgacagaggtcagaagggccacagaggctttactggtcttcagggtcttcctggccctcctggtccaaatggtgaacaaggaagtgctggaatccctggaccatttggcccaagaggtcctccaggcccagttggtccttcaggtaaagaaggaaaccctgggccacttgggccaattggacctccaggtgtacgaggcagtgtaggagaagcaggacctgagggccctcctggtgagcctggcccacctggccctccgggtccccctggccaccttacagctgctcttggggatatcatggggcactatgatgaaagcatgccagatccacttcctgagtttactgaagatcaggcggctcctgatgacaaaaacaaaacggacccaggggttcatgctaccctgaagtcactcagtagtcagattgaaaccatgcgcagccccgatggctcgaaaaagcacccagcccgcacgtgtgatgacctaaagctttgccattccgcaaagcagagtggtgaatactggattgatcctaaccaaggatctgttgaagatgcaatcaaagtttactgcaacatggaaacaggagaaacatgtatttcagcaaacccatccagtgtaccacgtaaaacctggtgggccagtaaatctcctgacaataaacctgtttggtatggtcttgatatgaacagagggtctcagttcgcttatggagaccaccaatcacctaatacagccattactcagatgacttttttgcgccttttatcaaaagaagcctcccagaacatcacttacatctgtaaaaacagtgtaggatacatggacgatcaagctaagaacctcaaaaaagctgtggttctcaaaggggcaaatgacttagatatcaaagcagagggaaatattagattccggtatatcgttcttcaagacacttgctctaagcggaatggaaatgtgggcaagactgtctttgaatatagaacacagaatgtggcacgcttgcccatcatagatcttgctcctgtggatgttggcggcacagaccaggaattcggcgttgaaattgggccagtttgttttgtgtaaagtaagccaagacacatcgacaatgagcaccaccatcaatgaccaccgccattcacaagaactttgactgtttgaagttgatcctgagactcttgaagtaatggctgatcctgcatcagcattgtatatatggtcttaagtgcctggcctccttatccttcagaatatttattttacttacaatcctcaagttttaattgattttaaatatttttcaatacaacagtttaggtttaagatgaccaatgacaatgaccacctttgcagaaagtaaactgattgaataaataaatctccgttttcttcaatttatttcagtgtaatgaaaaagttgcttagtatttatgaggaaattcttcttcctggcaggtagcttaaagagtggggtatatagagccacaacacatgtttattttgcttggctgcagttgaaaaatagaaattagtgcccttttgtgacctctcattccaagattgtcaattaaaaatgagtttaaaatgtttaacttgtgatcgagacctacatgcatgtcttgatattgtgtaactataatagagactctttaaggagaatcttaaaaaaaaaaaaacgtttctcactgtcttaaatagaatttttaaatagtatatattcagtggcattttggagaacaaagtgaatttacttcgacttcttaaatttttgtaaaagactataagtttagacatctttctcattcaaatttaaagatatctttctcctcttgatcaatctatcaatattgatagaagtcacactagtatataccatttaatacatttacactttcttatttaagaagatattgaatgcaaaataattgacatatagaactttacaaacatatgtccaaggactctaaattgagactcttccacatgtacaatctcatcatcctgaagcctataatgaagaaaaagatctagaaactgagttgtggagctgactctaatcaaatgtgatgattggaattagaccatttggcctttgaactttcataggaaaaatgacccaacatttcttagcatgagctacctcatctctagaagctgggatggacttactattcttgtttatattttagatactgaaaggtgctatgcttctgttattattccaagactggagataggcagggctaaaaaggtattattatttttcctttaatgatggtgctaaaattcttcctataaaattccttaaaaataaagatggtttaatcactaccattgtgaaaacataactgttagacttcccgtttctgaaagaaagagcatcgttccaatgcttgttcactgttcctctgtcatactgtatctggaatgctttgtaatacttgcatgcttcttagaccagaacatgtaggtccccttgtgtctcaatactttttttttcttaattgcatttgttggctctattttaatttttttcttttaaaataaacagctgggaccatcccaaaagacaagccatgcatacaactttggtcatgtatctctgcaaagcatcaaattaaatgcacgcttttgtcatgtcagtggtttttgttttgtgaaattcctttgaccatattagatctatttcatttccaatagtgaaaaggagatgtggtggtatactttgtttgccatttgtttaaaagatacaacggataccttctatcatgtatgtactggcttataaatgaaaatctatctacaacattacccacaaaggcaacatgacaccaattatcactgcctctgcccttaaaaatgtcagagtagtattattgataaaaagggcaagcaatagatttttcatgactgaataaactgtaataataaaacatatgtctcaaagtgtatcacatatgaatttagcctaattgttttcagtttcattctcaatatttagtttacaacatcattttcccctaaactggttatattttgacctgtatatcttaaatttgagtatttatatgcctaaatacatgtgtgagttttgtttgacttccaagtccaaactataagattatataagttcatatagatgaatcagaaatatgtggtaatactattaagtcacaaacactaacaatttccaactatagaaataacagttcttatttggattttgggaatgctaccaata

SEQ ID NO: 73 - DNA, 1647 bp, Homo sapiens
tcattcattgccggcctgaggactcctagctcggccccgctccgcgctacagcccaaagcccagcctgagacccagccgccctcgtatgcccacggcctagctccccttccctccaacagacagactgggaaaaccgagtgggcgacggctgagcaaggactctccagtcctcagtcaccttggacaaagaagtgtggatcctcagattccatcttttccaactccaaggtgccatggcagagaaggtgctggtaacaggtggggctggctacattggcagccacacggtgctggagctgctggaggctggctacttgcctgtggtcatcgataacttccataatgccttccgtggagggggctccctgcctgagagcctgcggcgggtccaggagctgacaggccgctctgtggagtttgaggagatggacattttggaccagggagccctacagcgtctcttcaaaaagtacagctttatggcggtcatccactttgcggggctcaaggccgtgggcgagtcggtgcagaagcctctggattattacagagttaacctgaccgggaccatccagcttctggagatcatgaaggcccacggggtgaagaacctggtgttcagcagctcagccactgtgtacgggaacccccagtacctgccccttgatgaggcccaccccacgggtggttgtaccaacccttacggcaagtccaagttcttcatcgaggaaatgatccgggacctgtgccaggcagacaagacttggaacgcagtgctgctgcgctatttcaaccccacaggtgcccatgcctctggctgcattggtgaggatccccagggcatacccaacaacctcatgccttatgtctcccaggtggcgatcgggcgacgggaggccctgaatgtctttggcaatgactatgacacagaggatggcacaggtgtccgggattacatccatgtcgtggatctggccaagggccacattgcagccttaaggaagctgaaagaacagtgtggctgccggatctacaacctgggcacgggcacaggctattcagtgctgcagatggtccaggctatggagaaggcctctgggaagaagatcccgtacaaggtggtggcacggcgggaaggtgatgtggcagcctgttacgccaaccccagcctggcccaagaggagctggggtggacagcagccttagggctggacaggatgtgtgaggatctctggcgctggcagaagcagaatccttcaggctttggcacgcaagcctgaggaccctcccctaccaaggaccaggaaaagcagcagctgcctgctctccagcctctggcaggaactcagggccctggagctgctggggccaagccaaggcctcccctacctcaaaccccagctgggcccgcttagcccaccaggcatgaggccaagggctccactgaccaggaggccgaggtctctaactcttatcttccacagggtccaagagttcatcaggacccccaagagtgagtgagggggcaaggctctggcacaaaacctcctcctcccaggcactcatttatattgctctgaaagagctttccaaagtatttaaaaataaaaacaagttttcttacactgggaaaaaaaaaaaaaaaa

SEQ ID NO: 74 - DNA, 1229 bp, Homo sapiens
ctctcctcactcacccttcctggtgctttgggctctccttccttctcagacaagatgtcttatcagaaaaagcagcccacccctcagcccccagtggactgcgtgaagacctctggcggcggtggcggtggcggcggcagcggcggtggtggctgcggcttcttcggcggcggcggctcagggggcggtagcagcggttctggctgcggctactccggcggcggtggctactctggcggcggctgcggcgggggctcctccggcggcgggggcgggggcggcattggaggctgcggagggggctccggtgggagcgtcaagtactccggaggcggcggctcctccggcgggggctctggctgtttctccagcggtgggggcggctccggctgcttctcctccggtggcggcggctcctccgggggcggctccggctgcttctccagcggtgggggcggctcctccgggggcggctccggctgcttctcctccggcggcggcggcttctcgggccaggcggtccagtgccagagctacggaggcgtctctagcggcggctcctccgggggcggctccggctgcttctccagcggcgggggcggcggctctgtctgcggctactctggcggcggctctggctgcggcggaggctcctctggcggcagcggctccggctacgtctcctcgcagcaggtcactcagacctcgtgcgcgccccagccgagttacggaggggggtcgtccggcggcggcggcagcggcggaagcggctgcttctccagcggcgggggcggcgggagctccggctgcggcggcggctcctccgggattggcagcggctgcatcatcagtggcgggggctccgtctgcggaggtggttcctctggaggcggcggcggcggctcctccgtgggtggctccgggagtggcaagggcgtcccgatctgccaccagacccagcagaagcaggcgcctacctggccgtccaaatagatcccccagggtaccacggaggcgaaggagttggaggtgttttccaggggcaccgatgggcttagagctctcatgatgctacccgaggtttgcaaatccttcatgtcttaacctacctggaagaagccattgagctctccggctgcatctagttctgctgtttagcctctttggtttctgtacaactacctcccaaccccagtgcctcagtcaataaatttgcaaattcatgagaa

SEQ ID NO: 75 - DNA, 6582 bp, Homo sapiens
agagggcaaggagagagcagagaacacactttgccttctctttggtattgagtaatatcaaccaaattgcagacatctcaacactttggccaggcagcctgctgagcaaggtacctcagccagcatggcagcctctttcccacccaccttgggactcagttctgccccagatgaaattcagcacccacatattaaattttcagaatggaaatttaagctgttccgggtgagatcctttgaaaagacacctgaagaagctcaaaaggaaaagaaggattcctttgaggggaaaccctctctggagcaatctccagcagtcctggacaaggctgatggtcagaagccagtcccaactcagccattgttaaaagcccaccctaagttttcaaagaaatttcacgacaacgagaaagcaagaggcaaagcgatccatcaagccaaccttcgacatctctgccgcatctgtgggaattcttttagagctgatgagcacaacaggagatatccagtccatggtcctgtggatggtaaaaccctaggccttttacgaaagaaggaaaagagagctacttcctggccggacctcattgccaaggttttccggatcgatgtgaaggcagatgttgactcgatccaccccactgagttctgccataactgctggagcatcatgcacaggaagtttagcagtgccccatgtgaggtttacttcccgaggaacgtgaccatggagtggcacccccacacaccatcctgtgacatctgcaacactgcccgtcggggactcaagaggaagagtcttcagccaaacttgcagctcagcaaaaaactcaaaactgtgcttgaccaagcaagacaagcccgtcagcgcaagagaagagctcaggcaaggatcagcagcaaggatgtcatgaagaagatcgccaactgcagtaagatacatcttagtaccaagctccttgcagtggacttcccagagcactttgtgaaatccatctcctgccagatctgtgaacacattctggctgaccctgtggagaccaactgtaagcatgtcttttgccgggtctgcattctcagatgcctcaaagtcatgggcagctattgtccctcttgccgatatccatgcttccctactgacctggagagtccagtgaagtcctttctgagcgtcttgaattccctgatggtgaaatgtccagcaaaagagtgcaatgaggaggtcagtttggaaaaatataatcaccacatctcaagtcacaaggaatcaaaagagatttttgtgcacattaataaagggggccggccccgccaacatcttctgtcgctgactcggagagctcagaagcaccggctgagggagctcaagctgcaagtcaaagcctttgctgacaaagaagaaggtggagatgtgaagtccgtgtgcatgaccttgttcctgctggctctgagggcgaggaatgagcacaggcaagctgatgagctggaggccatcatgcagggaaagggctctggcctgcagccagctgtttgcttggccatccgtgtcaacaccttcctcagctgcagtcagtaccacaagatgtacaggactgtgaaagccatcacagggagacagatttttcagcctttgcatgcccttcggaatgctgagaaggtacttctgccaggctaccaccactttgagtggcagccacctctgaagaatgtgtcttccagcactgatgttggcattattgatgggctgtctggactatcatcctctgtggatgattacccagtggacaccattgcaaagaggttccgctatgattcagctttggtgtctgctttgatggacatggaagaagacatcttggaaggcatgagatcccaagaccttgatgattacctgaatggccccttcactgtggtggtgaaggagtcttgtgatggaatgggagacgtgagtgagaagcatgggagtgggcctgtagttccagaaaaggcagtccgtttttcattcacaatcatgaaaattactattgcccacagctctcagaatgtgaaagtatttgaagaagccaaacctaactctgaactgtgttgcaagccattgtgccttatgctggcagatgagtctgaccacgagacgctgactgccatcctgagtcctctcattgctgagagggaggccatgaagagcagtgaattaatgcttgagctgggaggcattctccggactttcaagttcatcttcaggggcaccggctatgatgaaaaacttgtgcgggaagtggaaggcctcgaggcttctggctcagtctacatttgtactctttgtgatgccacccgtctggaagcctctcaaaatcttgtcttccactctataaccagaagccatgctgagaacctggaacgttatgaggtctggcgttccaacccttaccatgagtctgtggaagaactgcgggatcgggtgaaaggggtctcagctaaacctttcattgagacagtcccttccatagatgcactccactgtgacattggcaatgcagctgagttctacaagatcttccagctagagataggggaagtgtataagaatcccaatgcttccaaagaggaaaggaaaaggtggcaggccacactggacaagcatctccggaagaagatgaacctcaaaccaatcatgaggatgaatggcaactttgccaggaagctcatgaccaaagagactgtggatgcagtttgtgagttaattccttccgaggagaggcacgaggctctgagggagctgatggatctttacctgaagatgaaaccagtatggcgatcatcatgccctgctaaagagtgcccagaatccctctgccagtacagtttcaattcacagcgttttgctgagctcctttctacgaagttcaagtataggtatgagggaaaaatcaccaattattttcacaaaaccctggcccatgttcctgaaattattgagagggatggctccattggggcatgggcaagtgagggaaatgagtctggtaacaaactgtttaggcgcttccggaaaatgaatgccaggcagtccaaatgctatgagatggaagatgtcctgaaacaccactggttgtacacctccaaatacctccagaagtttatgaatgctcataatgcattaaaaacctctgggtttaccatgaaccctcaggcaagcttaggggacccattaggcatagaggactctctggaaagccaagattcaatggaattttaagtagggcaaccacttatgagttggtttttgcaattgagtttccctctgggttgcattgagggcttctcctagcaccctttactgctgtgtatggggcttcaccatccaagaggtggtaggttggagtaagatgctacagatgctctcaagtcaggaatagaaactgatgagctgattgcttgaggcttttagtgagttccgaaaagcaacaggaaaaatcagttatctgaaagctcagtaactcagaacaggagtaactgcaggggaccagagatgagcaaagatctgtgtgtgttggggagctgtcatgtaaatcaaagccaaggttgtcaaagaacagccagtgaggccaggaaagaaattggtcttgtggttttcatttttttcccccttgattgattatattttgtattgagatatgataagtgccttctatttcatttttgaataattcttcatttttataattttacatatcttggcttgctatataagattcaaaagagctttttaaatttttctaataatatcttacatttgtacagcatgatgacctttacaaagtgctctcaatgcatttacccattcgttatataaatatgttacatcaggacaactttgagaaaatcagtccttttttatgtttaaattatgtatctattgtaaccttcagagtttaggaggtcatctgctgtcatggatttttcaataatgaatttagaatacacctgttagctacagttagttattaaatcttctgataatatatgtttacttagctatcagaagccaagtatgattctttatttttactttttcatttcaagaaatttagagtttccaaatttagagcttctgcatacagtcttaaagccacagaggcttgtaaaaatataggttagcttgatgtctaaaaatatatttcatgtcttactgaaacattttgccagactttctccaaatgaaacctgaatcaatttttctaaatctaggtttcatagagtcctctcctctgcaatgtgttattctttctataatgatcagtttactttcagtggattcagaattgtgtagcaggataaccttgtatttttccatccgctaagtttagatggagtccaaacgcagtacagcagaagagttaacatttacacagtgctttttaccactgtggaatgttttcacactcatttttccttacaacaattctgaggagtaggtgttgttattatctccatttgatgggggtttaaatgatttgctcaaagtcatttaggggtaataaatacttggcttggaaatttaacacagtccttttgtctccaaagcccttcttctttccaccacaaattaatcactatgtttataaggtagtatcagaatttttttaggattcacaactaatcactatagcacatgaccttgggattacatttttatggggcaggggtaagcaagtttttaaatcatttgtgtgctctggctcttttgatagaagaaagcaacacaaaagctccaaagggccccctaaccctcttgtggctccagttatttggaaactatgatctgcatccttaggaatctgggatttgccagttgctggcaatgtagagcaggcatggaattttatatgctagtgagtcataatgatatgttagtgttaattagttttttcttcctttgattttattggccataattgctactcttcatacacagtatatcaaagagcttgataatttagttgtcaaaagtgcatcggcgacattatctttaattgtatgtatttggtgcttcttcagggattgaactcagtatctttcattaaaaaacacagcagttttccttgctttttatatgcagaatatcaaagtcatttctaatttagttgtcaaaaacatatacatattttaacattagtttttttgaaaactcttggttttgtttttttggaaatgagtgggccactaagccacactttcccttcatcctgcttaatccttccagcatgtctctgcactaataaacagctaaattcacataatcatcctatttactgaagcatggtcatgctggtttatagattttttacccatttctactctttttctctattggtggcactgtaaatactttccagtattaaattatccttttctaacactgtaggaactattttgaatgcatgtgactaagagcatgatttatagcacaacctttccaataatcccttaatcagatcacattttgataaaccctgggaacatctggctgcaggaatttcaatatgtagaaacgctgcctatggttttttgcccttactgttgagactgcaatatcctagaccctagttttatactagagttttatttttagcaatgcctattgcaagtgcaattatatactccagggaaattcaccacactgaatcgagcatttgtgtgtgtatgtgtgaagtatatactgggacttcagaagtgcaatgtatttttctcctgtgaaacctgaatctacaagttttcctgccaagccactcaggtgcattgcagggaccagtgataatggctgatgaaaattgatgattggtcagtgaggtcaaaaggagccttgggattaataaacatgcactgagaagcaagaggaggagaaaaagatgtctttttcttccaggtgaactggaatttagttttgcctcagatttttttcccacaagatacagaagaagataaagatttttttggttgagagtgtgggtcttgcattacatcaaacagagttcaaattccacacagataagaggcaggatatataagcgccagtggtagttgggaggaataaaccattatttggatgcaggtggtttttgattgcaaatatgtgtgtgtcttcagtgattgtatgacagatgatgtattcttttgatgttaaaagattttaagtaagagtagatacattgtacccattttacattttcttattttaactacagtaatctacataaatatacctcagaaatcatttttggtgattattttttgttttgtagaattgcacttcagtttattttcttacaaataaccttacattttgtttaatggcttccaagagccttttttttttttgtatttcagagaaaattcaggtaccaggatgcaatggatttatttgattcaggggacctgtgtttccatgtcaaatgttttcaaataaaatgaaatatgagtttcaatactttttatattttaatatttccattcattaatattatggttattgtcagcaattttatgtttgaatatttgaaataaaagtttaagatttgaaaa

SEQ ID NO: 76 - DNA, 2215 bp, Homo sapiens
gagctgccctgaagagtcagccgaaagagctggaggcttcttccctgtggttgcgggttcctgcattctctgctctaaatcccagcctgcccttggggctgcccacgcccccttcagatcctttgctccggagagagacctgtccgagcagaggcctggactacatctcccggcgtgcctggcagtgtggtggcctctgtgcgccgtctgcactcgttgcaggcgacgatgcagagggctgtaagtgtggtggcccgtctgggctttcgcctgcaggcattccccccggccttgtgtcgtccacttagttgcgcacaggaggtgctccgcaggacaccgctctatgacttccacctggcccacggcgggaaaatggtggcgtttgcgggttggagtctgccagtgcagtaccgggacagtcacactgactcgcacctgcacacacgccagcactgctcgctctttgacgtgtctcatatgctgcagaccaagatacttggtagtgaccgggtgaagctgatggagagtctagtggttggagacattgcagagctaagaccaaaccaggggacactgtcgctgtttaccaacgaggctggaggcatcttagatgacttgattgtaaccaatacttctgagggccacctgtatgtggtgtccaacgctggctgctgggagaaagatttggccctcatgcaggacaaggtcagggagcttcagaaccagggcagagatgtgggcctggaggtgttggataatgccctgctagctctgcaaggccccactgcagcccaggtactacaggccggcgtggcagatgacctgaggaaactgcccttcatgaccagtgctgtgatggaggtgtttggcgtgtctggctgccgcgtgacccgctgtggctacacaggagaggatggtgtggagatctcggtgccggtagcgggggcagttcacctggcaacagctattctgaaaaacccagaggtgaagctggcagggctggcagccagggacagcctgcgcctggaggcaggcctctgcctgtatgggaatgacattgatgaacacactacacctgtggagggcagcctcagttggacactggggaagcgccgccgagctgctatggacttccctggagccaaggtcattgttccccagctgaagggcagggtgcagcggaggcgtgtggggttgatgtgtgagggggcccccatgcgggcacacagtcccatcctgaacatggagggtaccaagattggtactgtgactagtggctgcccctccccctctctgaagaagaatgtggcgatgggttatgtgccctgcgagtacagtcgtccagggacaatgctgctggtagaggtgcggcggaagcagcagatggctgtagtcagcaagatgccctttgtgcccacaaactactataccctcaagtgaagctggctcagggtggggctgtcccttccaggagttttgcccctacaaggggttagtcaagaagctgaggcagaactcactgggggtgggcagttaaggtggaggctgattctaattgtctggttgaggggccacaccacctattccccccacctaactcatgccattccagcttccttcaggaccctgcttctgagtgacggaccagctcacacaatgtcttgtttcagtccatgatcccactgacctactcttgcctgctggagggtaatgagaagctttggttctgccatctctcccactctgccaggtgctggctgtggagcaaaggctcacctttgtggagaggataaaacctgcccaacctacctcaccatggtttttcacattgcaaagggtaataacatgggcagtgcggacttaggctaccccctccagtttgctttccgtaaatgcaaattgtccttactgcaagtcaggaatgattgctgactcacagtagggctgctatgcctgtgtgtaaacttggggatggctgagggaacatagactcactcttccacattcccaagttggtctagtgtgctgcccagtagcaaaccatggcagactcaccacctattctgagttccagggctgctgtagggcagggtgggcttcctcccagacttgccttaccctgggctgatctttgcccctggtatgcattaatggactccactgaatcctgaaaaaaaaattaaacttccttcttacttgccaaaaaaaaaaaaaa

SEQ ID NO: 77 - DNA, 6523 bp, Homo sapiens
gtaggaattgagtgaagaaaaagtttgcaagtctggacagaagggaaaagttctcctgagagaccggctttggggaggggaggggggaaggaagagtagctccttcttcttcttcttttttttttcttccactcttaaaaagcttctttctcttcacccaagcctcactgtccctctccggctctagctctctccatataaaccctcaagattatgtcaattggttagagccagccgggaatttcgtgcgggtgctgaaggagctgcgggagccggagaagaatgaaactgcgtggagtcagcctggctgccggcttgttcttactggccctgagtctttgggggcagcctgcagaggctgcggcttgctatgggtgttctccaggatcaaagtgtgactgcagtggcataaaaggggaaaagggagagagagggtttccaggtttggaaggacacccaggattgcctggatttccaggtccagaagggcctccggggcctcggggacaaaagggtgatgatggaattccagggccaccaggaccaaaaggaatcagaggtcctcctggacttcctggatttccagggacaccaggtcttcctggaatgccaggccacgatggggccccaggacctcaaggtattcccggatgcaatggaaccaagggagaacgtggatttccaggcagtcccggttttcctggtttacagggtcctccaggaccccctgggatcccaggtatgaagggtgaaccaggtagtataattatgtcatcactgccaggaccaaagggtaatccaggatatccaggtcctcctggaatacaaggcctacctggtcccactggtataccagggccaattggtcccccaggaccaccaggtttgatgggccctcctggtccaccaggacttccaggacctaaggggaatatgggcttaaatttccagggacccaaaggtgaaaaaggtgagcaaggtcttcagggcccacctgggccacctgggcagatcagtgaacagaaaagaccaattgatgtagagtttcagaaaggagatcagggacttcctggtgaccgagggcctcctggacctccagggatacgtggtcctccaggtcccccaggtggtgagaaaggtgagaagggtgagcaaggagagccaggcaaaagaggtaaaccaggcaaagatggagaaaatggccaaccaggaattcctggtttgcctggtgatcctggttaccctggtgaacccggaagggatggtgaaaagggccaaaaaggtgacactggcccacctggacctcctggacttgtaattcctagacctgggactggtataactataggagaaaaaggaaacattgggttgcctgggttgcctggagaaaaaggagagcgaggatttcctggaatacagggtccacctggccttcctggacctccaggggctgcagttatgggtcctcctggccctcctggatttcctggagaaaggggtcagaaaggtgatgaaggaccacctggaatttccattcctggacctcctggacttgacggacagcctggggctcctgggcttccagggcctcctggccctgctggccctcacattcctcctagtgatgagatatgtgaaccaggccctccaggccccccaggatctccaggtgataaaggactccaaggagaacaaggagtgaaaggtgacaaaggtgacacttgcttcaactgcattggaactggtatttcagggcctccaggtcaacctggtttgccaggtctcccaggtcctccaggatctcttggtttccctggacagaaaggggaaaaaggacaagctggtgcaactggtcccaaaggattaccaggcattccaggagctccaggtgctccaggctttcctggatctaaaggtgaacctggtgatatcctcacttttccaggaatgaagggtgacaaaggagagttgggttcccctggagctccagggcttcctggtttacctggcactcctggacaggatggattgccagggcttcctggcccgaaaggagagcctggtggaattacttttaagggtgaaagaggtccccctgggaacccaggtttaccaggcctcccagggaatatagggcctatgggtccccctggtttcggccctccaggcccagtaggtgaaaaaggcatacaaggtgtggcaggaaatccaggccagccaggaataccaggtcctaaaggggatccaggtcagactataacccagccggggaagcctggcttgcctggtaacccaggcagagatggtgatgtaggtcttccaggtgaccctggacttccagggcaaccaggcttgccagggatacctggtagcaaaggagaaccaggtatccctggaattgggcttcctggaccacctggtcccaaaggctttcctggaattccaggacctccaggagcacctgggacacctggaagaattggtctagaaggccctcctgggccacccggctttccaggaccaaagggtgaaccaggatttgcattacctgggccacctgggccaccaggacttccaggtttcaaaggagcacttggtccaaaaggtgatcgtggtttcccaggacctccgggtcctccaggacgcactggcttagatgggctccctggaccaaaaggtgatgttggaccaaatggacaacctggaccaatgggacctcctgggctgccaggaataggtgttcagggaccaccaggaccaccagggattcctgggccaataggtcaacctggtttacatggaataccaggagagaagggggatccaggacctcctggacttgatgttccaggacccccaggtgaaagaggcagtccagggatccccggagcacctggtcctataggacctccaggatcaccagggcttccaggaaaagcaggtgcctctggatttccaggtaccaaaggtgaaatgggtatgatgggacctccaggcccaccaggacctttgggaattcctggcaggagtggtgtacctggtcttaaaggtgatgatggcttgcagggtcagccaggacttcctggccctacaggagaaaaaggtagtaaaggagagcctggccttccaggccctcctggaccaatggatccaaatcttctgggctcaaaaggagagaagggggaacctggcttaccaggtatacctggagtttcagggccaaaaggttatcagggtttgcctggagacccagggcaacctggactgagtggacaacctggattaccaggaccaccaggtcccaaaggtaaccctggtctccctggacagccaggtcttataggacctcctggacttaaaggaaccatcggtgatatgggttttccagggcctcagggtgtggaagggcctcctggaccttctggagttcctggacaacctggctccccaggattacctggacagaaaggcgacaaaggtgatcctggtatttcaagcattggtcttccaggtcttcctggtccaaagggtgagcctggtctgcctggatacccagggaaccctggtatcaaaggttctgtgggagatcctggtttgcccggattaccaggaacccctggagcaaaaggacaaccaggccttcctggattcccaggaaccccaggccctcctggaccaaaaggtattagtggccctcctgggaaccccggccttccaggagaacctggtcctgtaggtggtggaggtcatcctgggcaaccagggcctccaggcgaaaaaggcaaacccggtcaagatggtattcctggaccagctggacagaagggtgaaccaggtcaaccaggctttggaaacccaggaccccctggacttccaggactttctggccaaaagggtgatggaggattacctgggattccaggaaatcctggccttccaggtccaaagggcgaaccaggctttcacggtttccctggtgtgcagggtcccccaggccctcctggttctccgggtccagctctggaaggacctaaaggcaaccctgggccccaaggtcctcctgggagaccaggtctaccaggtccagaaggtcctccaggtctccctggaaatggaggtattaaaggagagaagggaaatccaggccaacctgggctacctggcttgcctggtttgaaaggagatcaaggaccaccaggactccagggtaatcctggccggccgggtctcaatggaatgaaaggagatcctggtctccctggtgttccaggattcccaggcatgaaaggacccagtggagtacctggatcagctggccctgagggggaaccgggacttattggtcctccaggtcctcctggattacctggtccttcaggacagagtatcataattaaaggagatgctggtcctccaggaatccctggccagcctgggctaaagggtctaccaggaccccaaggacctcaaggcttaccaggtccaactggccctccaggagatcctggacgcaatggactccctggctttgatggtgcaggagggcgcaaaggagacccaggtctgccaggacagccaggtacccgtggtttggatggtccccctggtccagatggattgcaaggtcccccaggtccccctggaacctcctctgttgcacatggatttcttattacacgccacagccagacaacggatgcaccacaatgcccacagggaacacttcaggtctatgaaggcttttctctcctgtatgtacaaggaaataaaagagcccacggtcaagacttggggacggctggcagctgccttcgtcgctttagtaccatgcctttcatgttctgcaacatcaataatgtttgcaactttgcttcaagaaatgactattcttactggctctctaccccagagcccatgccaatgagcatgcaacccctaaagggccagagcatccagccattcattagtcgatgtgcagtatgtgaagctccagctgtggtgatcgcagttcacagtcagacgatccagattccccattgtcctcagggatgggattctctgtggattggttattccttcatgatgcatacaagtgcaggggcagaaggctcaggtcaagccctagcctcccctggttcctgcttggaagagtttcgttcagctcccttcatcgaatgtcatgggaggggtacctgtaactactatgccaactcctacagcttttggctggcaactgtagatgtgtcagacatgttcagtaaacctcagtcagaaacgctgaaagcaggagacttgaggacacgaattagccgatgtcaagtgtgcatgaagaggacataacattttgaagaattccttttgtgttttaaaatgtgatatatatatatataaaattcctaggatgcagtgtctcattgtccccaactttactactgctgccgtcaatggtgctactatatatgatcaagataacatgctgactagtaaccatgaagattcagatgtacctcagcaatgcgccagagcaaagtctctattatttttctactaaagaaataaggaagtgaatttactttttgggtccagaatgactttctccaagaattataagatgaaaattatatattttgcccagttactaaaatggtacattaaaaattcaattaagagaagagtcacattgagtaaaataaaagactgcagtttgtgggaagaattatttttcacggtgctactaatcctgctgtatcccgggtttttaatataaaggtgttaagcttattttgctttgtaagtaaagaatgtgtatattgtgaacagccttttagctcaaaatgttgagtcatttacatatgacatagcatgaatcactctttacagaaaatgtaggaaaccctagaatacagacagcaatattttatattcatgtttatcaaagtgagaggacttatattcctacatcaagttactactgagagtaaatttattttgagttttatcccgtaagttctgttttgattttttttaaaaaacaaacccttttagtcactttaatcagaattttaaatgttcatgttacataccaaattataatatctaatggagcaatttgtcttttgctatattctccaagattatctcttaagaccatatgccccctgttttaatgtttcttacatcttgtttttactcatttctgactggacaaagttcttccaaacaattctgagaaacaaaaacacacacgcagaattaacaattcttttccctgtgcttcttatgtaagaatcctcctgtggcctctgcttgtacagaactgggaaacaacacttggttagtctcttttaagttacaaaaagccaattgatgtttcttattctttttaaattttaaatattttgttataaatactcacaggataccttatttccctagctatcatctcctgacttaatgttttttaaacccaccaatataaatttaattaaagatatatgttgtaaggataaaaaaaaaaaaaaaa

SEQ ID NO: 78 - DNA, 3418 bp, Homo sapiens
ggcagggttgggggctccctaggcgccaggcaggtgggctcaagggtgaggctgttttttttgttttgttttttgtttttgagacggagtctcgctctgtcgcccaggctggagtgcagtggcgtgatcttggctcactgcaacctccgcctctcgggttcaagcgattctcctgcctcagcttcctgagtagctgggattacaggtgcgcaccaccatgcccggctaacttttgtatttttagtagagatggggtttcaccatgttggtcaggctggtctcgaactcctgacctagtgatctgccctcctcagcctcccaacgtactgggattacaggcgtgagccaccgcgcccggcctgaggctggtattaagaagtgaagtgggacccaggtggaggtaaggaagagtctggtggggagttatctcagaagtgaggccagcacaggctgagtgcagccccagggtgagaaggtgcccaccgagaggactctgcagtgaggccctaggccacgtccgaggggtgcctccgatgggggaagcccctccctgggggtcaccggagccatgctgtcccgcaagggcatcatccccgaggaatacgtgctgacacgcctggcagaggaccctgccaagcccaggtaccgtgcccgccagcggagggcccgctttgtgtccaagaaaggcaactgcaacgtggcccacaagaacatccgggagcagggccgcttcctgcaggacgtgttcaccacgctggtggacctcaagtggccacacacattgctcatcttcaccatgtccttcctgtgcagctggctgctcttcgccatggcctggtggctcatcgccttcgcccacggtgacctggcccccagcgagggcactgctgagccctgtgtcaccagcatccactccttctcgtctgccttccttttctccattgaggtccaagtgactattggctttggggggcgcatggtgactgaggagtgcccactggccatcctgatcctcatcgtgcagaacatcgtggggctcatgatcaacgccatcatgcttggctgcatcttcatgaagactgcccaagcccaccgcagggctgagaccctcatcttcagcaagcatgcggtgatcgccctgcgccacggccgcctctgcttcatgctacgtgtgggtgacctccgcaagagcatgatcatcagcgccaccatccacatgcaggtggtacgcaagaccaccagccccgagggcgaggtggtgcccctccaccaggtggacatccccatggagaacggcgtgggtggcaacagcatcttcctggtggccccgctgatcatctaccatgtcattgatgccaacagcccactctacgacctggcacccagcgacctgcaccaccaccaggacctcgagatcatcgtcatcctggaaggcgtggtggaaaccacgggcatcaccacccaggcccgcacctcctacctggccgatgagatcctgtggggccagcgctttgtgcccattgtagctgaggaggacggacgttactctgtggactactccaagtttggcaacaccgtcaaagtgcccacaccactctgcacggcccgccagcttgatgaggaccacagcctactggaagctctgaccctcgcctcagcccgcgggcccctgcgcaagcgcagcgtgcccatggccaaggccaagcccaagttcagcatctctccagattccctgtcctgagccatggtctctcgggccccccacacgcgtgtgtacacacggaccatgtggtatgtagcccggccagggcctggtgtgaggctgggccagcctcagctcagcctccccctgctgctcatccagggtgttacaaggcacttgtcactatgctatttctggcctcagcaggaacctgtactgggttatttttgtccctgctcctcccaacccaattcaggactggctcacccctctcccccgcccaaggctgcagaggctgtgggaggtactgggccctagagctgtgcgtccagccagtcctgggtccccacgattgaccagccacactctgggccggtggctggggaagaacaatccccgagggctgctgctttgcgtctgtggctccaagaagtgcctgtggtcaggccccagctctacttggtccctgaaaaagcacctggctaagggctgggcctggccagcagggagggcagttgatgagagagggtgttcccgctggagggttggtgctgtggagcctacaccggcagggacagcctggggctgacagggctcccctccgagggccagtttcaggtctggaaggggaggaagcaggggaaggtgacctgaggaggctcggctttgtagagccccgctcaggcacagggaggaggagatgccagggctcctgccttttgccacatcggcctcgtgcagtgagggctctgtgggctggggctgctgcccctgcctacctcctgcctgtccccagaggctgaggagagggggtactgtgcccaccacacatgattaggcctcagacccaactctggtcctggctccacaacagtggctgccactcactttgtccagaaggtggcttgggggtggatatctttgggttgctggaaaaggtgtgggaaggttcaggatggtgggagggactgaggtccctgaggtgaagaggcccttggtcctgacgggtttgacccgtgcctggacccttggagcagtgttgtgtgaacttgcctagaactctgccttctccgttgtcaataaagcctccccctcatgacctaaactctgggcttttcttgctggggaggcagcaagcatgctggtgggaagggaggcagggactggcagctgccacccccttcaagaggcgccatagaccctagcggggagggcaggggagggacggaaggctggcacctcttccaccagttcagggggactttcccctctcctgtctcaggtggcccagccctgtcagcctgtctggccaactcagcctttgggcactcaccaggctttgcagccctgggctctgtctctactcccagggacctgctggaaggctggagtgcccagggagaggtatagaggtgtcataggcattagtgtagtaattggagcactaactctcgagccaactgcctgggttcgaatcctggctctagctgtatgacttttgtcaagtaacttagcctctctgtgtctcagttgcctcttctataacatggatgctaatagtacctacctcatagaattgttttggaagtaaatgaaaaatatgtaaaatgctgaagtgcctggtctacagtaagtgctcaataaatgttaactattgtgattgctgctgaatcagctacatgctgaggaaacggccaaacaagtgttaaaaaaaaa

SEQ ID NO: 79 - DNA, 2591 bp, Homo sapiens
gatgggattggggttttcccctcccatgtgctcaagactggcgctaaaagttttgagcttctcaaaagtctagagccaccgtccagggagcaggtagctgctgggctccggggacactttgcgttcgggctgggagcgtgctttccacgacggtgacacgcttccctggattggcagccagactgccttccgggtcactgccatggaggagccgcagtcagatcctagcgtcgagccccctctgagtcaggaaacattttcagacctatggaaactacttcctgaaaacaacgttctgtcccccttgccgtcccaagcaatggatgatttgatgctgtccccggacgatattgaacaatggttcactgaagacccaggtccagatgaagctcccagaatgccagaggctgctccccccgtggcccctgcaccagcagctcctacaccggcggcccctgcaccagccccctcctggcccctgtcatcttctgtcccttcccagaaaacctaccagggcagctacggtttccgtctgggcttcttgcattctgggacagccaagtctgtgacttgcacgtactcccctgccctcaacaagatgttttgccaactggccaagacctgccctgtgcagctgtgggttgattccacacccccgcccggcacccgcgtccgcgccatggccatctacaagcagtcacagcacatgacggaggttgtgaggcgctgcccccaccatgagcgctgctcagatagcgatggtctggcccctcctcagcatcttatccgagtggaaggaaatttgcgtgtggagtatttggatgacagaaacacttttcgacatagtgtggtggtgccctatgagccgcctgaggttggctctgactgtaccaccatccactacaactacatgtgtaacagttcctgcatgggcggcatgaaccggaggcccatcctcaccatcatcacactggaagactccagtggtaatctactgggacggaacagctttgaggtgcgtgtttgtgcctgtcctgggagagaccggcgcacagaggaagagaatctccgcaagaaaggggagcctcaccacgagctgcccccagggagcactaagcgagcactgcccaacaacaccagctcctctccccagccaaagaagaaaccactggatggagaatatttcacccttcagatccgtgggcgtgagcgcttcgagatgttccgagagctgaatgaggccttggaactcaaggatgcccaggctgggaaggagccaggggggagcagggctcactccagccacctgaagtccaaaaagggtcagtctacctcccgccataaaaaactcatgttcaagacagaagggcctgactcagactgacattctccacttcttgttccccactgacagcctcccacccccatctctccctcccctgccattttgggttttgggtctttgaacccttgcttgcaataggtgtgcgtcagaagcacccaggacttccatttgctttgtcccggggctccactgaacaagttggcctgcactggtgttttgttgtggggaggaggatggggagtaggacataccagcttagattttaaggtttttactgtgagggatgtttgggagatgtaagaaatgttcttgcagttaagggttagtttacaatcagccacattctaggtaggggcccacttcaccgtactaaccagggaagctgtccctcactgttgaattttctctaacttcaaggcccatatctgtgaaatgctggcatttgcacctacctcacagagtgcattgtgagggttaatgaaataatgtacatctggccttgaaaccaccttttattacatggggtctagaacttgacccccttgagggtgcttgttccctctccctgttggtcggtgggttggtagtttctacagttgggcagctggttaggtagagggagttgtcaagtctctgctggcccagccaaaccctgtctgacaacctcttggtgaaccttagtacctaaaaggaaatctcaccccatcccacaccctggaggatttcatctcttgtatatgatgatctggatccaccaagacttgttttatgctcagggtcaatttcttttttcttttttttttttttttttctttttctttgagactgggtctcgctttgttgcccaggctggagtggagtggcgtgatcttggcttactgcagcctttgcctccccggctcgagcagtcctgcctcagcctccggagtagctgggaccacaggttcatgccaccatggccagccaacttttgcatgttttgtagagatggggtctcacagtgttgcccaggctggtctcaaactcctgggctcaggcgatccacctgtctcagcctcccagagtgctgggattacaattgtgagccaccacgtccagctggaagggtcaacatcttttacattctgcaagcacatctgcattttcaccccacccttcccctccttctccctttttatatcccatttttatatcgatctcttattttacaataaaactttgctgccacctgtgtgtctgaggggtg

SEQ ID NO: 80 - DNA, 9433 bp, Homo sapiens
cttatttcttatgaatgtcggatagctgcaccagcttggtggggaaagggtttgatgaatagcacaaagacactggctgttccctggaggctgtccctttaaaggagaatcttagtttattctggggggaggggatgcacacattagagtaggaaagagggcttggaataaaatgaaaacactcccccttcatagtcattgtactgaaatgcaaagactgcttcctaagctggagatgctaaccttgggtagctccttctgttctcttcaaggggaattttgtcaggctatggattcatttacaactgttagtcatgtgggcatgtgtgaggaaacagatgccagttttaatgtatttagcccgaagttccaatttgataggagccactgtcagtctctgaggttccaccaaaatatggaacttgattttggacactttgacgaaagagataagacatccaggaacatgcgaggctcccggatgaatgggttgcctagccccactcacagcgcccactgtagcttctaccgaaccagaaccttgcaggcactgagtaatgagaagaaagccaagaaggtacgtttctaccgcaatggggaccgctacttcaaggggattgtgtacgctgtgtcctctgaccgttttcgcagctttgacgccttgctggctgacctgacgcgatctctgtctgacaacatcaacctgcctcagggagtgcgttacatttacaccattgatggatccaggaagatcggaagcatggatgaactggaggaaggggaaagctatgtctgttcctcagacaacttctttaaaaaggtggagtacaccaagaatgtcaatcccaactggtctgtcaacgtaaaaacatctgccaatatgaaagccccccagtccttggctagcagcaacagtgcacaggccagggagaacaaggactttgtgcgccccaagctggttaccatcatccgcagtggggtgaagcctcggaaggctgtgcgtgtgcttctgaacaagaagacagcccactcttttgagcaagtcctcactgatatcacagaagccatcaaactggagaccggggttgtcaaaaaactctacactctggatggaaaacaggtaacttgtctccatgatttctttggtgatgatgatgtgtttattgcctgtggtcctgaaaaatttcgctatgctcaggatgatttttctctggatgaaaatgaatgccgagtcatgaagggaaacccatcagccacagctggcccaaaggcatccccaacacctcagaagacttcagccaagagccctggtcctatgcgccgaagcaagtctccagctgactcagcaaacggaacctccagcagccagctctctacccccaagtctaagcagtctcccatctctacgcccaccagtcctggcagcctccggaagcacaaggacctgtacctgcctctgtccttggatgactcggactcgcttggtgattccatgtaaaggaggggagagtgctcagagtccagagtacaaatccaagcctatcattgtagtagggtacttctgctcaagtgtccaacagggctattggtgctttcaagtttttattttgttgttgttgttattttgaaaaacacattgtaatatgttgggtttattttcctgtgatttctcctctgggccactgatccacagttaccaattatgagagatagattgataaccatcctttggggcagcattccagggatgcaaaatgtgctagtccatgacctttcaatggaaagcttaggtgcctgcgttatatttgccctgtctaattttgcccatacagtcttccttctgtagagggctgtttacatatacagcacttaaaatgtttgtgtgggaaaaaaaaaactcattggcagatccaagaatgacaaacacaagtgccccttttctctggatctcaagaatggtggaggaccctggaaggacagcaaggcagctccccagcctcactcttcactcctgattgaggcccgggtttgttgtccagcaccaattctggctgtcaatggggagaaataaaccaacaacttataattgtgacaccagatgcttaggatcctggtgctgggttagctaagagaatagacagaattggaaaatactgcagacatttccgaagagtttataaagcacagtgaattcctggtcaatctctccactgaggcaatttggaatcaataagcaattgataatagtttggagtaagggacttcatatacctgattcctctagaaggctgtctaacataccacatgattacatgaactgtatggtatccatctatctctgttctattgaatgccttgttaacagccaacactgaaaacactgtgagaatttgttttcaggtctgacacctttcagtctctttttatagcaagaaatcaatatcctttttataaaaattcatgtctgtatttcaggagcaaactcttcaggctccttttttataaactggtgatttttcttttgtctaaaaaacacatgaagaaaatttaccaaaaaaaaaaaaaaaagcagaagaataatgtagtttagaaattatgctgtcactgccaaacagtaacctccaggagaaaacaagatgaatagcagaggccaattcaatagaatcagttttttgatagctttttaacagttatgcttgcattaataatttcaatgtggaccagacattctaattatattttaaatgaaatgttacagcatattttaagcaactctttttatctataatcctaatatttcatactgaagacacagaaatctttcacttgtctttaacattagaaaggatttctctttactaaggactgatcatttgaaatagttttcagtcttttgagatacaggtttataacactgcttttttttttctgtaatcatagcccataatggcaaagacaactaaatttaagtgaaggtcatgcatgccaattctgtgtttgcttttagcagatatgaagatttccttatttctttgtaattgtgcagatattttgaaaggcacagcattcgaagccaagctgctgtttggctactgaatggcttgcagttgttcctccactctaaatggaatgagcttgctgtgtgtgtgtgtggtggtggtgggagggggtggtgcatgtgtgtgtgtgtgtgtgcatctgcagctgcttcaaaattaggaaatactacaggacacccctgtaatggattggtggcaactgggtggcactgctgatgtgcactgtgtaggggggaacccagtggtggtggggtagctcagatgcccctagacaagcttcagatgtctgtagctaccagaaacattttcggttcaggaaaagtgagatgatggtagtactggtttctggtgaaattgaagaaccccaaatgatgaggatctctttttgccccctctcctttttttgtagacccattcaaaaccattaataagcccattttactaagcccctatttctttctagaagctcagggttttcttagtgcctcccagaacattttgtagttaattgggaaaaagtgatacttggattagggggtgtgggcataaagaatggtgggaggcctgattttaaacttcaggccagaacccccaatgactccacccatagtctcactttaggtctcatttagtccatcacctttattttaagttgaggaagtggaggctggtaaagagcaggaccagaggaagaatccagatttccttatgcttgggcctcacactagctctctgagtatttccttgattgcggtatatgtactactagaaaataccaaatggatatattttctttaggataacctttgaaccaacaatcttcaataacaatagtacatcttccatcttacttttaatcgagtataaggaaatgtttctttatggccattttggagggagcaggggatgaggcttggcatagtccaaaatttaagtctccaataattaattgcattttaaattggcccactttcaaggcaattttttttgtgtgtctgtaactgagctcctccacccctgtcattcacttccaattttacccaatccaattttagcactcaagttccattgtgttaatttctgcacggtcaacaaacatcaagtcagcaagcatttgccaccactccctatacttctccctccttcttacacacacacacacacacacacacacaatccatctcttgcttgttcctacctcctgatttttcttccctacagaaatagaaatagggacaaagaaggggaaaatgtatatattggggctgggctgaacaactaacttcataagtagtattaactaggggtaaattgagagaaaagctccttttctcttcactgttttggaaaggatagccattagcatgactgctttgtgtccttatggactttagtattagcctagattgaattatagcgttttctagctggaaggaaccttaagatcacatcatctactcctctactccaaatttctcattcttcaggccaggaaaccgagacacagaggtaaagtaatttccccaaggtcacacagctggctggggcaggattgggtttacaacccacatctcctggctcttattccagggccttttcccactaagtagtattgccttccattaggctcctgagagttatttctcagggtcatgttgcatcttggagccacatgctgctgccctgatctcagtgggaaatccacccagcaacctaatacagccccttttccctgcattcacctggttcccatccacatgggttgcagatgtccttgaagagagtgaggcattgagggccaataggagcaatggggtccctggccttgtccatctgattcaggagatcactgctccatcgtgaggagccctctgaatagccccccactgaatgcttgccttgcccaaatggaatggaggaagattgattttctccatcagttcaccttgtgtcatctcataatggttggtctttccaggctgagggaaatgtttcttgtttccagagtagaaaaagaaagagtggaacaatagctttgttcatcctaactttctgagatggcttttcaacattttaaaaaaactagtgtggctaccattcactggcaatgatttcttttagaatatgggagtaagatgagctagagaaaataacctggtctcactgtggttgccctcatccacaatgtccccaaagccatcctgctctgatgaggacaatttccaggtataagcaaggggctttgtgacaaaaatgtaccctggctgatgttaaacattggctcctgtgtttgcaccaaaatagcaagctgtgtgctctatacactcttcccatcgtcttgtgtacactgctcctgtggccttccacagcagaaaccagggcaaaagggtccaaacacatggttttccttgctgcaaggctcttcctgggaactaagggggtatttattagttcagttctaagagacctccttctgggcttaccccactcctcaggtacttctctctccttcctccttctcctccacagtcacaagtaaccaaggaacctgaaagtggatgtgtagctatttgaagaaggcaaggaaccctgagattcttctttgaatcctctagtccaagtcttagaccagtgattggtgcttaccttgaacaaaattttgtctgtgttcctaatcccttcaatactctgggtacaatgctcccaatcaccctgcacatttgattctaaatggcttttattttttaaaaatccatatccctaggacaagagaacaggatgcctatatccccaaaatgagctccaggacactgatgggaatgatcccaaagatcaccccacctcagaaacgtctgtgccaagagacttccccagatagaaacactgggacagtggtttgaacgacttcttttatggttgtccagtttgctatggaaataaaaggcattgattttttaaaaagatgattggaacctgtctttggccacatagggccacttggatccatttccaggccttactcatatattgccttcactgaagggctttggctttaagtcccagactggtctcccaagtgaaccataagtgttttggagctcatctggggtgaggcatgagaatgttgccccatctatcccttcaggaaaaggtgccttccctccctttctcctaaagcctggtccccagaaattgtttttgtctccaaaagtctagtatggtctttatacacccagactcttagtgttgcgtcctgccttgtttccttgttaaggatctatgcagacctcccgctttggcttagctagcgtgacattggctatcatttgacaagactaacttttttttttttttttttttgactgagtctccctctgtcacctaggctggagtgcagtggcacaatcttggctcgctgcaaccttcacccttcacctcccaggtcgaagcgattctcctgcctcagtctcccgagtagctgggattacaggcgtgcgccaccaaatctggctatttttttattattattatttttagtagagatggggtttcaccatgttggccagactggtcttgaactcttggcctcaaattatctgcccacctcggcctcccaaagtgctgggattacaggcatgagccaccatgcccagctgacaagactaattttttatcccttggtttattggcttcaacatcttctggaatcagaggtgattttttcttaccttggatgcctgagactaggggagtatagaattccaattggtaattaaggcatctttctgctcctgatcagaagggcaggttagttgggagaggtcagatggcacaacagaagtcaccttgtaagtaaggcaaagacttgaaggcattagcgtttctcattactaggtcaataacctgagggaatcaatggctttttgccgctctacctcttgtgtatctctttgacttttctttctctgtctagtttcctctgttctcagtttatattctatgttatcagtctctctttccacagtacaaacatccatcctttctcctgtgcaattctgtctctccctcttattatctttatttgtactttttccttcctccctgtctaggcattgggcatgtgcctcttcttagcctgtgattttgccttgggactgatgataaattatttccagattcaatcagccctggtcctaccccagtccaatcagaagtatgttggtgggaatcaacctgatcctggccctttcttcttctccattttcattcgtaatccccctcagcagatctttacaagcagtttccttatagctcatgtatctttaggtctttgccttccaagcactgtacagaatactttgtggttcctttttagtctgacattttgtggagcagtgaagcgtgctcagagacataatcagctgaagagaaaaaatccacccatggatttatatcagctaaatactaataattgattttgtttgatgtgcccataatttttaaagctgcaatataatataatgagggaccacaggtaatttctcctgtcatttgttttggctggatgggggtgggggagtaattgcttaaagttttaccattacacattaaactctctataataatcttgtttggggcttgctaactgttgagctgttttaactaaactggtaggcaatcggagttgatttaaatgaaaagataatttaacaaatctatactataaaaagagacatttgcttaattgacatgtattttttccttctgagtcacctaaacatttactcttgacaccaactgttcatgatactgaatagacagtccatataagagaaattagtggacctaaagaagccagattgtaggtgttaatttattaaacagagtgcaaagcccttggaaatgtcactgcttggcaataccatatggaatgccaaaatttacaatgacttttctttataagttatccaaaagggatttgaacaagtaagaggttatgccaaaatgtctccaatgtatggtcctgtaatatattgcagcttgaagccaatgatcccttatgacttgtatacaactaatgcatgttttattgaattttgcatttcccacgtgtggtaagttctttaaaatgtttttgatcacctttttgtgccattaaacttgtacagaaaatgtttttatggccattttcaaagggagaaagtttaaaatggaaacagcccaccctttctgccctatagctgtagttagaattgagtacctgtagcaaaacagctgtaattggtggttgtagtgttagaggtgttagcttgctagtgactagctttggagagtaaatgcatggtattgtacatcacatttcttaactcgttttaacctctgaaaagaatatattcttctttgtagtccttcttcccacccccttgccctctccctctccctgctcccagttgtcttacagttgtaaatatctgatttgaggcccaataactcttgccaagtaaagtcagcaaacaacaaacaaaccaaaatgtggggaaaaggcatttctcaaccatctctcagcagttattgatcatttcttaaggaacagcattgtgatcaaagactcaactttacgtaaaaatcagtggtaaattggggttgtatttggccatttgattacatttcaggattgaatagttttcagaatcacatgtaatccaaagacagtaggtagtgatgtcccttatccctgcagctgttttaagatagagacctcagaagactctgcttgaccgatgaccaataattatttgaaaaaaaaagaaaaaatgagagaaataaaacagatatttaagaactttagccacctatttagaatagttatagccagaaaaaaaaacaagggcatgagttcaaatgcattactatcagtgtcctaggcaatacctaacctactctgaaattgtgattcaaaagcagtatttcaagaggcattctccttttttggtttgctgaccccacttggactggtaggtttggtgaggcccccataaaccagctggagcagacccttttcatctcctgtgcctgtaacacccctcttcccccaccccctccgcaattcaatgagggctttcttgggtcagaggacttcaaggttgtctagagaagtttgccatgtgtgtaaggtgctgtgaactgtgagtgctgaagattcgcagcattcaataccaggcagccaaagagctgctcttgcaattattttggctctcaagctctgttcttcatcgcattctcatttctgtgtacatttgcaagatgtgtgtaatgtcattttccaaaaataaaatttgatttcaataaaaaaaaaaaaaaaaaaaaaaaaaaaa

SEQ ID NO: 81 - DNA, 5928 bp, Homo sapiens
ggcggtcccctgttctccccgctcaggtgcggcgctgtggcaggaagccaccccctcggtcggccggtgcgcggggctgttgcgccatccgctccggctttcgtaaccgcaccctgggacggcccagagacgctccagcgcgagttcctcaaatgttttcctgcgttgccaggaccgtccgccgctctgagtcatgtgcgagtgggaagtcgcactgacactgagccgggccagagggagaggagccgagcgcggcgcggggccgagggactcgcagtgtgtgtagagagccgggctcctgcggatgggggctgcccccggggcctgagcccgcctgcccgcccaccgccccgccccgcccctgccacccctgccgcccggttcccattagcctgtccgcctctgcgggaccatggagtggtagccgaggaggaagcatgctggccgtcggctgcgcgctgctggctgccctgctggccgcgccgggagcggcgctggccccaaggcgctgccctgcgcaggaggtggcgagaggcgtgctgaccagtctgccaggagacagcgtgactctgacctgcccgggggtagagccggaagacaatgccactgttcactgggtgctcaggaagccggctgcaggctcccaccccagcagatgggctggcatgggaaggaggctgctgctgaggtcggtgcagctccacgactctggaaactattcatgctaccgggccggccgcccagctgggactgtgcacttgctggtggatgttccccccgaggagccccagctctcctgcttccggaagagccccctcagcaatgttgtttgtgagtggggtcctcggagcaccccatccctgacgacaaaggctgtgctcttggtgaggaagtttcagaacagtccggccgaagacttccaggagccgtgccagtattcccaggagtcccagaagttctcctgccagttagcagtcccggagggagacagctctttctacatagtgtccatgtgcgtcgccagtagtgtcgggagcaagttcagcaaaactcaaacctttcagggttgtggaatcttgcagcctgatccgcctgccaacatcacagtcactgccgtggccagaaacccccgctggctcagtgtcacctggcaagacccccactcctggaactcatctttctacagactacggtttgagctcagatatcgggctgaacggtcaaagacattcacaacatggatggtcaaggacctccagcatcactgtgtcatccacgacgcctggagcggcctgaggcacgtggtgcagcttcgtgcccaggaggagttcgggcaaggcgagtggagcgagtggagcccggaggccatgggcacgccttggacagaatccaggagtcctccagctgagaacgaggtgtccacccccatgcaggcacttactactaataaagacgatgataatattctcttcagagattctgcaaatgcgacaagcctcccagtgcaagattcttcttcagtaccactgcccacattcctggttgctggagggagcctggccttcggaacgctcctctgcattgccattgttctgaggttcaagaagacgtggaagctgcgggctctgaaggaaggcaagacaagcatgcatccgccgtactctttggggcagctggtcccggagaggcctcgacccaccccagtgcttgttcctctcatctccccaccggtgtcccccagcagcctggggtctgacaatacctcgagccacaaccgaccagatgccagggacccacggagcccttatgacatcagcaatacagactacttcttccccagatagctggctgggtggcaccagcagcctggaccctgtggatgataaaacacaaacgggctcagcaaaagatgcttctcactgccatgccagcttatctcaggggtgtgcggcctttggcttcacggaagagccttgcggaaggttctacgccaggggaaaatcagcctgctccagctgttcagctggttgaggtttcaaacctccctttccaaatgcccagcttaaaggggctagagtgaacttgggccactgtgaagagaaccatatcaagactctttggacactcacacggacactcaaaagctgggcaggttggtgggggcctcggtgtggagaagcggctggcagcccacccctcaacacctctgcacaagctgcaccctcaggcaggtgggatggatttccagccaaagcctcctccagccgccatgctcctggcccactgcatcgtttcatcttccaactcaaactcttaaaacccaagtgccttagcaaattctgtttttctaggcctggggacggcttttacttaaaccgccaaggctgggggaagaagctctctcctccctttcttccctacagttgaaaaacagctgagggtgagtgggtgaataatacagtatctcagggcctggtcgttttcaacagaattataattagttcctcattagcattttgctaaatgtgaatgatgatcctaggcatttgctgaatacagaggcaactgcattggctttgggttgcaggacctcaggtgagaagcagaggaaggagaggagaggggcacagggtctctaccatcccctgtagagtgggagctgagtgggggatcacagcctctgaaaaccaatgttctctcttctccacctcccacaaaggagagctagcagcagggagggcttctgccatttctgagatcaaaacggttttactgcagctttgtttgttgtcagctgaacctgggtaactagggaagataatattaaggaagacaatgtgaaaagaaaaatgagcctggcaagaatgtgtttaaacttggtttttaaaaaactgctgactgttttctcttgagagggtggaatatccaatattcgctgtgtcagcatagaagtaacttacttaggtgtgggggaagcaccataactttgtttagcccaaaaccaagtcaagtgaaaaaggaggaagagaaaaaatattttcctgccaggcatggtggcccacgcacttcgggaggtcgaggcaggaggatcacttgagtccagaagtttgagatcagcctgggcaatgtgataaaaccccatctctacaaaaagcataaaaattagccaagtgtggtagagtgtgcctgaagtcccagatacttggggggctgaggtgggaggatctcttgagcctgggaggtcaaggctgcagtgagccgagattgcaccactgcactccagcctgggtgacagagcaagtgagaccctgtctcaaaaaaagaaaaagaaaaagaaaaaatattttccctattagagaagagattgtggtttcattctgtattttgtttttgtcttaaaaagtggaaaaatagcctgcctcttctctactctagggaaaaaccagcgtgtgactactcccccaggtggttatggagagggtgtccggtccctgtcccagtgccgagaaggaagcctcccacgactgcccggcagggtcctagaaattccccaccctgaaagccctgagctttctgctatcaaagaggttttaaaaaaatcccatttaaaaaaaatcccttacctcggtgccttcctctttttatttagttccttgagttgattcagctctgcaagaattgaagcaggactaaatgtctagttgtaacaccatgattaaccacttcagctgacttttctgtccgagctttgaaaattcagtggtgttagtggttacccagttagctctcaagttatcagggtattccagagtggggatatgatttaaatcagccgtgtaaccatggacccaatatttaccagaccacaaaacttttctaatactctaccctcttagaaaaaccaccaccatcaccagacaggtgcgaaaggatgaaagtgaccatgttttgtttacggttttccaggtttaagctgttactgtcttcagtaagccgtgattttcattgctgggcttgtctgtagattttagaccctattgctgcttgaggcaactcatcttaggttggcaaaaaggcaggatggccgggcgcggtggctcacgcctgtaatcctagcactttgggaggccaaggtgggaggattgcttgagctcaggagtttgagaccaacctgggtaacatagtgagacaccatctctattatgaacaataacagttaagaaaaaaaaaggcaggcaggcggttatggtggttccctcccatcccaccacataaagtttctgagacttgagaacagcaaaatgctgttaaagggaaatattaagaatgagaatctgcagtaagggtgattctgtgcccacagttcttcaattctttataccgttttacccacatgtggtgttaccaaagccgggcagaaccatgctagcggaagatgtgaaatccagatagctcattattgccaagagctaggcagctttgatctccaaattgttattgctttcatttttattgtaatggaattgctttgttttgtttttttgtttttgtattgaagagggttgttttccctttatttttcataagctaatgtaaatgaagaaaaaatgtcttctctgggctgtaggcctggctcagcgtacacaggtatacatcctaagctctctatgttctctaatctgtggtgactgaacatgtgtctcaatgcacggggcatttctacctgtgtttctgcagcacccccactgccttgagtccccagcagtgctgttatttgcctaacacctgtagccatctgccacgcagccagacgtgaaacgctgagacagagaccatttaggttaaatacgacagcttatcctgctgggtggggaaagtaaaaaatatgctggttcaaggcctaaagtaaaatgatcaataatgtttgtagcattaatgaaatattttcaagaaatgtgtccaggggtagcactggctatgttgacgaggcctttggtaactcagagagctcttggccctgatggggacttgcccttacgctttctttatcaggctctgagttcacacggagcctctggcacttccctgctgtcttgggagaaaggaaactggttgccgcggcaggttgtggaatctgttgctggaaccaggctggaagcccacctggtagtgaacagggcccagtggggcaggctgggcatgttgtggtctatgggtttgtttcctggagaatgttcaggaatgtcttcccagctgctttggtgctgagctctattatctcacagcacgtccagaaggctaacccaggtggggaggatgctgacaccagctccaggtggagttggtggtcttaatttggagatgcaggggcaacctgtgaccctttgaggcaagagccctgcacccagctgtcccgtgcagccgtgggcaggggctgcacacggaggggcaggcgggccagttcagggtccgtgccaggccctcctcagtgccctgtgaaggcctcctgtcctccgtgcggctgggcaccagcaccagggagtttctatggcaaccttagtgattattaaggaacactgtcagttttatgaacatatgctcaaatgaaattctactttaggaggaaaggattggaacagcatgtcacaaggctgttaattaacagagagaccttattggatggagatcacatctgttaaatagaatacctcaactctacgttgttttcttggagataaataatagtttcaagtttttgtttgtttgttttacctaattacctgaaagcaaataccaaaggctgatgtctgtatatggggcaaagggtcagtatatttttcagtgtttttttttctaccagctattttgcatttaaagtgaacattgtgtttggaataaatactcttaaaaaataaaaaaaaaaaaaaa

SEQ ID NO: 82 - DNA, 1629 bp, Homo sapiens
acacatcaggggcttgctcttgcaaaaccaaaccacaagacagacttgcaaaagaaggcatgcacagctcagcactgctctgttgcctggtcctcctgactggggtgagggccagcccaggccagggcacccagtctgagaacagctgcacccacttcccaggcaacctgcctaacatgcttcgagatctccgagatgccttcagcagagtgaagactttctttcaaatgaaggatcagctggacaacttgttgttaaaggagtccttgctggaggactttaagggttacctgggttgccaagccttgtctgagatgatccagttttacctggaggaggtgatgccccaagctgagaaccaagacccagacatcaaggcgcatgtgaactccctgggggagaacctgaagaccctcaggctgaggctacggcgctgtcatcgatttcttccctgtgaaaacaagagcaaggccgtggagcaggtgaagaatgcctttaataagctccaagagaaaggcatctacaaagccatgagtgagtttgacatcttcatcaactacatagaagcctacatgacaatgaagatacgaaactgagacatcagggtggcgactctatagactctaggacataaattagaggtctccaaaatcggatctggggctctgggatagctgacccagccccttgagaaaccttattgtacctctcttatagaatatttattacctctgatacctcaacccccatttctatttatttactgagcttctctgtgaacgatttagaaagaagcccaatattataatttttttcaatatttattattttcacctgtttttaagctgtttccatagggtgacacactatggtatttgagtgttttaagataaattataagttacataagggaggaaaaaaaatgttctttggggagccaacagaagcttccattccaagcctgaccacgctttctagctgttgagctgttttccctgacctccctctaatttatcttgtctctgggcttggggcttcctaactgctacaaatactcttaggaagagaaaccagggagcccctttgatgattaattcaccttccagtgtctcggagggattcccctaacctcattccccaaccacttcattcttgaaagctgtggccagcttgttatttataacaacctaaatttggttctaggccgggcgcggtggctcacgcctgtaatcccagcactttgggaggctgaggcgggtggatcacttgaggtcaggagttcctaaccagcctggtcaacatggtgaaaccccgtctctactaaaaatacaaaaattagccgggcatggtggcgcgcacctgtaatcccagctacttgggaggctgaggcaagagaattgcttgaacccaggagatggaagttgcagtgagctgatatcatgcccctgtactccagcctgggtgacagagcaagactctgtctcaaaaaataaaaataaaaataaatttggttctaatagaactcagttttaactagaatttattcaattcctctgggaatgttacattgtttgtctgtcttcatagcagattttaattttgaataaataaatgtatcttattcacatc

SEQ ID NO: 83 - DNA, 1201 bp, Homo sapiens
aatattagagtctcaacccccaataaatataggactggagatgtctgaggctcattctgccctcgagcccaccgggaacgaaagagaagctctatctcccctccaggagcccagctatgaactccttctccacaagcgccttcggtccagttgccttctccctggggctgctcctggtgttgcctgctgccttccctgccccagtacccccaggagaagattccaaagatgtagccgccccacacagacagccactcacctcttcagaacgaattgacaaacaaattcggtacatcctcgacggcatctcagccctgagaaaggagacatgtaacaagagtaacatgtgtgaaagcagcaaagaggcactggcagaaaacaacctgaaccttccaaagatggctgaaaaagatggatgcttccaatctggattcaatgaggagacttgcctggtgaaaatcatcactggtcttttggagtttgaggtatacctagagtacctccagaacagatttgagagtagtgaggaacaagccagagctgtgcagatgagtacaaaagtcctgatccagttcctgcagaaaaaggcaaagaatctagatgcaataaccacccctgacccaaccacaaatgccagcctgctgacgaagctgcaggcacagaaccagtggctgcaggacatgacaactcatctcattctgcgcagctttaaggagttcctgcagtccagcctgagggctcttcggcaaatgtagcatgggcacctcagattgttgttgttaatgggcattccttcttctggtcagaaacctgtccactgggcacagaacttatgttgttctctatggagaactaaaagtatgagcgttaggacactattttaattatttttaatttattaatatttaaatatgtgaagctgagttaatttatgtaagtcatatttatatttttaagaagtaccacttgaaacattttatgtattagttttgaaataataatggaaagtggctatgcagtttgaatatcctttgtttcagagccagatcatttcttggaaagtgtaggcttacctcaaataaatggctaacttatacatatttttaaagaaatatttatattgtatttatataatgtataaatggtttttataccaataaatggcattttaaaaaattcagcaaaaaaaaaaaaaaaaaaa

SEQ ID NO: 84 - DNA, 7321 bp, Homo sapiens
ttttgtagataaatgtgaggattttctctaaatccctcttctgtttgctaaatctcactgtcactgctaaattcagagcagatagagcctgcgcaatggaataaagtcctcaaaattgaaatgtgacattgctctcaacatctcccatctctctggatttctttttgcttcattattcctgctaaccaattcattttcagactttgtacttcagaagcaatgggaaaaatcagcagtcttccaacccaattatttaagtgctgcttttgtgatttcttgaaggtgaagatgcacaccatgtcctcctcgcatctcttctacctggcgctgtgcctgctcaccttcaccagctctgccacggctggaccggagacgctctgcggggctgagctggtggatgctcttcagttcgtgtgtggagacaggggcttttatttcaacaagcccacagggtatggctccagcagtcggagggcgcctcagacaggcatcgtggatgagtgctgcttccggagctgtgatctaaggaggctggagatgtattgcgcacccctcaagcctgccaagtcagctcgctctgtccgtgcccagcgccacaccgacatgcccaagacccagaaggaagtacatttgaagaacgcaagtagagggagtgcaggaaacaagaactacaggatgtaggaagaccctcctgaggagtgaagagtgacatgccaccgcaggatcctttgctctgcacgagttacctgttaaactttggaacacctaccaaaaaataagtttgataacatttaaaagatgggcgtttcccccaatgaaatacacaagtaaacattccaacattgtctttaggagtgatttgcaccttgcaaaaatggtcctggagttggtagattgctgttgatcttttatcaataatgttctatagaaaagaaaaaaaaaatatatatatatatatatcttagtccctgcctctcaagagccacaaatgcatgggtgttgtatagatccagttgcactaaattcctctctgaatcttggctgctggagccattcattcagcaaccttgtctaagtggtttatgaattgtttccttatttgcacttctttctacacaactcgggctgtttgttttacagtgtctgataatcttgttagtctatacccaccacctcccttcataacctttatatttgccgaatttggcctcctcaaaagcagcagcaagtcgtcaagaagcacaccaattctaacccacaagattccatctgtggcatttgtaccaaatataagttggatgcattttattttagacacaaagctttatttttccacatcatgcttacaaaaaagaataatgcaaatagttgcaactttgaggccaatcatttttaggcatatgttttaaacatagaaagtttcttcaactcaaaagagttccttcaaatgatgagttaatgtgcaacctaattagtaactttcctctttttattttttccatatagagcactatgtaaatttagcatatcaattatacaggatatatcaaacagtatgtaaaactctgttttttagtataatggtgctattttgtagtttgttatatgaaagagtctggccaaaacggtaatacgtgaaagcaaaacaataggggaagcctggagccaaagatgacacaaggggaagggtactgaaaacaccatccatttgggaaagaaggcaaagtccccccagttatgccttccaagaggaacttcagacacaaaagtccactgatgcaaattggactggcgagtccagagaggaaactgtggaatggaaaaagcagaaggctaggaattttagcagtcctggtttctttttctcatggaagaaatgaacatctgccagctgtgtcatggactcaccactgtgtgaccttgggcaagtcacttcacctctctgtgcctcagtttcctcatctgcaaaatgggggcaatatgtcatctacctacctcaaaggggtggtataaggtttaaaaagataaagattcagattttttttaccctgggttgctgtaagggtgcaacatcagggcgcttgagttgctgagatgcaaggaattctataaataacccattcatagcatagctagagattggtgaattgaatgctcctgacatctcagttcttgtcagtgaagctatccaaataactggccaactagttgttaaaagctaacagctcaatctcttaaaacacttttcaaaatatgtgggaagcatttgattttcaatttgattttgaattctgcatttggttttatgaatacaaagataagtgaaaagagagaaaggaaaagaaaaaggagaaaaacaaagagatttctaccagtgaaaggggaattaattactctttgttagcactcactgactcttctatgcagttactacatatctagtaaaacctcgtttaatactataaataatattctattcattttgaaaaacacaatgattccttcttttctaggcaatataaggaaagtgatccaaaatttgaaatattaaaataatatctaataaaaagtcacaaagttatcttctttaacaaactttactcttattcttagctgtatatacatttttttaaaagtttgttaaaatatgcttgactagagtttccagttgaaaggcaaaaacttccatcacaacaagaaatttcccatgcctgctcagaagggtagcccctagctctctgtgaatgtgttttatccattcaactgaaaattggtatcaagaaagtccactggttagtgtactagtccatcatagcctagaaaatgatccctatctgcagatcaagattttctcattagaacaatgaattatccagcattcagatctttctagtcaccttagaactttttggttaaaagtacccaggcttgattatttcatgcaaattctatattttacattcttggaaagtctatatgaaaaacaaaaataacatcttcagtttttctcccactgggtcacctcaaggatcagaggccaggaaaaaaaaaaaaaagactccctggatctctgaatatatgcaaaaagaaggccccatttagtggagccagcaatcctgttcagtcaacaagtattttaactctcagtccaacattatttgaattgagcacctcaagcatgcttagcaatgttctaatcactatggacagatgtaaaagaaactatacatcatttttgccctctgcctgttttccagacatacaggttctgtggaataagatactggactcctcttcccaagatggcacttctttttatttcttgtccccagtgtgtaccttttaaaattattccctctcaacaaaactttataggcagtcttctgcagacttaacgtgttttctgtcatagttagatgtgataattctaagagtgtctatgacttatttccttcacttaattctatccacagtcaaaaatcccccaaggaggaaagctgaaagatgcactgccatattatctttcttaactttttccaacacataatcctctccaactggattataaataaattgaaaataactcattataccaattcactattttattttttaatgaattaaaactagaaaacaaattgatgcaaaccctggaagtcagttgattactatatactacagcagaatgactcagatttcatagaaaggagcaaccaaaatgtcacaacccaaaactttacaagctttgcttcagaattagattgctttataattcttgaatgaggcaatttcaagatatttgtaaaagaacagtaaacattggtaagaatgagctttcaactcataggcttatttccaatttaattgaccatactggatacttaggtcaaatttctgttctctcttccccaaataatattaaagtattatttgaactttttaagatgaggcagttcccctgaaaaagttaatgcagctctccatcagaatccactcttctagggatatgaaaatctcttaacacccaccctacatacacagacacacacacacacacacacacacacacacacacacacattcaccctaaggatccaatggaatactgaaaagaaatcacttccttgaaaattttattaaaaaacaaacaaacaaacaaaaagcctgtccacccttgagaatccttcctctccttggaacgtcaatgtttgtgtagatgaaaccatctcatgctctgtggctccagggtttctgttactattttatgcacttgggagaaggcttagaataaaagatgtagcacattttgctttcccatttattgtttggccagctatgccaatgtggtgctattgtttctttaagaaagtacttgactaaaaaaaaaagaaaaaaagaaaaaaaagaaagcatagacatatttttttaaagtataaaaacaacaattctatagatagatggcttaataaaatagcattaggtctatctagccaccaccacctttcaactttttatcactcacaagtagtgtactgttcaccaaattgtgaatttgggggtgcaggggcaggagttggaaattttttaaagttagaaggctccattgttttgttggctctcaaacttagcaaaattagcaatatattatccaatcttctgaacttgatcaagagcatggagaataaacgcgggaaaaaagatcttataggcaaatagaagaatttaaaagataagtaagttccttattgatttttgtgcactctgctctaaaacagatattcagcaagtggagaaaataagaacaaagagaaaaaatacatagatttacctgcaaaaaatagcttctgccaaatcccccttgggtattctttggcatttactggtttatagaagacattctcccttcacccagacatctcaaagagcagtagctctcatgaaaagcaatcactgatctcatttgggaaatgttggaaagtatttccttatgagatgggggttatctactgataaagaaagaatttatgagaaattgttgaaagagatggctaacaatctgtgaagattttttgtttcttgtttttgttttttttttttttttactttatacagtctttatgaatttcttaatgttcaaaatgacttggttcttttcttctttttttatatcagaatgaggaataataagttaaacccacatagactctttaaaactataggctagatagaaatgtatgtttgacttgttgaagctataatcagactatttaaaatgttttgctatttttaatcttaaaagattgtgctaatttattagagcagaacctgtttggctctcctcagaagaaagaatctttccattcaaatcacatggctttccaccaatattttcaaaagataaatctgatttatgcaatggcatcatttattttaaaacagaagaattgtgaaagtttatgcccctcccttgcaaagaccataaagtccagatctggtaggggggcaacaacaaaaggaaaatgttgttgattcttggttttggattttgttttgttttcaatgctagtgtttaatcctgtagtacatatttgcttattgctattttaatattttataagaccttcctgttaggtattagaaagtgatacatagatatcttttttgtgtaatttctatttaaaaaagagagaagactgtcagaagctttaagtgcatatggtacaggataaagatatcaatttaaataaccaattcctatctggaacaatgcttttgttttttaaagaaacctctcacagataagacagaggcccaggggatttttgaagctgtctttattctgcccccatcccaacccagcccttattattttagtatctgcctcagaattttatagagggctgaccaagctgaaactctagaattaaaggaacctcactgaaaacatatatttcacgtgttccctctttttttttttcctttttgtgagatggggtctcgcactgtcccccaggctggagtgcagtggcatgatctcggctcactgcaacctccacctcctgggtttaagcgattctcctgcctcagcctcctgagtagctgggattacaggcacccaccactatgcccggctaattttttggatttttaatagagacggggttttaccatgttggccaggttggtctcaaactcctgaccttgtgatttgcccgcctcagcctcccaaattgctgggattacaggcatgagccaccacaccctgcccatgtgttccctcttaatgtatgattacatggatcttaaacatgatccttctctcctcattcttcaactatctttgatggggtctttcaaggggaaaaaaatccaagcttttttaaagtaaaaaaaaaaaaagagaggacacaaaaccaaatgttactgctcaactgaaatatgagttaagatggagacagagtttctcctaataaccggagctgaattacctttcactttcaaaaacatgaccttccacaatccttagaatctgcctttttttatattactgaggcctaaaagtaaacattactcattttattttgcccaaaatgcactgatgtaaagtaggaaaaataaaaacagagctctaaaatccctttcaagccacccattgaccccactcaccaactcatagcaaagtcacttctgttaatcccttaatctgattttgtttggatatttatcttgtacccgctgctaaacacactgcaggagggactctgaaacctcaagctgtctacttacatcttttatctgtgtctgtgtatcatgaaaatgtctattcaaaatatcaaaacctttcaaatatcacgcagcttatattcagtttacataaaggccccaaataccatgtcagatctttttggtaaaagagttaatgaactatgagaattgggattacatcatgtattttgcctcatgtatttttatcacacttataggccaagtgtgataaataaacttacagacactgaattaatttcccctgctactttgaaaccagaaaataatgactggccattcgttacatctgtcttagttgaaaagcatattttttattaaattaattctgattgtatttgaaattattattcaattcacttatggcagaggaatatcaatcctaatgacttctaaaaatgtaactaattgaatcattatcttacatttactgtttaataagcatattttgaaaatgtatggctagagtgtcataataaaatggtatatctttctttagtaattacattaaaattagtcatgtttgattaattagttc

SEQ ID NO: 85 - DNA, 12189 bp, Homo sapiens
ataaaagatgtatgctttggagcccagagcggctcttttaatgagggttgcgacgtctccctccccacacccataaaccagtcgggttggacgtcactgctaattcgtttcagtgatgataggataaaggagggacattaagaaataaattccccctcacgaccctcgctgagctcacggctcagtccctacatatttatgccgcgtttccagccgctgggtgaggagctacttagcgccgcggctcctccgaggggcggccgggcagcgagcagcggccgagcggacgggctcatgatgcctcagatctgatccgcatctaacaggctggcaatgaagatacccagagaatagttcacatctatcatgcgtcacttctagacacagccatcagacgcatctcctcccctttctgcctgaccttagggacacgtcccaccgcctctcttgacgtctgcctggtcaaccatcacttccttagagaataaggagagaggcggatgcaggaaatcatgccaccgacgggccaccagccatgagtgggtgacgctgagctgacgtcaaagacagagagggctgaagccttgtcagcacctgtcaccccggctcctgctctccgtgtagcctgaagcctggatcctcctggtgaaatcatcttggcctgatagcattgtgaggtcttcagacaggacccctcggaagctagttaccatggaggatcacatgttcggtgttcagcaaatccagcccaatgtcatttctgttcgtctcttcaagcgcaaagttgggggcctgggatttctggtgaaggagcgggtcagtaagccgcccgtgatcatctctgacctgattcgtgggggcgccgcagagcagagtggcctcatccaggccggagacatcattcttgcggtcaacggccggcccttggtggacctgagctatgacagcgccctggaggtactcagaggcattgcctctgagacccacgtggtcctcattctgaggggccctgaaggtttcaccacgcacctggagaccacctttacaggtgatgggacccccaagaccatccgggtgacacagcccctgggtccccccaccaaagccgtggatctgtcccaccagccaccggccggcaaagaacagcccctggcagtggatggggcctcgggtcccgggaatgggcctcagcatgcctacgatgatgggcaggaggctggctcactcccccatgccaacggcctggcccccaggcccccaggccaggaccccgcgaagaaagcaaccagagtcagcctccaaggcagaggggagaacaatgaactgctcaaggagatagagcctgtgctgagccttctcaccagtgggagcagaggggtcaagggaggggcacctgccaaggcagagatgaaagatatgggaatccaggtggacagagatttggacggcaagtcacacaaacctctgcccctcggcgtggagaacgaccgagtcttcaatgacctatgggggaagggcaatgtgcctgtcgtcctcaacaacccatattcagagaaggagcagccccccacctcaggaaaacagtcccccacaaagaatggcagcccctccaagtgtccacgcttcctcaaggtcaagaactgggagactgaggtggttctcactgacaccctccaccttaagagcacattggaaacgggatgcactgagtacatctgcatgggctccatcatgcatccttctcagcatgcaaggaggcctgaagacgtccgcacaaaaggacagctcttccctctcgccaaagagtttattgatcaatactattcatcaattaaaagatttggctccaaagcccacatggaaaggctggaagaggtgaacaaagagatcgacaccactagcacttaccagctcaaggacacagagctcatctatggggccaagcacgcctggcggaatgcctcgcgctgtgtgggcaggatccagtggtccaagctgcaggtattcgatgcccgtgactgcaccacggcccacgggatgttcaactacatctgtaaccatgtcaagtatgccaccaacaaagggaacctcaggtctgccatcaccatattcccccagaggacagacggcaagcacgacttccgagtctggaactcccagctcatccgctacgctggctacaagcagcctgacggctccaccctgggggacccagccaatgtgcagttcacagagatatgcatacagcagggctggaaaccgcctagaggccgcttcgatgtcctgccgctcctgcttcaggccaacggcaatgaccctgagctcttccagattcctccagagctggtgttggaagttcccatcaggcaccccaagtttgagtggttcaaggacctggggctgaagtggtacggcctccccgccgtgtccaacatgctcctagagattggcggcctggagttcagcgcctgtcccttcagtggctggtacatgggcacagagattggtgtccgcgactactgtgacaactcccgctacaatatcctggaggaagtggccaagaagatgaacttagacatgaggaagacgtcctccctgtggaaggaccaggcgctggtggagatcaatatcgcggttctctatagcttccagagtgacaaagtgaccattgttgaccatcactccgccaccgagtccttcattaagcacatggagaatgagtaccgctgccgggggggctgccctgccgactgggtgtggatcgtgccccccatgtccggaagcatcacccctgtgttccaccaggagatgctcaactaccggctcaccccctccttcgaataccagcctgatccctggaacacgcatgtctggaaaggcaccaacgggacccccacaaagcggcgagccattggcttcaagaagctagcagaagctgtcaagttctcggccaagctgatggggcaggctatggccaagagggtgaaagcgaccatcctctatgccacagagacaggcaaatcgcaagcttatgccaagaccttgtgtgagatcttcaaacacgcctttgatgccaaggtgatgtccatggaagaatatgacattgtgcacctggaacatgaaactctggtccttgtggtcaccagcacctttggcaatggagatccccctgagaatggggagaaattcggctgtgctttgatggaaatgaggcaccccaactctgtgcaggaagaaaggaagagctacaaggtccgattcaacagcgtctcctcctactctgactcccaaaaatcatcaggcgatgggcccgacctcagagacaactttgagagtgctggacccctggccaatgtgaggttctcagtttttggcctcggctcacgagcataccctcacttttgcgccttcggacacgctgtggacaccctcctggaagaactgggaggggagaggatcctgaagatgagggaaggggatgagctctgtgggcaggaagaggctttcaggacctgggccaagaaggtcttcaaggcagcctgtgatgtcttctgtgtgggagatgatgtcaacattgaaaaggccaacaattccctcatcagcaatgatcgcagctggaagagaaacaagttccgcctcacctttgtggccgaagctccagaactcacacaaggtctatccaatgtccacaaaaagcgagtctcagctgcccggctccttagccgtcaaaacctccagagccctaaatccagtcggtcaactatcttcgtgcgtctccacaccaacgggagccaggagctgcagtaccagcctggggaccacctgggtgtcttccctggcaaccacgaggacctcgtgaatgccctgatcgagcggctggaggacgcgccgcctgtcaaccagatggtgaaagtggaactgctggaggagcggaacacggctttaggtgtcatcagtaactggacagacgagctccgcctcccgccctgcaccatcttccaggccttcaagtactacctggacatcaccacgccaccaacgcctctgcagctgcagcagtttgcctccctagctaccagcgagaaggagaagcagcgtctgctggtcctcagcaagggtttgcaggagtacgaggaatggaaatggggcaagaaccccaccatcgtggaggtgctggaggagttcccatctatccagatgccggccaccctgctcctgacccagctgtccctgctgcagccccgctactattccatcagctcctccccagacatgtaccctgatgaagtgcacctcactgtggccatcgtttcctaccgcactcgagatggagaaggaccaattcaccacggcgtatgctcctcctggctcaaccggatacaggctgacgaactggtcccctgtttcgtgagaggagcacccagcttccacctgccccggaacccccaagtcccctgcatcctcgttggaccaggcaccggcattgcccctttccgaagcttctggcaacagcggcaatttgatatccaacacaaaggaatgaacccctgccccatggtcctggtcttcgggtgccggcaatccaagatagatcatatctacagggaagagaccctgcaggccaagaacaagggggtcttcagagagctgtacacggcttactcccgggagccagacaaaccaaagaagtacgtgcaggacatcctgcaggagcagctggcggagtctgtgtaccgagccctgaaggagcaagggggccacatatacgtctgtggggacgtcaccatggctgctgatgtcctcaaagccatccagcgcatcatgacccagcaggggaagctctcggcagaggacgccggcgtattcatcagccggatgagggatgacaaccgataccatgaggatatttttggagtcaccctgcgaacgtacgaagtgaccaaccgccttagatctgagtccattgccttcattgaagagagcaaaaaagacaccgatgaggttttcagctcctaactggaccctcttgcccagccggctgcaagttttgtaagcgcggacagacactgctgaacctttcctctgggaccccctgtggccctcgctctgcctcctgtccttgtcgctgtgccctggtttccctcctcgggcttctcgcccctcagtggtttcctcggccctcctgggtttactccttgagttttcctgctgcgatgcaatgcttttctaatctgcagtggctcttacaaaactctgttcccactccctctcttgccgacaagggcaactcacgggtgcatgaaaccactggaacatggccgtcgctgtgggggtttttttctctggggttcccctggaaaggctgcaggaactaggcacaagctctctgagccagtccctcagccactgaagtccccctttctccttttttatgatgacattttggttgtgcgtgcctgtgtgtgtgtgtgtgtgtgtgtgtgtgtgtgtgatgggccaggtctctgtccgtcctcttccctgcacaagtgtgtcgatcttagattgccactgctttcattgaagaccctcaatgccaagaaacgtgtccctggcccatattaatccctcgtgtgtccataattagggtccacgcccatgtacctgaaacatttggaagccccataattgttctagttagaaagggttcagggcatggggagaggagtgggaaattgattaaaggggctgtctcccaatgaaagaggcattcccagaatttgctgcatttagattttgataccagtgagcagagccctcatgtgacatgaacccatccaatggattgtgcaaatcccctccccaaacccacccataccagctagaatcacttgactttgccacatccattgactgaccccctcctccagcaatagcatccaaggggcctggaagttatgttgttcaaagaagcctggtggcaataaggatcttcccactttgccactggatgactttggatgggtcacttgtcctcagtttttcctagtcataatgtcatacgaacctaaagaatatgaatggattaaatgttaaagctttggtgcctggaaacaatatcaagtaacaatatgattattatttttttattcccccaaagcgggcttgctgcttcacccttggggatgaaataatggaagctggttaaagtggatgaggttggaaagagttgccataatgaggtcccacgtggcttcttcgataggagccacaacttggggtgggaagaacttgtccctcaggcttgttgccctctgcagttgatctccaaagttttaaacctgttaaattaattttgacaaataagttaccctcaactcagatcaaaaatgggcagccaagtcttcggtaggaattggagccggtgtaattcctccctaagaggcaacctgttgaatttactctctcagagtaaatggtgggaagggatccctttgtatacttttttaaatactacaaattagtgtcaggcagttcccagaaagagacaagaaatcctagtggcctcccagactgcagggtccccaaggatggaaagggaatgttctgctggttctaccctgtttgttgtgtcttgctatacagaaaaaccacatttcttttatatactgtacgtgggcatatcttgttgttcagtttgggtgtctgctaaagaggaagtgcactggccctctttgaaagggctttacagtgggggcaccaagaccccaaagggcccaggccaggagactgttaaagtgaaaaggcaatctatgactcaccttgctctgccatccctggcagcccccaccggtgtcctgttcctgccacatggagcttgacttcatgccagctataatctcccctgccttcctttaatcccaatttcccctgctcactcttccacagatataaagaacaaacacttagcatcccacactcaccccttctaatcctgaagggaagcccattctaaactcctttcctgcaaacccatttccagctcctagtagctttcctcccaaaggctttctttccaatcctttatagctttggagacgcctccccaattccccagggaaggaaactgttgtgtccaatccccattaaagacaaattgatcagtgcttcccactccaagtcaagctttatgcaggaatgcttttccatcagggaataaatacttagaagcgcttacaaggtgccaggcacctcctttctgcatgtgcctgcctttctagtagcagacagatggaaacattgtctcattttgtcaaggagtccaaagaaatgattataaaaccaggattcatccttcttctccagaaagatttttttttaagtaaacacctttcaatccccaacacaagctgcttcacaactccaggctagaaggcaggagagcgatctgatgtgtttctttcatttgccagaattcctgataccaaaagcctctctctctgttgagtaacctctcaaggaccagagtggagtccagattgttaggctcagatcaagggtggggaaatactgccctctcgtggtggcttttcatccaggcctcgtagccaaccgtttaagtgcaaaatagaattaagcaatgggtaagcaaaatagggttgacaagatatttgggggttattcgggttatggcccatttatttccctcttccccctgaattgaccagtagcagctccagccccatttcacaaaagtgagtttggccaggaggaatgagacgtctcctgaaataggaacaccggaacatcatgctcacctgccatcactatgcatccagttcccacagcttgtgtcgtgaaagagcagagagatgatgttaaactccttgggaggagagagggcttcttttggtttccctggagtgagacagccaggtgtctttcttttgcggggggacacttcagacccatcaatatggaattttgggagccgacctgagtgcaaatcctaattctgcccctgttggtgcagatggctgtgggcggctcacttgaccttttagagtctgcatacccacctgtataacaaggtggattgaatgagacaatgcccacgaaatgcccagttacagtacctggttcaaaacttactgcattttaatttttcacttaacttataacatgtcttgcttctccagtgtgtggaaggcaccgggcagtttgcagagataagcaaaacacagttcctctcgtgcagaaggttagaatctatttttttttttgacagagtcttgctctgtcacccaggctggcgtacagtggtacgatctcagctcactgcatcctctgcctcccccagttcaagtgattcttctgcctcggcctcctgagtaactgggactacaggcgcctaccaccacgcccagctaagttttgtatttttagtagagtcagggtttcaccatgttggccaggctggtcttgaattcctgacctcaaatgatccacgcacctcagcctcccaaagtgctggattacaggcatgagccaccacgcccagccaaaggttataatctgatggagagagacacccgtcttggaactgacataaatttctggggtttgagaaatgggcgggatttcactggtagcttctggaaggtaagagttgtccaggaattgggaagagtgagaggaaaggcacggacagggagcatgtaagataaattgaggctggctttggaaggctgaggagggtgagaaaaggtgggctgggaccagaccgtggggagaggtgagtggcattacaagaaatttaggctttattcagaaggcaacagggagtccctaagaatgtttttcaaaaagggacattaaggcgattggagttatacttggaaaagaaagttctggccacagtacagagcatggcccgttgagctgttgggggggttattgctgcaaccaaggcttgagtgagggaagaggcggatgtagtgataaagagactccaggaactgaatcagcgtacctggcaccccatccattgtagagggtgagaataaaggagaaattaaagcatcttgcaggctgggcgcggtagctcatgtctgtaatcccagcactttgggaggccgaggtgggtgtatcagttgaggtcaggagttggagaccagtcagccagttagtagaaaccctgactctactaagaaaatacaaaaattagctgggcatggtggcatgcgcctgtagtctcagctacctgggaggctgaggaaggaggatcgcttgagcccaggaggtggaggctgcagtgagccaagattgtaccactgcactccagcctgggtgacagagcaagactcttatctcaaaaaaaataaaataaaataaaataaaataaaacatcttgcccctagctgagagagaggtctctgaagagcaggctcagggaaaagatgagttttcagagctgatgtgatagtcagcttctctggagtcaacagggtgaatccttcccaagtccagccatgcccagatgcccggagggaaaactgacccccagccagtagacattggctaagaacacagaatcttctgaccaaacacgctttcagcagctgcctgctctggactttgaaagaggtcaggtcttgccctaagctcaaaacaagtgagaggtgtcctgacctagctcatagggcaaatggtcctaataggatgggcaatccagatgcctgagccccttcactccgacagcaccagcgcctaatgcagccttttcattcttgccattaggaaatctgtggacttctagcctgtgttttaaaccagccatgtttccttgtatatttccctacccgctgccccacatacccagcatgccgctgtggccaccatgtcctcaaagccttctgtctgtatcaggaatgtagtctgagactgccaggaagcaacaaggagagagaaacactaactagtcttcctttataacccattcatactctctggctgtccccaaccttcatagtctcctgcatccaaatgtcctctttggctcaaaaagtaggccaggcatggtggttcatgcctgtaatagcactttgggagactgaggtgggaggatcacttggggccaggagtttgagaccagcttgggcaacacagcgcaatctcgtctctactaaaaaaaaaaaaaaaaaaaaattagctgggcatgatggcatgctcctgtggtcccagctacttgggaggctgaggcaggaggatcacttggtcccaggagtttgaggcgacagtgagctaggatcgcaccactgcactccagcctgagtgacagagcaagaccctgtctctaaaaaaaattaaaatgaaagaccaggtgctgggattaaggaaacacaggtctgagggtctgagggaaggggcctgcctcccagggagtcaacatagatgttccccatgaacagggatttgactttggaggccaacctggcctggcctctgccctttatctcacactccctatccttggcccactgccagtccctgccttgtggcaaaggggccccaaaagaaaagctgcccttccccaaatgtaaggacccaggtacactttcacccgtggaaagcagtgtctgtcgagagtctgtttcctattaatacttatcaaagccatgtgcgagggaggtggtcagctgtcaatatgccttagtatgtttatatgagtttgttttgttctaaaatacccaaacagttctggtcaagcggggctatgcccgtctggcccaaaacacagtccgttattaacgagatggccctggcaggcgggaacaaatctgcctccatgcactgcttcctgtagtcttttagaaagtaactccaggacatcgaagtgcccagatttgactcctaagttctaggagactgtagcgcagggtctgtcaaccttagcactattggcatttggggctgggtaattctttcttgtgggggccgtcttgggtactgtaggaagctgagcagcattcctggcctccatccacaagatacctgtagcagtgtcctgccaacggtaacaatcaagtatgtcatcagacattgcccaatgtccccagggggcaacacccctctcttggacttcagggtcaagagaatctctgctggctaccccaggacttctcattatagatttcctggagcacgcagcagaaactttgcctagcccagtggttgtttccattatctgctgccaaagtgggatttgagggtgtccgggggagggggcatggggagggcagtatgctttcaaaaacccctcccaggccaggcgtggtggctcatgcctgtaatcacaggactttgggaggccgaggctggcagatcacttgaggctgggagttagagaccaacctggctaacatggcaaaacctcgtctctactaaaaatacaaaaatcagcccggcgtggtggcgggcatctgtaatcccatctactcgggaggctgaggcaggagaattacttgaacccaggaggcagaggctgcagtgagccgagatggcaccactgcactccagcttgttgacagaatgagaccctgtggaaaaaaaaaaaaaagccctcccatgccagaacagaggatggcagtctgtttcaataagacactgtgtccttggtgttggttctgattaagactcactgagatccagtgctcttgagctgggtctcagtcccctcccatgtcctgtgctctgccgccactgttttcattgttgtgttctcgttgtgattgttaagactcacactcctggctcagcagtggttttccagaaggcccaaagagcggtgccgggcaccccacgtcgcagtgtccgttccgggcttgggaagctggggaggtgggcagacctggtcgcatctcaccacacacacacacacacacacacacacacacgctgtcagaaactcggccgtcccccctacctctgagctctcaatgctgctaatctctgccaagtgtccctgtgctccagcaccttccttgaaggactgacgcccaccccacgctctttgcgaggttgtccaggctgtgtttgtcgcatgctcttcttctgtatagttctcatcttccaattttatgggattcaacaaaagcctattatgcttgtttgcattatggttacaatattaaaaagtggattcaaaaaaaa

SEQ ID NO: 86 - DNA, 1909 bp, Homo sapiens
gaggtgtttcccttagctatggaaactctataagagagatccagcttgcctcctcttgagcagtcagcaacagggtcccgtccttgacacctcagcctctacaggactgagaagaagtaaaaccgtttgctggggctggcctgactcaccagctgccatgcagcagcccttcaattacccatatccccagatctactgggtggacagcagtgccagctctccctgggcccctccaggcacagttcttccctgtccaacctctgtgcccagaaggcctggtcaaaggaggccaccaccaccaccgccaccgccaccactaccacctccgccgccgccgccaccactgcctccactaccgctgccacccctgaagaagagagggaaccacagcacaggcctgtgtctccttgtgatgtttttcatggttctggttgccttggtaggattgggcctggggatgtttcagctcttccacctacagaaggagctggcagaactccgagagtctaccagccagatgcacacagcatcatctttggagaagcaaataggccaccccagtccaccccctgaaaaaaaggagctgaggaaagtggcccatttaacaggcaagtccaactcaaggtccatgcctctggaatgggaagacacctatggaattgtcctgctttctggagtgaagtataagaagggtggccttgtgatcaatgaaactgggctgtactttgtatattccaaagtatacttccggggtcaatcttgcaacaacctgcccctgagccacaaggtctacatgaggaactctaagtatccccaggatctggtgatgatggaggggaagatgatgagctactgcactactgggcagatgtgggcccgcagcagctacctgggggcagtgttcaatcttaccagtgctgatcatttatatgtcaacgtatctgagctctctctggtcaattttgaggaatctcagacgtttttcggcttatataagctctaagagaagcactttgggattctttccattatgattctttgttacaggcaccgagaatgttgtattcagtgagggtcttcttacatgcatttgaggtcaagtaagaagacatgaaccaagtggaccttgagaccacagggttcaaaatgtctgtagctcctcaactcacctaatgtttatgagccagacaaatggaggaatatgacggaagaacatagaactctgggctgccatgtgaagagggagaagcatgaaaaagcagctaccaggtgttctacactcatcttagtgcctgagagtatttaggcagattgaaaaggacaccttttaactcacctctcaaggtgggccttgctacctcaagggggactgtctttcagatacatggttgtgacctgaggatttaagggatggaaaaggaagactagaggcttgcataataagctaaagaggctgaaagaggccaatgccccactggcagcatcttcacttctaaatgcatatcctgagccatcggtgaaactaacagataagcaagagagatgttttggggactcatttcattcctaacacagcatgtgtatttccagtgcaattgtaggggtgtgtgtgtgtgtgtgtgtgtgtgtgtgtgtatgactaaagagagaatgtagatattgtgaagtacatattaggaaaatatgggttgcatttggtcaagattttgaatgcttcctgacaatcaactctaatagtgcttaaaaatcattgattgtcagctactaatgatgttttcctataatataataaatatttatgtagatgtgcatttttgtgaaatgaaaacatgtaataaaaagtatatgttaggatacaaaaaaaaaaaaaaaaaaaaaaaaaaaaaaaaaaaaaaaaaaaaaaaaaaaa

SEQ ID NO: 87 - DNA, 2862 bp, Homo sapiens
gcaccacgccgcccgggcttctggggtgttccccaaccacggcccagccctgccacaccccccgcccccggcctccgcagctcggcatgggcgcgggggtgctcgtcctgggcgcctccgagcccggtaacctgtcgtcggccgcaccgctccccgacggcgcggccaccgcggcgcggctgctggtgcccgcgtcgccgcccgcctcgttgctgcctcccgccagcgaaagccccgagccgctgtctcagcagtggacagcgggcatgggtctgctgatggcgctcatcgtgctgctcatcgtggcgggcaatgtgctggtgatcgtggccatcgccaagacgccgcggctgcagacgctcaccaacctcttcatcatgtccctggccagcgccgacctggtcatggggctgctggtggtgccgttcggggccaccatcgtggtgtggggccgctgggagtacggctccttcttctgcgagctgtggacctcagtggacgtgctgtgcgtgacggccagcatcgagaccctgtgtgtcattgccctggaccgctacctcgccatcacctcgcccttccgctaccagagcctgctgacgcgcgcgcgggcgcggggcctcgtgtgcaccgtgtgggccatctcggccctggtgtccttcctgcccatcctcatgcactggtggcgggcggagagcgacgaggcgcgccgctgctacaacgaccccaagtgctgcgacttcgtcaccaaccgggcctacgccatcgcctcgtccgtagtctccttctacgtgcccctgtgcatcatggccttcgtgtacctgcgggtgttccgcgaggcccagaagcaggtgaagaagatcgacagctgcgagcgccgtttcctcggcggcccagcgcggccgccctcgccctcgccctcgcccgtccccgcgcccgcgccgccgcccggacccccgcgccccgccgccgccgccgccaccgccccgctggccaacgggcgtgcgggtaagcggcggccctcgcgcctcgtggccctgcgcgagcagaaggcgctcaagacgctgggcatcatcatgggcgtcttcacgctctgctggctgcccttcttcctggccaacgtggtgaaggccttccaccgcgagctggtgcccgaccgcctcttcgtcttcttcaactggctgggctacgccaactcggccttcaaccccatcatctactgccgcagccccgacttccgcaaggccttccagggactgctctgctgcgcgcgcagggctgcccgccggcgccacgcgacccacggagaccggccgcgcgcctcgggctgtctggcccggcccggacccccgccatcgcccggggccgcctcggacgacgacgacgacgatgtcgtcggggccacgccgcccgcgcgcctgctggagccctgggccggctgcaacggcggggcggcggcggacagcgactcgagcctggacgagccgtgccgccccggcttcgcctcggaatccaaggtgtagggcccggcgcggggcgcggactccgggcacggcttcccaggggaacgaggagatctgtgtttacttaagaccgatagcaggtgaactcgaagcccacaatcctcgtctgaatcatccgaggcaaagagaaaagccacggaccgttgcacaaaaaggaaagtttgggaagggatgggagagtggcttgctgatgttccttgttgttttttttttcttttcttttctttcttcttcttttttttttttttttttttttctgtttgtggtccggccttcttttgtgtgtgcgtgtgatgcatctttagatttttttcccccaccaggtggtttttgacactctctgagaggaccggagtggaagatgggtgggttaggggaagggagaagcattaggaggggattaaaatcgatcatcgtggctcccatccctttcccgggaacaggaacacactaccagccagagagaggagaatgacagtttgtcaagacatatttccttttgctttccagagaaatttcattttaatttctaagtaatgatttctgctgttatgaaagcaaagagaaaggatggaggcaaaataaaaaaaaatcacgtttcaagaaatgttaagctcttcttggaacaagccccaccttgctttccttgtgtagggcaaacccgctgtcccccgcgcgcctgggtggtcaggctgagggatttctacctcacactgtgcatttgcacagcagatagaaagacttgtttatattaaacagcttatttatgtatcaatattagttggaaggaccaggcgcagagcctctctctgtgacatgtgactctgtcaattgaagacaggacattaaaagagagcgagagagagaaacagttcagattactgcacatgtggataaaaacaaaaacaaaaaaaaggagtggttcaaaatgccatttttgcacagtgttaggaattacaaaatccacagaagatgttacttgcacaaaaagaaattaaatattttttaaagggagaggggctgggcagatcttaaataaaattcaaactctacttctgttgtctagtatgttattgagctaatgattcattgggaaaatacctttttatactcctttatcatggtactgtaactgtatccatattataaatataattatcttaaggattttttatttttttttatgtccaagtgcccacgtgaatttgctggtgaaagttagcacttgtgtgtaaattctacttcctcttgtgtgttttaccaagtatttatactctggtgcaactaactactgtgtgaggaattggtccatgtgcaataaataccaatgaagcacaatcaa

SEQ ID NO: 88 - DNA, 7726 bp, Homo sapiens
agaataagggcagggaccgcggctcctacctcttggtgatccccttccccattccgcccccgcctcaacgcccagcacagtgccctgcacacagtagtcgctcaataaatgttcgtggatgatgatgatgatgatgatgaaaaaaatgcagcatcaacggcagcagcaagcggaccacgcgaacgaggcaaactatgcaagaggcaccagacttcctctttctggtgaaggaccaacttctcagccgaatagctccaagcaaactgtcctgtcttggcaagctgcaatcgatgctgctagacaggccaaggctgcccaaactatgagcacctctgcacccccacctgtaggatctctctcccaaagaaaacgtcagcaatacgccaagagcaaaaaacagggtaactcgtccaacagccgacctgcccgcgcccttttctgtttatcactcaataaccccatccgaagagcctgcattagtatagtggaatggaaaccatttgacatatttatattattggctatttttgccaattgtgtggccttagctatttacatcccattccctgaagatgattctaattcaacaaatcataacttggaaaaagtagaatatgccttcctgattatttttacagtcgagacatttttgaagattatagcgtatggattattgctacatcctaatgcttatgttaggaatggatggaatttactggattttgttatagtaatagtaggattgtttagtgtaattttggaacaattaaccaaagaaacagaaggcgggaaccactcaagcggcaaatctggaggctttgatgtcaaagccctccgtgcctttcgagtgttgcgaccacttcgactagtgtcaggagtgcccagtttacaagttgtcctgaactccattataaaagccatggttcccctccttcacatagcccttttggtattatttgtaatcataatctatgctattataggattggaactttttattggaaaaatgcacaaaacatgtttttttgctgactcagatatcgtagctgaagaggacccagctccatgtgcgttctcagggaatggacgccagtgtactgccaatggcacggaatgtaggagtggctgggttggcccgaacggaggcatcaccaactttgataactttgcctttgccatgcttactgtgtttcagtgcatcaccatggagggctggacagatgtgctctactgggtaaatgatgcgataggatgggaatggccatgggtgtattttgttagtctgatcatccttggctcatttttcgtccttaacctggttcttggtgtccttagtggagaattctcaaaggaaagagagaaggcaaaagcacggggagatttccagaagctccgggagaagcagcagctggaggaggatctaaagggctacttggattggatcacccaagctgaggacatcgatccggagaatgaggaagaaggaggagaggaaggcaaacgaaatactagcatgcccaccagcgagactgagtctgtgaacacagagaacgtcagcggtgaaggcgagaaccgaggctgctgtggaagtctctggtgctggtggagacggagaggcgcggccaaggcggggccctctgggtgtcggcggtggggtcaagccatctcaaaatccaaactcagccgacgctggcgtcgctggaaccgattcaatcgcagaagatgtagggccgccgtgaagtctgtcacgttttactggctggttatcgtcctggtgtttctgaacaccttaaccatttcctctgagcactacaatcagccagattggttgacacagattcaagatattgccaacaaagtcctcttggctctgttcacctgcgagatgctggtaaaaatgtacagcttgggcctccaagcatatttcgtctctcttttcaaccggtttgattgcttcgtggtgtgtggtggaatcactgagacgatcttggtggaactggaaatcatgtctcccctggggatctctgtgtttcggtgtgtgcgcctcttaagaatcttcaaagtgaccaggcactggacttccctgagcaacttagtggcatccttattaaactccatgaagtccatcgcttcgctgttgcttctgctttttctcttcattatcatcttttccttgcttgggatgcagctgtttggcggcaagtttaattttgatgaaacgcaaaccaagcggagcacctttgacaatttccctcaagcacttctcacagtgttccagatcctgacaggcgaagactggaatgctgtgatgtacgatggcatcatggcttacgggggcccatcctcttcaggaatgatcgtctgcatctacttcatcatcctcttcatttgtggtaactatattctactgaatgtcttcttggccatcgctgtagacaatttggctgatgctgaaagtctgaacactgctcagaaagaagaagcggaagaaaaggagaggaaaaagattgccagaaaagagagcctagaaaataaaaagaacaacaaaccagaagtcaaccagatagccaacagtgacaacaaggttacaattgatgactatagagaagaggatgaagacaaggacccctatccgccttgcgatgtgccagtaggggaagaggaagaggaagaggaggaggatgaacctgaggttcctgccggaccccgtcctcgaaggatctcggagttgaacatgaaggaaaaaattgcccccatccctgaagggagcgctttcttcattcttagcaagaccaacccgatccgcgtaggctgccacaagctcatcaaccaccacatcttcaccaacctcatccttgtcttcatcatgctgagcagcgctgccctggccgcagaggaccccatccgcagccactccttccggaacacgatactgggttactttgactatgccttcacagccatctttactgttgagatcctgttgaagatgacaacttttggagctttcctccacaaaggggccttctgcaggaactacttcaatttgctggatatgctggtggttggggtgtctctggtgtcatttgggattcaatccagtgccatctccgttgtgaagattctgagggtcttaagggtcctgcgtcccctcagggccatcaacagagcaaaaggacttaagcacgtggtccagtgcgtcttcgtggccatccggaccatcggcaacatcatgatcgtcaccaccctcctgcagttcatgtttgcctgtatcggggtccagttgttcaaggggaagttctatcgctgtacggatgaagccaaaagtaaccctgaagaatgcaggggacttttcatcctctacaaggatggggatgttgacagtcctgtggtccgtgaacggatctggcaaaacagtgatttcaacttcgacaacgtcctctctgctatgatggcgctcttcacagtctccacgtttgagggctggcctgcgttgctgtataaagccatcgactcgaatggagagaacatcggcccaatctacaaccaccgcgtggagatctccatcttcttcatcatctacatcatcattgtagctttcttcatgatgaacatctttgtgggctttgtcatcgttacatttcaggaacaaggagaaaaagagtataagaactgtgagctggacaaaaatcagcgtcagtgtgttgaatacgccttgaaagcacgtcccttgcggagatacatccccaaaaacccctaccagtacaagttctggtacgtggtgaactcttcgcctttcgaatacatgatgtttgtcctcatcatgctcaacacactctgcttggccatgcagcactacgagcagtccaagatgttcaatgatgccatggacattctgaacatggtcttcaccggggtgttcaccgtcgagatggttttgaaagtcatcgcatttaagcctaaggggtattttagtgacgcctggaacacgtttgactccctcatcgtaatcggcagcattatagacgtggccctcagcgaagcagacccaactgaaagtgaaaatgtccctgtcccaactgctacacctgggaactctgaagagagcaatagaatctccatcacctttttccgtcttttccgagtgatgcgattggtgaagcttctcagcaggggggaaggcatccggacattgctgtggacttttattaagtcctttcaggcgctcccgtatgtggccctcctcatagccatgctgttcttcatctatgcggtcattggcatgcagatgtttgggaaagttgccatgagagataacaaccagatcaataggaacaataacttccagacgtttccccaggcggtgctgctgctcttcaggtgtgcaacaggtgaggcctggcaggagatcatgctggcctgtctcccagggaagctctgtgaccctgagtcagattacaaccccggggaggagtatacatgtgggagcaactttgccattgtctatttcatcagtttttacatgctctgtgcatttctgatcatcaatctgtttgtggctgtcatcatggataatttcgactatctgacccgggactggtctattttggggcctcaccatttagatgaattcaaaagaatatggtcagaatatgaccctgaggcaaagggaaggataaaacaccttgatgtggtcactctgcttcgacgcatccagcctcccctggggtttgggaagttatgtccacacagggtagcgtgcaagagattagttgccatgaacatgcctctcaacagtgacgggacagtcatgtttaatgcaaccctgtttgctttggttcgaacggctcttaagatcaagaccgaagggaacctggagcaagctaatgaagaacttcgggctgtgataaagaaaatttggaagaaaaccagcatgaaattacttgaccaagttgtccctccagctggtgatgatgaggtaaccgtggggaagttctatgccactttcctgatacaggactactttaggaaattcaagaaacggaaagaacaaggactggtgggaaagtaccctgcgaagaacaccacaattgccctacaggcgggattaaggacactgcatgacattgggccagaaatccggcgtgctatatcgtgtgatttgcaagatgacgagcctgaggaaacaaaacgagaagaagaagatgatgtgttcaaaagaaatggtgccctgcttggaaaccatgtcaatcatgttaatagtgataggagagattcccttcagcagaccaataccacccaccgtcccctgcatgtccaaaggccttcaattccacctgcaagtgatactgagaaaccgctgtttcctccagcaggaaattcggtgtgtcataaccatcataaccataattccataggaaagcaagttcccacctcaacaaatgccaatctcaataatgccaatatgtccaaagctgcccatggaaagcggcccagcattgggaaccttgagcatgtgtctgaaaatgggcatcattcttcccacaagcatgaccgggagcctcagagaaggtccagtgtgaaaagaacccgctattatgaaacttacattaggtccgactcaggagatgaacagctcccaactatttgccgggaagacccagagatacatggctatttcagggacccccactgcttgggggagcaggagtatttcagtagtgaggaatgctacgaggatgacagctcgcccacctggagcaggcaaaactatggctactacagcagatacccaggcagaaacatcgactctgagaggccccgaggctaccatcatccccaaggattcttggaggacgatgactcgcccgtttgctatgattcacggagatctccaaggagacgcctactacctcccaccccagcatcccaccggagatcctccttcaactttgagtgcctgcgccggcagagcagccaggaagaggtcccgtcgtctcccatcttcccccatcgcacggccctgcctctgcatctaatgcagcaacagatcatggcagttgccggcctagattcaagtaaagcccagaagtactcaccgagtcactcgacccggtcgtgggccacccctccagcaacccctccctaccgggactggacaccgtgctacacccccctgatccaagtggagcagtcagaggccctggaccaggtgaacggcagcctgccgtccctgcaccgcagctcctggtacacagacgagcccgacatctcctaccggactttcacaccagccagcctgactgtccccagcagcttccggaacaaaaacagcgacaagcagaggagtgcggacagcttggtggaggcagtcctgatatccgaaggcttgggacgctatgcaagggacccaaaatttgtgtcagcaacaaaacacgaaatcgctgatgcctgtgacctcaccatcgacgagatggagagtgcagccagcaccctgcttaatgggaacgtgcgtccccgagccaacggggatgtgggccccctctcacaccggcaggactatgagctacaggactttggtcctggctacagcgacgaagagccagaccctgggagggatgaggaggacctggcggatgaaatgatatgcatcaccaccttgtagcccccagcgaggggcagactggctctggcctcaggtggggcgcaggagagccaggggaaaagtgcctcatagttaggaaagtttaggcactagttgggagtaatattcaattaattagacttttgtataagagatgtcatgcctcaagaaagccataaacctggtaggaacaggtcccaagcggttgagcctggcagagtaccatgcgctcggccccagctgcaggaaacagcaggccccgccctctcacagaggatgggtgaggaggccagacctgccctgccccattgtccagatgggcactgctgtggagtctgcttctcccatgtaccagggcaccaggcccacccaactgaaggcatggcggcggggtgcaggggaaagttaaaggtgatgacgatcatcacacctgtgtcgttacctcagccatcggtctagcatatcagtcactgggcccaacatatccatttttaaaccctttcccccaaatacactgcgtcctggttcctgtttagctgttctgaaatacggtgtgtaagtaagtcagaacccagctaccagtgattattgcgagggcaatgggacctcataaataaggttttctgtgatgtgacgccagtttacataagagaatatcactccgatggtcggtttctgactgtcacgctaagggcaactgtaaactggaataataatgcactcgcaaccaggtaaacttagatacactagtttgtttaaaattatagatttactgtacatgacttgtaatatactataatttgtatttgtaaagagatggtctatattttgtaattactgtattgtatttgaactgcagcaatatccatgggtcctaataattgtagttccccactaaaatctagaaattattagtatttttactcgggctatccagaagtagaagaaatagagccaattctcatttattcagcgaaaatcctctggggttaaaattttaagtttgaaagaacttgacactacagaaatttttctaaaatattttgagtcactataaacctatcatctttccacaagataaaa

SEQ ID NO: 89 - DNA, 14972 bp, Homo sapiens
tttagattcaacagttcacagcggcgggctgctgctgctgcctctccgaagagctcgcggagctccccagaggcggtggtccccgtgcttgtctggatgcggctctgagtctccgtgtgtctttctgcttgttgctgtgtgcgggtgttcggccgcgatcacctttgtgtgtcttctgtctgtttaaacctcaggatggctcgcttcggggaggcggtggtcgccaggccagggtccggcgatggagactcggaccagagcaggaaccggcaaggaacccccgtgccggcctcggggcaggcggccgcctacaagcagacgaaagcacagagggcgcggactatggctttgtacaaccccattcccgtccggcagaactgtttcaccgtcaacagatccctgttcatcttcggagaagataacattgtcaggaaatatgccaagaagctcatcgattggccgccatttgagtacatgatcctggccaccatcattgccaactgcatcgtcctggccctggagcagcatcttcctgaggatgacaagacccccatgtcccgaagactggagaagacagaaccttatttcattgggatcttttgctttgaagctgggatcaaaattgtggccctggggttcatcttccataagggctcttacctccgcaatggctggaatgtcatggacttcatcgtggtcctcagtggcatcctggccactgcaggaacccacttcaatactcacgtggacctgaggaccctccgggctgtgcgtgtcctgcggcctttgaagctcgtgtcagggatacctagcctgcagattgtgttgaagtccatcatgaaggccatggtacctcttctgcagattggccttctgctcttctttgccatcctgatgtttgctatcattggtttggagttctacagtggcaagttacatcgagcatgcttcatgaacaattcaggtattctagaaggatttgacccccctcacccatgtggtgtgcagggctgcccagctggttatgaatgcaaggactggatcggccccaatgatgggatcacccagtttgataacatcctttttgctgtgctgactgtcttccagtgcatcaccatggaagggtggaccactgtgctgtacaataccaatgatgccttaggagccacctggaattggctgtacttcatccccctcatcatcattggatccttctttgttctcaacctagtcctgggagtgctttccggggaatttgccaaagagagagagagagtggagaaccgaagggctttcatgaagctgcggcgccagcagcagattgagcgtgagctgaatggctaccgtgcctggatagacaaagcagaggaagtcatgctcgctgaagaaaataaaaatgctggaacatccgccttagaagtgcttcgaagggcaaccatcaagaggagccggacagaggccatgactcgagactccagtgatgagcactgtgttgatatctcctctgtgggcacacctctggcccgagccagtatcaaaagtgcaaaggtagacggggtctcttatttccggcacaaggaaaggcttctgcgcatctccattcgccacatggttaaatcccaggtgttttactggattgtgctgagccttgtggcactcaacactgcctgtgtggccattgtccatcacaaccagccccagtggctcacccacctcctctactatgcagaatttctgtttctgggactcttcctcttggagatgtccctgaagatgtatggcatggggcctcgcctttattttcactcttcattcaactgctttgattttggggtcacagtgggcagtatctttgaagtggtctgggcaatcttcagacctggtacgtcttttggaatcagtgtcttgcgagccctccggcttctaagaatatttaaaataaccaagtattgggcttccctacggaatttggtggtctccttgatgagctcaatgaagtctatcatcagtttgcttttcctcctcttcctcttcatcgttgtctttgctctcctaggaatgcagttatttggaggcaggtttaactttaatgatgggactccttcggcaaattttgataccttccctgcagccatcatgactgtgttccagatcctgacgggtgaggactggaatgaggtgatgtacaatgggatccgctcccagggtggggtcagctcaggcatgtggtctgccatctacttcattgtgctcaccttgtttggcaactacacgctactgaatgtgttcttggctatcgctgtggataatctcgccaacgcccaggaactgaccaaggatgaacaggaggaagaagaggccttcaaccagaaacatgcactgcagaaggccaaggaggtcagcccgatgtctgcacccaacatgccttcgatcgaaagagacagaaggagaagacaccacatgtcgatgtgggagccacgcagcagccacctgagggagcggaggcgccggcaccacatgtccgtgtgggagcagcgtaccagccagctgaggaagcacatgcagatgtccagccaggaggccctcaacagagaggaggcgccgaccatgaacccgctcaaccccctcaacccgctcagctccctcaacccgctcaatgcccaccccagcctttatcggcgacccagggccattgagggcctggccctgggcctggccctggagaagttcgaggaggagcgcatcagccgtggggggtccctcaagggggatggaggggaccgatccagtgccctggacaaccagaggacccctttgtccctgggccagcgggagccaccatggctggccaggccctgtcatggaaactgtgacccgactcagcaggaggcagggggaggagaggctgtggtgacctttgaggaccgggccaggcacaggcagagccaacggcgcagccggcatcgccgcgtcaggacagaaggcaaggagtcctcttcagcctcccggagcaggtctgccagccaggaacgcagtctggatgaagccatgcccactgaaggggagaaggaccatgagctcaggggcaaccatggtgccaaggagccaacgatccaagaagagagagcccaggatttaaggaggaccaacagtctgatggtgtccagaggctccgggctggcaggaggccttgatgaggctgacacccccctagtcctgccccatcctgagctggaagtggggaagcacgtggtgctgacggagcaggagccagaaggcagcagtgagcaggccctgctggggaatgtgcagctagacatgggccgggtcatcagccagagcgagcctgacctctcctgcatcacggccaacacggacaaggccaccaccgagagcaccagcgtcaccgtcgccatccccgacgtggaccccttggtggactcaaccgtggtgcacattagcaacaagacggatggggaagccagtcccttgaaggaggcagagatcagagaggatgaggaggaggtggagaagaagaagcagaagaaggagaagcgtgagacaggcaaagccatggtgccccacagctcaatgttcatcttcagcaccaccaacccgatccggagggcctgccactacatcgtgaacctgcgctactttgagatgtgcatcctcctggtgattgcagccagcagcatcgccctggcggcagaggaccccgtcctgaccaactcggagcgcaacaaagtcctgaggtattttgactatgtgttcacgggcgtgttcacctttgagatggttataaagatgatagaccaaggcttgatcctgcaggatgggtcctacttccgagacttgtggaacatcctggactttgtggtggtcgttggcgcattggtggcctttgctctggcgaacgctttgggaaccaacaaaggacgggacatcaagaccatcaagtctctgcgggtgctccgagttctaaggccactgaaaaccatcaagcgcttgcccaagctcaaggccgtcttcgactgcgtagtgacctccttgaagaatgtcttcaacatactcattgtgtacaagctcttcatgttcatctttgctgtcatcgcagttcagctcttcaagggaaagttcttttattgcacggacagttccaaggacacagagaaggagtgcataggcaactatgtagatcatgagaaaaacaagatggaggtgaagggccgggaatggaagcgccatgaattccactacgacaacattatctgggccctgctgaccctcttcaccgtctccacaggggaaggatggcctcaagttctgcagcactctgtagatgtgacagaggaagaccgaggcccaagccgcagcaaccgcatggagatgtctatcttttatgtagtctactttgtggtcttccccttcttctttgtcaatatctttgtggctctcatcatcatcaccttccaggagcaaggggataagatgatggaggagtgcagcctggagaagaatgagagggcgtgcatcgacttcgccatcagcgccaaacctctcacccgctacatgccgcagaacagacacaccttccagtaccgcgtgtggcactttgtggtgtctccgtcctttgagtacaccattatggccatgatcgccttgaatactgttgtgctgatgatgaagtattattctgctccctgtacctatgagctggccctgaagtacctgaatatcgccttcaccatggtgttttccctggaatgtgtcctgaaggtcatcgcttttggctttttgaactatttccgagacacctggaatatctttgacttcatcaccgtgattggcagtatcacagaaattatcctgacagacagcaagctggtgaacaccagtggcttcaatatgagctttctgaagctcttccgagctgcccgcctcataaagctcctgcgtcagggctataccatacgcattttgctgtggacctttgtgcagtcctttaaggccctcccttatgtctgccttttaattgccatgcttttcttcatttatgccatcattgggatgcaggtatttggaaacataaaattagacgaggagagtcacatcaaccggcacaacaacttccggagtttctttgggtccctaatgctactcttcaggagtgccacaggtgaggcctggcaggagattatgctgtcatgccttggggagaagggctgtgagcctgacaccaccgcaccatcagggcagaacgagaacgaacgctgcggcaccgatctggcctacgtgtactttgtctccttcatcttcttctgctccttcttgatgctcaacctgtttgtggccgtcatcatggacaactttgagtacctgactcgggactcctccatcctggggcctcaccacttggacgagtttgtccgcgtctgggcagaatatgaccgagcagcatgtggccgcatccattacactgagatgtatgaaatgctgactctcatgtcacctccgctaggcctcggcaagagatgtccctccaaagtggcatataagaggttggtcctgatgaacatgccagtagctgaggacatgacggtccacttcacctccacacttatggctctgatccggacagctctggacattaaaattgccaaaggtggtgcagacaggcagcagctagactcagagctacaaaaggagaccctagccatctggcctcacctatcccagaagatgctggatctgcttgtgcccatgcccaaagcctctgacctgactgtgggcaaaatctatgcagcaatgatgatcatggactactataagcagagtaaggtgaagaagcagaggcagcagctggaggaacagaaaaatgcccccatgttccagcgcatggagccttcatctctgcctcaggagatcattgctaatgccaaagccctgccttacctccagcaggaccccgtttcaggcctgagtggccggagtggatacccttcgatgagtccactctctccccaggatatattccagttggcttgtatggaccccgccgatgacggacagttccaagaacggcagtctctggtggtgacagaccctagctccatgagacgttcattttccactattcgggataagcgttcaaattcctcgtggttggaggaattctccatggagcgaagcagtgaaaatacctacaagtcccgtcgccggagttaccactcctccttgcggctgtcagcccaccgcctgaactctgattcaggccacaagtctgacactcaccgctcagggggcagggagcggggacgatcaaaagagcgaaagcatcttctctctcctgatgtctcccgctgcaattcagaagagcgagggacccaggctgactgggagtccccagagcgccgtcaatccaggtcacccagtgagggcaggtcacagacgcccaacagacagggcacaggttccctaagtgagagctccatcccctctgtctctgacaccagcaccccaagaagaagtcgtcggcagctcccacccgtcccgccaaagccccggcccctcctttcctacagctccctgattcgacacgcgggcagcatctctccacctgctgatggaagcgaggagggctccccgctgacctcccaagctctggagagcaacaatgcttgcctgaccgagtcttccaactctccgcacccccagcagagccaacatgcctccccacagcgctacatctccgagccctacttggccctgcacgaagactcccacgcctcagactgtggtgaggaggagacgctcactttcgaagcagccgtggctactagcctgggccgttccaacaccatcggctcagccccacccctgcggcatagctggcagatgcccaacgggcactatcggcggcggaggcgcggggggcctgggccaggcatgatgtgtggggctgtcaacaacctgctaagtgacacggaagaagatgacaaatgctagaggctgctcccccctccgatgcatgctcttctctcacatggagaaaaccaagacagaattgggaagccagtgcggcccgggggggaggaagagggaaaaggaagatggaaggacaccatgcattatcagagaagaggaagtaaaggacaatcagaacaccagtcaaacccaccaaattgctttattcccctttgcaagatgggcactgccatagttctgcctctttgctggggaaagaaaccaggaacgtggagggttattactgcgggagaagggacacgaggatggctttgcttccccttgccccttcccacttttctaaaagctgtggagggatctagctggcctatgtctacactcagtgccctgagaagcctggaagactttctggctcttaactggggagtagtggagaccataggagaggactctcctccctcaccagctcttacgcctcagccagcaccactgccaccagggcaactgcagcagcatctcatgcataaccctgtggcttgcttcccccagggcagcacaggctaagtcaggaacatcggatgccagggagggaggagaaagccgaagcgaaaggggtcagggtgctgaggcaacagcagcaagggctggtctggacaagaaaagccatagcccggcagcccctaccatgagggagacagagaaacagaactggtggtgctggggggtatagccccccatccttgaggcctgtcacccacacagtaggtgctgagagttaggacaggtcaggaagtcccccagggtccacaaaggtgcctgaggctctggtaagggtgaagataaaagtatttaacaaccgctatggcatcaatgtaagtggagtttggtcctagtgccggagcccatgctattccaggcattggctctttagatgccagtcatgggggaaccctgagggtgtgggtagagtagcaggggccacctaagagattaaaaacagtctgttttccaaccagtgtggaagcaattaaatatgcgtaacagtgctacggccacaccagcacctcctggctgaaggtcagcccacactctggtccatgaggcagcaaggccagtgctgtgccaagcccggtaaggccaagtgccgaggcccagccttccctgccactcctctgagagggcagaacacacatatccaagtaggctacccaccactgggtagggatttctgtaaagatgggaaaggctgatagattgaaataagcttctgtgaaagtctggatttactgaggacctcccctgaggagggaccgttgggaccgcagattctgcagctggtgtggggttcaggtcagtttgtcaggatgctttaaggtgattagtaaatatacctcagcttagacttgggctgctccttctagcaaagcaggctccagtggggcctcatcatacaggatgacaagactggggccctgttcaccttgaacatgcccctgggccaagatggggcttcacccctccccagagtaagagctggggctgacagtcccaccctgtcattcctaatagcccaaacgcagaagcactgagcaagagagccctttcttgccaagccagtgctcttttggtatatggcatacagctccattggaggggacacatcactggctttatctggtggaaatgtacctttcccttaagttcctccttagtgccatcacagcaggtgaatgggtgccctacggggccctccttcccccaccaggaacagatggaacctgccacccaggatcctgatctgccctgcactgagcactcagtggataaacactcctccagcccagacacactcctcctcttgggcaggagcaatccagagttgttatttttcttagaaggagcctcttttccctctattttttaaattgaaatataatagctgcatcagccctgaaaagccaaattcaaccacatggctggagaatcatttgtcatggccccgccttctcttctgatactaatggagcttcatgacccacggtcagcccccaaaccaaagttgtcccaacagaggaggccagtgaggcagagacagagctctcccactctcagaccctcttttgtcttcattttcctctcccacttagcacatgtgtgcttgagggtggctgggaatgtgatatacagcaccctgatcctaacaggtgtgattgttacgtaagacgctgatactgggccttgtattgcttttaaagtttcctctgctcagcatcatttcatgccaaagtgctgctatgggctgctttgtgtgcacaaaattgctttttccacctcggaaatgcagctttccctagggggaggcctacaacaggacgaccattctgagccagtgagtctattgcatggtgttttgagaaagggaattttagtgacaccttatgccatttcaagaggagaaatgcaggctggcagagcaatttccagaaatggaatttgcctgcaaatagtataaacaacactaaatttactgtgccaggaaatcttcctgaactccttgaactcatacacacaggtatttgagtcctgaataaagtgttggaaagcactgcagatgcggtcacctgactgaccacctgggttttctattaccagtgaatttcttttattcaccttcccttgaccaagaaattgggtttcttttccctcagcctgcacttactcttctattaagaccagaaaataaaataattttccgttgagtcacaaactcatcatcttgtttggtgttctgctgcctctgaacaaaagtgaatgccagccttcccttgctgggtgtcagagtctgcctcccttgaaaagaggcccctgtagaccccaacacctattcttttctctggttaattacagcagcatctgagaaattccatgcaaaagaagactacaaccagtgtttcagatataccacaagatcaaatttgggcactggtggtccacctcagaagactcttgagtcatatattcagtttctcttgctaatatatgactcgtcttcaccatctcctcaaaacaagagcaaagccaagatagaggaaggtaaaaggaggaggaaaggaaaccaaggcagggagatgttctaagtaggtttgcatttagttacccctcatttcacttaaggctccagacagactccaggtagggaatgcatgctgtctctttctctgtgtctgtctccccatctcctagaggacagagtgccagcgacctctggacaggggcagggctccagccaaggtgcccctgagccagggtcaacatagaatttcctgccccgtgaagggctggcaccagctagcatccccttggctccacatgagtcatgaacacaattgtcagtgggggtctctgctgctcttctggctgaagaatctgtttttcttctgggcttcacttgtagttcctattcaatgtctccatagggcactgagatcaccaagaacattacccagaagctgaagtccaaatgttctagattttgacctctcttgactctggggccacaaagagaaggccccataatccacctctcagccagtatctcccttctttgcacagattcctcccaaccccatagagcctatgtggtgagcatgagggtcgtcttccctctgttctcccatcccagcctctgttttgctgcatgttagcgctgatccagctcctgagatggttaattccacccaatccaagcttatttgcttgcctgactgactccaccactctctcagctatgggggaatattgcattctaatgaaatagggtttggaactcacctggtgctcctcgcaagacaactgacacaaggtgtagggtgtgggggtggacaaaatgcccacctactggataaaagctcactgcaggaaaatgaggtctcctggcataatgcaacaaaaatctcatataattttgatttttaaaaagttgttctcaatttttcattacatcctacttctcagccctctggatgtttcatttttttggacaaagtgtttctttagtggttggggccagggacaggttgagggatatttctcggctcatttataagatataaatattatgaggttgtatgtaaagaaagggcaaacgtacagcagaaggggagcaaatagctacctttcaaggattttgagatttgaaggttaaggaatttttactgctatttttgttcatcagtttcatgtctgttatgttttgagatcctcagaggcctagggttagcgtataccaagaatcctggtgagaggcgttgccatgccttggggtgaattcttccccactagctctctcacccagcctacaagtccttctctcatagatcccagagcaatgggcaccgtccaggaggtacaggagaggactttatgatgcaggaaagaaggaagaagtgggtcccttgcaagtggccagacagggaatgatggtttgactccagaaatcaggaatcaggttcaggtttggataacttctctttaaaatatctccacattgagactcttattttaacaaaatccaaacaaaattaactcagggcttgtgacctaacctttgtaagaaggtgatcaaagagatcctacattaataagcactgcctgtagcaccagctttgtctttttgtcttttgttgtttctttcctgaaccaccctgtacatcatagccaggtctaccccaaatagagcagcagctgatggcttctctgctgtctgtggagggagggctcggctgcagacctatggtgttttgtcagctgttaggtgctacagcccacccagtcagagtacatagacatagcgctttaagggacaaaggacaaacagaactatctttgctttccggaggccatctttttctttccttgaatcctttctgctttaaacttctgaggtttatgcatcccagagaggtcacaccaagccaaagagaaaaaattcatagattgtcccagcctacccaaagggcctgaaaagcctctctaaacaaaactcaagatagctgagaagtatgaatggggttcacagcaaagtccaattgatggcttttgaggctgggacacccccaaactgcccttctgtttttgtagttttgctttcttccacccaccctctctccgcatgctgtaagttaggggagttagtatcttgaacttctaaatgcaaaaggagattttataataagccatgctacctgtaaatacattattgaggtttgcatttttatttttggaggtatgaaagagttgagtagaccaagtcaaaagaggtgtggggatttatgtttatttttatttgtttggggttgtttggttggtggctgggtttcttgtaacagacctattctggaatagcaaagaaggataccttggtgatctgcaatgtttctgaatctgtttctctttaggaagtgattgccatcaaatttagtgatatgatatttgagtcaaaaatctgaggttatagtaccagctgtcttttctctctggtctcctttttgtcgtctttctctttctgtctaaattggcctctgtcttttcctaaggacttaaaatataacccaaattaatgaagaactgccccaaaacttcagtgaaagccaaggaggtacagaattttttcaggacatctttaaccaatacaaaatttatgtcttaagaagataatttttacaatagtgtagtaatctgataaatgaaaactattggaagtcaatagttttttatattccagctttctgtattcaaacttgtgccttcagcaagcatctcttcactttctttcccttgtcaattgaaacatgaatgtttggctaactcatgatgtaaagtgtctgttaagttaataatacataatttaaagcacttagtctccacaaagcaatttagaaaaatcttcacttgttagatcccatgaagtacctatgaaattctcagcattgctataagcatttgattttttttaaggaaacttcctgtttaatggaatctgaatccaagatttgctttaatttcactctattcttcccattttcccttattcttcttgttgtctctctaattaaaaaaaaaaaaaacctaggcttttttttttctatccagaaagttgggttttcatgatctgagcttccttatgtctccttctctttgtgcaaacttaaaccagtcatagattgtcacccagacatattctccaacccagcattggaaatctgaacgaatcttttctctttttgtcctacaagtttgtcagagatgagaatggattgctgtctacattctacaaccagaccctagactttataccaggctgtgccacttcctcttcacttcactcagaggatggccccaaaactgaaaaggaaatgaaataatcaaatataccaaatccgaatttgactttatttgatgactcaatattttccttccagtactctaatttttttttatggcaatggcctatatggcacaagaaccaccacttaaagcaaatctgttgaacatttttataagggatgagcaagaaaaacacactccaaaattttaaagtgccattaatcaatttttaagaataaaggtaatatgaaatgagggctaaacaatgtaatataactgccagttaaggtagacagtagttgtggtcttagttacatttgatatggagttgtgtaatattaagcagatcccagtggagttagtaaaaacataggtattgagttttaatggctaccaattgggatatatacttagcctgcaggctgaactttagtcagtgtttttctatcatgttgttttgtgaacaagtcaaaatttatacaaagctaccctaagtgctgcaattgcagaggaacttgcctcttcgtgatattagagggcagtccaactccgctcaaactgagtccaagatttgaattcatccagaaaaacaaatggaggagaaaagcctaatgcaccacatgtgtttggcatttcatggctgggacaatggagtagagggtaggaagacaagctgtagaacaaaagcaaagtgaggtagaaagtaacaggtcccagacgaggacagacttagagatgtgtaaccttggatcctctttttcacttagaatatgggtaaacttcttagcacaagactggattaagagaagttctttctgttaaactcacctagggtagtggctttgaaggcctcagaggattaatagattcccaaaattttcttccagacctgggagatggagagaaagaggttcttgctttaaagcggctcgaagacaatctttatgacttcagcaactcttcaacatagtagcaccaataaaggagagattatgttaacttcctagtggtgagaataccatgggatgggagaagggccagtgagtgggatgggaatgagcttcatcaggaacagatttcagactctgcagggtgcaccggttctagcctcaaataacaacattgcaaggaggtggactacagggtccacaccctctgtccttcggggcccatggtcaggccattccctctttgttttgctcctagaggatgagcatgtaagatgagatcaggagggaaattgggtgctctgcctcaggctgttaaaatgctgctacctgcattctaaaacgtgcaagtcatgccccacaagacacctccttagggcagcatccactgtggtgtgccagcctgacacccctgcagtcacggtgtttgaatggcagctgatgctggcccacccagagtatcggtgcatctctcctaaagccacagttcagcactgcatgttgaccaggcggatatcctataatatagatgctcgtttggatccaaaaggaaaaccattaaaaataaaagaaagatgaaaaactttaatgttttgggggggataaaagaaaagaataaataaaaccttgttgtaaagaaaaaaaaaaaaaaaa

SEQ ID NO: 90 - DNA, 2519 bp, Homo sapiens
ttattcgattattgtcactgctctccgaccatgcactgtcccttcagactctcctttcccaactgagtcagtcagaggagcctgggtgtctgcaggacataatctaagaccacaaaccaccttgttccacgtgagaaggaaacaagaaagaagggagccaggggaatcctgcaaatttttaggcaacctctttatctattggattactgacttgaggcaaacaaggaacagagatatgaagggtttgaaagatttctccagttgattggcagagaagagctggctagcagggaggacgaccctaggagggtgaattctgcatttcagtgcactgcaggatggcgtcgtctctgccctggctgtgcattattctgtggctagaaaatgccctagggaaactcgaagttgaaggcaacttctactcagaaaacgtcagtcggatcctggacaacttgcttgaaggctatgacaatcggctgcggccgggatttggaggtgctgtcactgaagtcaaaacagacatttatgtgaccagttttgggcccgtgtcagatgtggagatggagtatacgatggatgtttttttccgccagacctggactgatgagaggttgaagtttggggggccaactgagattctgagtctgaataatttgatggtcagtaaaatctggacgcctgacacctttttcagaaatggtaaaaagtccattgctcacaacatgacaactcctaataaactcttcagaataatgcagaatggaaccattttatacaccatgaggcttaccatcaatgctgactgtcccatgaggctggttaactttcctatggatgggcatgcttgtccactcaagtttgggagctatgcttatcccaaaagtgaaatcatatatacgtggaaaaaaggaccactttactcagtagaagtcccagaagaatcttcaagccttctccagtatgatctgattggacaaacagtatctagtgagacaattaaatctaacacaggtgaatacgttataatgacagtttacttccacttgcaaaggaagatgggctacttcatgatacagatatacactccttgcattatgacagtcattctttcccaggtgtctttctggattaataaggagtccgtcccagcaagaactgtttttgggatcaccactgttttaactatgaccactttgagcatcagtgcccggcactctttgccaaaagtgtcatatgccactgccatggattggttcatagctgtttgctttgcattcgtcttctctgcgcttatcgagttcgcagctgtcaactactttaccaatcttcagacacagaaggccaaaaggaaggcacagtttgcagccccacccacagtgacaatatcaaaagctactgaacctttggaagctgagattgttttgcatcctgactccaaatatcatctgaagaaaaggatcacttctctgtctttgccaatagtttcatcttccgaggccaataaagtgctcacgagagcgcccatcttacaatcaacacctgtcacacccccaccactctcgccagcctttggaggcaccagtaaaatagaccagtattctcgaattctcttcccagttgcatttgcaggattcaaccttgtgtactgggtagtttatctttccaaagatacaatggaagtcagtagcagtgttgaatagcttgcggccaggacaacctgaattctataagttcttgttttctgtttcctatgttttcttaaaaaatagcattgagacttgtgtagatgcttctcagaacatgaaatcaaattggaaatctgtaacgcagcttccgtaagcatgtgtgggcaaaaaagcaataatcctactcctcaaaatagaaagttgaagattgctgaaaaatatgacttttctgtatgttagagaaaaactttatgaggatgaaatgggttcaagatgaatttgtcaacttttgtcttccattgttcagtatttttaattgtcactgtaaataacatttaccacaaggcagataaaataagaaatgctgacacttccaaaggttgccttaaaatatgtttattttggcttagttcccgagagggcaaaatataaatacagtctaaatatttatcagtaggttaataccagcatgttggaggcctttatgctagtaaaatggctttcagtggcattgtaaagcctacattgagcttagccatttgtttttaacctcgctgtgctcttttacctcaataaaatgtggtgtttgtatacatataaattatacatagctcataaattatgtatgcatatgtacatagctgtagttggactaaaattcagtgtgttttatcctactaaattctccttttaaaataatacacttaccataattctatgaggttgtagaaaaaagtactcattataaggaagccttgtatattatgactatggttatctcttgtgttttccacatttccaattataacactaaataaaacaacaataaacatg

SEQ ID NO: 91 - DNA, 2067 bp, Homo sapiens
aagacctggagtacctcggagctgcgacctccagttcacaataccacctgcctcacacccgggctcatcttttcatcccacacccaccacccccctctccgttcacggtgtcccgggaggctgcgacctgcgtagatgatttagcagactgcccctgcccatgctcctgctcctgctcctcctcctcctcttccccgctctctccctctcgcctcctcttccagtccaggcgcccagactcggcgaagcgcagcgcctgccaccagcggtgcctcgggctgcccggcgcgccgcgctcccaggttctgtctcgccgcaccccggcgggcactggcgcgggcaaggacgctggcggggagaacgccctgggctcaacgtactccagaatcgaatgttgagagaagcagtgctctgatccagctcaggagaaaaaggagcgggttccgagtgagacttctggagccagctggacgtgccggtttgcccagtgcggcgcggctgcacgcaccgtccacaaggaaccttcactcagaagaaatgctgtggcccttccctttaccaacagaaaatggaacacaagagaccacatagctgaacaaattatagcctccttacaagtgagaaaccttcgaggctacatagttttcagccaaaggaaaataaccaacagcttctccacagtgtagactgaaacaagggaaacatgaacatcacaaactgtaccacagaggccagcatggctataagacccaagaccatcactgagaagatgctcatttgcatgactctggtggtcatcaccaccctcaccacgttgctgaacttggctgtgatcatggctattggcaccaccaagaagctccaccagcctgccaactacctaatctgttctctggccgtgacggacctcctggtggcagtgctcgtcatgcccctgagcatcatctacattgtcatggatcgctggaagcttgggtacttcctctgtgaggtgtggctgagtgtggacatgacctgctgcacctgctccatcctccacctctgtgtcattgccctggacaggtactgggccatcaccaatgctattgaatacgccaggaagaggacggccaagagggccgcgctgatgatccttaccgtctggaccatctccattttcatctccatgccccctctgttctggagaagccaccgccgcctaagccctccccctagtcagtgcaccatccagcacgaccatgttatctacaccatttactccacgctgggtgcgttttatatccccttgactttgatactgattctctattaccggatttaccacgcggccaagagcctttaccagaaaaggggatcaagtcggcacttaagcaacagaagcacagatagccagaattcttttgcaagttgtaaacttacacagactttctgtgtgtctgacttctccacctcagaccctaccacagagtttgaaaagttccatgcctccatcaggatcccccccttcgacaatgatctagatcacccaggagaacgtcagcagatctctagcaccagggaacggaaggcagcacgcatcctggggctgattctgggtgcattcattttatcctggctgccatttttcatcaaagagttgattgtgggtctgagcatctacaccgtgtcctcggaagtggccgactttctgacgtggctcggttatgtgaattctctgatcaaccctctgctctatacgagttttaatgaagactttaagctggcttttaaaaagctcattagatgccgagagcatacttagactgtaaaaagctaaaaggcacgactttttccagagcctcatgagtggatgggggtaaggggtgcaacttattaattcttgaacatacttggttcaggagagtttgtaagtatgtgtggtcttgtttccttgtttgtttgtttgttttgttctgttttgtttgaggattgttatttggcgtgctgttttctacctctggtcttatctgtgatacataatttcaaataaacattatcatacaaaaacaaaaaaaaaaaaaaaaaaaa

SEQ ID NO: 92 - DNA, 2980 bp, Homo sapiens
cgcaggcagcggctgggagcgcagcggcagcggcggcagcagaagctcggctcagcggctgggggtggccgctcgaatctgccagggcacctcgctccctcgcctctggcagcgggaccctgtgggcattgaaatccaactcactcatgcttatttcctgtaatggacaaacttgatgctaatgtgagttctgaggagggtttcgggtcagtggagaaggtggtgctgctcacgtttctctcgacggttatcctgatggccatcttggggaacctgctggtgatggtggctgtgtgctgggacaggcagctcaggaaaataaaaacaaattatttcattgtatctcttgcttttgcggatctgctggtttcggtgctggtgatgccctttggtgccattgagctggttcaagacatctggatttatggggaggtgttttgtcttgttcggacatctctggacgtcctgctcacaacggcatcgatttttcacctgtgctgcatttctctggataggtattacgccatctgctgccagcctttggtctataggaacaagatgacccctctgcgcatcgcattaatgctgggaggctgctgggtcatccccacgtttatttcttttctccctataatgcaaggctggaataacattggcataattgatttgatagaaaagaggaagttcaaccagaactctaactctacgtactgtgtcttcatggtcaacaagccctacgccatcacctgctctgtggtggccttctacatcccatttctcctcatggtgctggcctattaccgcatctatgtcacagctaaggagcatgcccatcagatccagatgttacaacgggcaggagcctcctccgagagcaggcctcagtcggcagaccagcatagcactcatcgcatgaggacagagaccaaagcagccaagaccctgtgcatcatcatgggttgcttctgcctctgctgggcaccattctttgtcaccaatattgtggatcctttcatagactacactgtccctgggcaggtgtggactgctttcctctggctcggctatatcaattccgggttgaacccttttctctacgccttcttgaataagtcttttagacgtgccttcctcatcatcctctgctgtgatgatgagcgctaccgaagaccttccattctgggccagactgtcccttgttcaaccacaaccattaatggatccacacatgtactaagggatgcagtggagtgtggtggccagtgggagagtcagtgtcacccgccagcaacttctcctttggtggctgctcagcccagtgacacttaggcccctgggacaatgacccagaagacagccatgcctccgaaagagggccaggtcctaagctgctgcttgtgcgcgactgcacccggtattctcttcacctgaggctttccgtccgccagtgcaggaacccggtgctcgctgggcttttcctctgagattccagcaggtggcgctggagggagtcaggggacataatggcctccttgttcactttttatttcccaacactccctcttcccagattctctgcttttgccgcgtggtctctggtgtctctgacatgttcccgtcactcactgtgtctgatctgtctcactcacgttctaagcacgatagcttgctgcgtcctatctcggtcactgatgtctccaaatacgccttctttgctgtgtgggcttccagatatcaacaaaatactccctctctgttcctgtcttagccagaggcgtcgctcctgtcttgcttacttgcttggtcacgtccgtcacagccatgttcaagctatcccctgcctcttcttcgccctgttctgtgccagacgctaacacacttttctccctgtgtctgggtccaaacgtgcatcctcttggttggcccccttgtcagtcccagacgtccacttgctcttccttatgtccaatgtctgtcctcctcttcaggacatgctccatttattttccatggaagacacagggtcagagatctgtcagaggaaaatggtctccacagcaactctggagggaagctgaagacagatagcttcctcctggtgtcctggccgctggcgtgtctgccctgagatgctcgctctcctgctgggctagaacgggacgtcttctaaaaagccttgggcagggctagcaacatcgtaggtgtttattaggcttcaggatctttcccatgaacttgtgatatcattttgaaacccttcaatctggctttgttgctgccaaaggagataactgttggaagttcacactggggaaactcattttcccctgcagctcccccaaggtgcaggagggcaggatccagcagcactggggatgccgaggcaatgctgtacttgaagccagaggacccaaattgccgccctggctgtgctgcaaacaagctgtgagatcttgaatagtgttctttcatctctggaccccactttccacatctgtgcactcaagcttggactagaggacctttaagttttctttctgtttctaagacaacagtatgctgctatagccgtctgctacctcgagaagccatggcctgcctgccttttggctttgtttcaaaggaacgaccctcctcatttgggccttttagacccctgacctttccagctttgtccttcagattaatctggatgtcttttattcaaagctgagtcagtggctcttgcgaatgccccatagcagaagtcccgggaaggtaaatgccaaacccagagccatgtgagattctgactttgatcttggctgtggtttaatagcatctcaggattatttatcatattctctttttttcttattgcttataaggtgtcagttattgtttccattgttgtttactttagttctggaactgaaaccgacaggaagaaactttggaataaggaagagaagattgaccaaaccatccaaatgccaaaaag

SEQ ID NO: 93 - DNA, 11242 bp, Homo sapiens; identical to SEQ ID NO: 2

SEQ ID NO: 94 - DNA, 2178 bp, Homo sapiens
gatgagcctctgtgaactactaaggtgggagggggctatacgcagaggagaatgtcagatgctcagctcggtcccctccgcctgacgctcctctctgtctcagccaggactggtttctgtaagaaacagcaggagctgtggcagcggcgaaaggaagcggctgaggcgcttggaacccgaaaagtctcggtgctcctggctacctcgcacagcggtgcccgcccggccgtcagtaccatggacagcagcgctgcccccacgaacgccagcaattgcactgatgccttggcgtactcaagttgctccccagcacccagccccggttcctgggtcaacttgtcccacttagatggcaacctgtccgacccatgcggtccgaaccgcaccgacctgggcgggagagacagcctgtgccctccgaccggcagtccctccatgatcacggccatcacgatcatggccctctactccatcgtgtgcgtggtggggctcttcggaaacttcctggtcatgtatgtgattgtcagatacaccaagatgaagactgccaccaacatctacattttcaaccttgctctggcagatgccttagccaccagtaccctgcccttccagagtgtgaattacctaatgggaacatggccatttggaaccatcctttgcaagatagtgatctccatagattactataacatgttcaccagcatattcaccctctgcaccatgagtgttgatcgatacattgcagtctgccaccctgtcaaggccttagatttccgtactccccgaaatgccaaaattatcaatgtctgcaactggatcctctcttcagccattggtcttcctgtaatgttcatggctacaacaaaatacaggcaaggttccatagattgtacactaacattctctcatccaacctggtactgggaaaacctgctgaagatctgtgttttcatcttcgccttcattatgccagtgctcatcattaccgtgtgctatggactgatgatcttgcgcctcaagagtgtccgcatgctctctggctccaaagaaaaggacaggaatcttcgaaggatcaccaggatggtgctggtggtggtggctgtgttcatcgtctgctggactcccattcacatttacgtcatcattaaagccttggttacaatcccagaaactacgttccagactgtttcttggcacttctgcattgctctaggttacacaaacagctgcctcaacccagtcctttatgcatttctggatgaaaacttcaaacgatgcttcagagagttctgtatcccaacctcttccaacattgagcaacaaaactccactcgaattcgtcagaacactagagaccacccctccacggccaatacagtggatagaactaatcatcagctagaaaatctggaagcagaaactgctccgttgccctaacagggtctcatgccattccgaccttcaccaagcttagaagccaccatgtatgtggaagcaggttgcttcaagaatgtgtaggaggctctaattctctaggaaagtgcctgcttttaggtcatccaacctctttcctctctggccactctgctctgcacattagagggacagccaaaagtaagtggagcatttggaaggaaaggaatataccacaccgaggagtccagtttgtgcaagacacccagtggaaccaaaacccatcgtggtatgtgaattgaagtcatcataaaaggtgacccttctgtctgtaagattttattttcaagcaaatatttatgacctcaacaaagaagaaccatcttttgttaagttcaccgtagtaacacataaagtaaatgctacctctgatcaaagcaccttgaatggaaggtccgagtctttttagtgttttgcaagggaatgaatccattattctattttagacttttaacttcaccttaaaattagcatctggctaaggcatcattttcacctccatttcttggttttgtattgtttaaaaaaataacatctctttcatctagctccataattgcaagggaagagattagcatgaaaggtaatctgaaacacagtcatgtgtcagctgtagaaaggttgattctcatgcactgcaaatacttccaaagagtcatcatgggggatttttcattcttaggctttcagtggtttgttcct

SEQ ID NO: 95 - DNA, 4247 bp, Homo sapiens
ctcatgctccctttttcgctctcttgagtacatgcacttgctttctctctcttgcttttcctctttctcaccttagctcctggcctcgggcgctgtctacaccccaccccatccctcgctctttgagaagcctctgtgcagtgcccaggtcctggcggcccagcttggaagttcctgtggtaccccttgagaggccctagggccacagcatttcctcccaggggtgacttggtagtgatacgctctgtttcttcacttctgcaattgccagacagcatagaggctgaggctggggccaggacccagacagagacacacggtcactgcagctgaagccgctgcccctgctacaggcaccaccaggaccagctgatcattccagcccacagcaatggagccacatgactcctcccacatggactctgagttccgatacactctcttcccgattgtttacagcatcatctttgtgctcggggtcattgctaatggctacgtgctgtgggtctttgcccgcctgtacccttgcaagaaattcaatgagataaagatcttcatggtgaacctcaccatggcggacatgctcttcttgatcaccctgccactttggattgtctactaccaaaaccagggcaactggatactccccaaattcctgtgcaacgtggctggctgccttttcttcatcaacacctactgctctgtggccttcctgggcgtcatcacttataaccgcttccaggcagtaactcggcccatcaagactgctcaggccaacacccgcaagcgtggcatctctttgtccttggtcatctgggtggccattgtgggagctgcatcctacttcctcatcctggactccaccaacacagtgcccgacagtgctggctcaggcaacgtcactcgctgctttgagcattacgagaagggcagcgtgccagtcctcatcatccacatcttcatcgtgttcagcttcttcctggtcttcctcatcatcctcttctgcaacctggtcatcatccgtaccttgctcatgcagccggtgcagcagcagcgcaacgctgaagtcaagcgccgggcgctgtggatggtgtgcacggtcttggcggtgttcatcatctgcttcgtgccccaccacgtggtgcagctgccctggacccttgctgagctgggcttccaggacagcaaattccaccaggccattaatgatgcacatcaggtcaccctctgcctccttagcaccaactgtgtcttagaccctgttatctactgtttcctcaccaagaagttccgcaagcacctcaccgaaaagttctacagcatgcgcagtagccggaaatgctcccgggccaccacggatacggtcactgaagtggttgtgccattcaaccagatccctggcaattccctcaaaaattagtccctgcttccaggcctgaagtcttctcctccatgaacatcatggactgagctgggggaagaagggatatctactgtggtctgggcaccacctctgtgggcactggtgggccattagatttggaggctacctcacctgggcagggatgatggcagagccaggctgttggaaaatccagaactcaaatgagccccttcatccgcctgtgggcgcatactacagtaactgtgactgatgactttatcctgagtcccttaatcttatggggccggaaggaatgtcagggccaggtgcagaccttgggggaagactttaaaccacctagttctccccgatggggcatcggtctaaagctttgggggagtgggcgcagtggctcacacctgtaatcccagcactttgggaggccgaggtgggcagatcatgggtcaagagatcgagaccatcctggccaacattgtaaaaccccatctctactaaaacatacaaaaattagccgggcatggtggcacacgcctgtagtcccagctactcaggaggctgaggcaggagaatcgcttgaacctgggaggcagaggttgcagtgaacctagattgcaccattgcactctagcctggcaacagagcgagattccatctcaaaaaaaaaaaaaaaaaaaaaaaaaaagctttgggcaactactctcaagtgatagaggtagactgggttaggaaaggacactgccctcactgtatggcactaccttggggcagacttttgagctaagatgttgccatcctctctccaccctccggcacaaggtctttgtgacctttctcaggggaaggggcttgatggaaccttctctgactcatctggcaacctgtccctaatggtgaccaaagaagataaaacatgaacagaccaaaagctaggacaagagcttgcttcccaagacagacgtgtctgtctgcaaaggccttgcctctagtccagtcagctctgggggagtgggaaggagatgcccacctcctctttctgtctcaacaatagtccctaattaagtaccttctgtggggcagccacccactgagggtgggcaaaggccccttgaaagcaaaattggggctgggctcagtggctcatgcctataatcccagcactttgggaggccaaggcaggcagatcacctgaggtccggagttcgagaccagcctggccaacgtggtgaaacgccatctccactaagaatacaaaaatatggctcatgcctgtaatcccagtactttgggaggctgaggtgggccgatcatttgaagttaggagtttgagaccagcctgaccaatatggtaaaaccccgtctctactaaaaatacaaaaaaattagcctggcgtggtggcgcatgcctgtagtcccataggctgtagctactgggaggaggcggagcttgcagtgagccgagatcacgccactgctctccagcctgggcgacagagtgagactctgtgtcaaaaacaaacaaacaaacaaaaaaggcaaaattggagctgtccaggccaggacaccccgatgtccaggggcttccatacgaacaggcacatgggctgggaagtacatgaggcccctgggtagaagggtctgtcagttctctcctcccttgccctctgggagggtcctcctaacatagcttccaggaggtgggaggagcagttactgtcagcaggtgtcagccaggtgtcagcttctcctggggatctctagatgtctgcttgtgatttttggcaagtatatgcaaatgagcctcctctcctgccctgagacaagtatctgcagtgtgaacctggcagcctcagacccaaggggctcagaggaaacttctctggtttctagagctctgtgctccttcagagaagtcttccttccttccagtcagtgtccctgtgaagctgggatactcatttcctgtgtaccgggcaaacaccggattgctgattttgagaaatgcctctcgatggacctgtaacctgctggagtctgggatggtagctgtgggctggacttggctgatgggatgacccggtggctagtgcagcatcacacaagcctggttcaagtcttggctgtgtcatttcctgctgagggaccaggcactgaatttcctacctcttagggtcattacctatgaggttaaagctacctcatgggattgttatacgccactaatgttgaggcagacacctcttggcagggtgactgctcatcttagaccctccccttttctgcgaatttgggccccttgatcctctgatgggagctgaaaggatgagaggtgggcatctagatttagggaggctgttcaggctttgcaggtcccttacctgaacacatagaaaccctggagctgtgactgtgtccatgtgtgtgtgtttgtctgtgtgtgttgcgggggatgggcacctgcatgaatgtggtagagaaaatggctctgctcagagggaagatacgcatagcaaggcagggaccagaggaatcacaggcgcctggagagcagccgggcaccgcctccagggacctgccggcttccctcagtcctccaggggcccagcactcttcctttaggccctgtgagcgtcccttgtcaggatacattctctcattttgctgaagctgatttgattgggtgtctgtttctcgcagccaaaagagctctgaatgaggaaagtgcttctgtgctaactccccgcgtctcctgaatttcagtcattcatgtacccgcctcgaaatttttgcaatatctgtgtaccaactgtccatttacttaataaagaagttttctttaaattaa

SEQ ID NO: 96 - DNA, 2389 bp, Homo sapiens
ggatgtccacggtggtctccgcgccggggcgggagcccaggggctgtgccggttgaaaactaagcatggggaagagctgcaaggtggtcgtgtgtggccaggcgtctgtgggcaaaacttcaatcctggagcagcttctgtatgggaaccatgtagtgggttcggagatgatcgagacgcaggaggacatctacgtgggctccattgagacagaccggggggtgcgagagcaggtgcgtttctatgacacccgggggctccgagatggggccgaactgccccgacactgcttctcttgcactgatggctacgtcctggtctatagcacagatagcagagagtcttttcagcgtgtggagctgctcaagaaggagattgacaaatccaaggacaagaaggaggtcaccatcgtggtccttggcaacaagtgtgacttacaggagcagcggcgtgtagacccagatgtggctcagcactgggccaagtcagagaaggtgaagctgtgggaggtgtcagtggcggaccggcgctccctcctggagccctttgtctacttggccagcaagatgacgcaaccccagagcaagtctgccttccccctcagccggaagaacaagggcagcggctccttggatggctgaagagctgccgttcctctttcacgatcccagccccatttcagtgtctggggctctggtagatgtgttgagggcaaagtagaggacaagctgtctttcccagtcagccagggagctccccgccaggccacgccccagccactttgctccctctcacctctgggaagtgcaaatactcttggttgacatccccttcctcagccctcccagcctactccccatcccagcttttagaggatctgctccactgtctcctggggcagttgtgggtcactgtcccttccagctgccccagacaggaagcagagtcaccacgcagcagtgtcccttcttgggtctgagttcctattataggtaggggccccaccctctgggcttcccatcagcgacacacacacacttatggcaccagcctggactccagaaaaagggtgtccaggtattgtgtgtatgcatttagttgtgcacacacaaatatgctcctatactggcattaggcgtctcctcatccctcaccctgacctttctcctgtccttttcttggctggaagaagttggcctcctgggagtgtagttttctgttttaaatcccccacccctggctgggctcagtggctcacccctgtaatcccagcactttgggaggccaaggcgggtcgattacttgaggtcaggagttcacgaccagcctggccaacattgtgaaaccccatctctgccaaaaatacaaaagttagccgggcgtagtggcacatgcctgtaatcccagctacccggggaggctgaggcaggagaattgcttgaactcagaaggcggaggctgcagtgagccgagatcgtgccactgcactccagcctggtcaacagagcaagactccatctcgaagaaaaaaaaaaaaaattccccacccctaccaattgttttacttcctcttcctgctcagggagcagatgggcctcactggttgagatggaatagaataactgggctatgagtcaccagcccactttgtgacccagcaagacctttcccctctctgggcatcagtttctcatctgtaagatgaccagagttgcttagatgatctcctagatcctttccagttctcttgatttcgtaaagccaatggcttctccctctttaaggtgctatgccaaccagccctggaggctgggatctgccgctccctccagccaccagggggcaggagtgcactacctgctgtcagtcaccagagtggccgctcagtgcccagcccgccagcctcgctcttggaggctgctctttatcctgcctgtggttttcagctcagagctggacttctatttataagttacctgtatttatatttatatgcccgctctcatggtgaaggctggacaaggtgctcctctggcccctccttcttacctcagatgcctgaacagaacaaggcaaacccgtagcagcctctcaggagctgacaggtcctctttcggggctcaggagggtgggcacacacccagcggcctgcagagtaagcttattacccacaactgtgcccgctttgtgcttctaaggtgcacacctagcctaggtgagacactgcagccaggcaaccaccgacacacgccccttctcaaagccagaggtgagtggggcaggtgcccggggctgggtgagtggaattaggacacacacaggcttgggcttcaagttcatttattgatgcattggttggacacaataaaaccacaattgttatcaaaaa

SEQ ID NO: 97 - DNA, 8931 bp, Homo sapiens
cttcccgcactgcttggggagagctggtgagcaagagtctggcccgagttagctagagctgttgccatgacaagcattttcttaagaaagctctgctgttgagatcgtccaaagctgggggctgggagggggggcacgaacttcgtggggcaccatccctccgaagagagcaagatcagagacacccgcccagctctcctgcaccctttttctttcaggaacctgagaggtccttcccattggaggggcagggggaggagacccagcccactccccggccttagccagaaaggcaagagagcaaagccagcgtctctagcttggttgccacactggggagactggtgggtggtcaccccaccctaccctcatccatggaaacccggagggagagtcccgcctgaagaaacctggatctttgctagaaagagagagatccagttgtcatcggtatccaggaagctctcctcttcctcctcctgacgtctactactacagttgctggttgttgctaaggttgctgccatggtaacatgcacatcctgtttacaccttcatctgggcaagttggtctaagctaggaacctacctaccctggacaactactatcatcaccacctggggacaccaatcatcgtgacacggagtccaccttccactcagttcccccatcctcttcctcctctcgctgccagacttcatacggaagaaaggatctagacttcggacggctactcgggagcttattgcacaagatatattcaatctattccctcactgggcccccagagaagcaagaagtaggaagaagttgagacagggaggcaggagacactggtcagttgaagggaaacgctacatcttctctggttgaggggcttggtaacagcaggcaaaatgacgaacccatcagaccgtgtcttgcctgccaactcgatggccgagagccgtgaaggggactttggctgcacagtaatggaactgaggaagctcatggagctgcgttcaagggatgcactgacccagattaatgtccactatggaggtgtacagaatctctgcagtagactgaaaacctcccctgtggaaggtctgtctgggaaccctgcagatctggagaaacgtaggcaggtgtttggacacaacgtgatcccccccaaaaagcccaagactttcttagaattagtgtgggaagctcttcaagatgtcacgcttatcatcctggagattgcagccatcatctccctggtcctgtccttttatcgccctgctggtgaagaaaatgaactgtgtggtcaagtcgcaactaccccagaagatgaaaatgaggcacaagctggctggattgagggggcagccatccttttctcagtgatcatcgtggtgttagtgactgcctttaatgattggagcaaagagaagcaattccgggggctgcagtgccgcattgaacaggagcaaaagttctccatcatccgaaacggtcaactcatccagctccctgtggctgagattgtggttggtgatattgcccaagtcaaatacggtgatctgctgcctgcagatggaatcctgatccaagggaatgatctgaagattgatgagagctctctgacaggggaatctgaccatgtcaagaagtccctggacaaagaccccatgttgctctcagggacccatgtcatggaaggttctggccggatggtggtgacagctgttggtgtcaactctcagactggaatcatccttactctcttgggggtcaatgaggatgacgaaggggagaaaaagaagaaaggtaaaaaacaaggagtccctgaaaatcgcaacaaagcaaagacccaagacggagtggccctggaaatccagccactcaacagccaggagggaatcgacaatgaggaaaaggacaagaaggcagtcaaggtgcctaaaaaggagaagtcagtgctgcagggcaagctgactcgcctggctgttcagattgggaaagccggtctgctcatgtctgctctcacggttttcatcctgattctatactttgtgattgacaactttgtgataaatcgcagaccatggctccctgagtgtactcccatctacatccagtactttgtcaagttcttcatcatcggcatcactgtactggtggtggctgtgccagaggggctgcctctggctgtcaccatctcactggcctactctgtgaagaaaatgatgaaagacaataacctagtacggcacttggatgcttgtgagaccatgggcaacgccaccgccatctgctctgataagacaggcacgttgaccatgaaccgcatgactgtggtacaagcttatattgggggcatccattaccgtcaaatcccaagccctgatgtcttcctgcccaaagtcctggacctcattgtcaatggcatttctatcaacagtgcttatacctccaagattctgcctccagagaaggagggaggcctgcctcggcaggtgggcaacaagaccgagtgtgctctgctaggctttgtcacagatctgaagcaggattatcaggctgtgcgtaatgaagtgcccgaggagaagctctacaaggtgtacacctttaactcagtgcgcaagtcaatgagcaccgtcatcaggaatcccaacggtggcttccgtatgtacagcaagggcgcctctgagatcatcttgcgcaagtgtaatcgaatcctggaccggaaaggggaagcagtgccattcaagaataaagacagagatgatatggtacgcactgtcatcgagcccatggcctgtgatggactccggactatctgcatagcttaccgggacttcgatgacacagagccctcttgggacaatgagaatgagatcctcaccgaactgacctgtatcgcggtggtgggcattgaggaccctgtgcgcccagaggtgccagatgctattgccaaatgcaaacaagctggcattactgtcagaatggtgacaggtgacaacatcaacacagcccgggccattgccaccaaatgtggcattctgacacctggggatgacttcctgtgcttagaaggcaaagaattcaaccggctcatccgcaacgagaaaggcgaggtagagcaagaaaagctggacaagatctggcctaagcttcgggtcctggcgcgatcttctcccactgacaagcacaccctggtgaaaggcataattgacagcactgttggggaacaccggcaggtcgtggctgtcactggtgatggcacaaatgacgggcctgctctgaagaaagcggatgttggttttgccatgggcatcgcaggcacagatgtagcaaaggaggcttcagacatcatcctaacagatgacaacttcaccagcattgtgaaggcagtgatgtggggacgaaatgtctatgacagcatctccaagttcctgcagttccagctcactgtcaatgtggtggccgtgattgtagccttcactggagcctgtatcactcaggattccccattgaaagctgtgcagatgttgtgggttaatctgatcatggacacttttgcttcattggccctggccacagagccccctacggaatctctgttgaagcggcgcccctatggccgaaataagcctctgatctcacgcactatgatgaagaacatcttgggccatgcattctatcagctcattgtcatctttatccttgtctttgcgggtgagaaattctttgatattgatagtgggaggaaggcacctctacattcaccacccagccagcactataccattgtttttaacaccttcgtgctgatgcagctcttcaatgaaatcaactcccgaaagatccatggagagaagaacgtcttttcaggcatctaccgcaacattatcttctgctctgtagtcttgggcacattcatctgccagattttcatcgtggaatttgggggtaaacccttcagttgtacaagcctcagcctgtctcagtggctgtggtgtctcttcattgggattggagaacttctgtggggccagttcatctccgcaatacctacccgatccctgaagttcctgaaggaggctgggcatggcaccaccaaagaggagatcaccaaggatgccgagggactggatgagattgaccatgctgagatggagctgcgccgaggccagatcctctggttccggggcctgaaccgtatccagactcagatcgacgtaattaacacattccagacgggagcctcttttaagggagtcctaaggcgacagaacatgggtcaacaccttgatgtaaaacttgttcctagttcatcctatgtagcagttgcaccagtcaaatcttcccccaccacttctgttcctgctgtttcatctcctcctatgggcaatcaaagtggtcaaagcgttccatagttccctccacgaaagcattcagaaaccctacaaccaaaagtccatccacagcttcatgacccaccctgaattcgccatagaggaggagttgccacgaacaccactcctggatgaggaagaggaggaaaatcctgacaaggcttctaagtttgggactagggtgctcctgttggatggtgaggtcactccatatgccaatacaaacaacaatgcggtggattgcaaccaagtgcagctcccccagtcggacagctctctacagagcctagagacatcagtttgaattttctttctctgactctcatccctattttacctatttccattttcgtctatcccatctatgaggtgatgatgggacttttcattgtcacgtcagctgctgtgttaacagcagtgtgtgtgaagtgaacctctacctgaccatgaagaggcaagagcacagacttacaaggatttcaacttaagcttgacttggggtttgtagcgggacccagtcaaaccccattcaggtcatggtagaatctactccttggtagtcacttgtcatttttaaagaaatgatgacaatcctcttggcatcaccccaccccacattctccccgatgttcctctcctgaattctggattttgtcctacaagtctgtgccatttataagctaagttgagggttcagagggagacaaatatccccaagtgaaatatgttgcggtagagatggaatgtataaaatccgccagtagtgtgattgtttttcaatttttcccactttgaaaacttacacctaaaggcctgtaggcctctaactctttctgccctttcattcaaacctctccaaagttctttgtcttttgtcttcccttcctttccttttttttttttttttttatgatgattaagaaaatggaaaggatatggatgaattgtgtaaacttagatccttctcccttttggcccaaaagaacccttgatttagttccagaatccaaccagtttctttgttaaaagggtccttttgaagcaattaagtgctggtaagaatatttctctgttgttgccaggttaccttctgcttttaaattgccatcttgtaaagtgtatgtggttcttaagtgccagggagatcagccttgcccatgaaggttgcatatgtgtggtatacagtttttacctgaaagcctgagctttctcttattcctaaagtggtggcaaaagaatgaactgggtatgaccctgcccccttactgggcttggatattgaggaccagacgctgccaaatctaggacaagacagaccatcaaagcagacttttgtgggctcctctttggggtgaccactgctttcaaagccatctgccaaggctctccagggcaggacctgactggtggggaatgagtgttcagaagccttgggagaggccaaagagccattctagcatgatctgagaaaaccttcctgcagaggccagaaaccttgagcttaggtgcctggggaccagcttcgacattctctccagtttctgattctaatttttgccacgtgtcacaacttttccagtctctgagaaggtcccagcctttctcaaatattctgattttgaaaatatgtatccaaagtgggaggcccctgtgacattttgccaacttaaacgagaaaaagaccccccgcacccggcacactcccccttcctccagccccgcttcagccacatgctccagctgctgcccagtaaagccctgtgcctttttttcccctgaatactgcccaaagcatccccttcccatctgcctctcaggagttggggactttgctaggagattttttaagtgttccttactgggacaacgtggagccacgtttgcaggagctccatttgtatccctgctggtgttgacttctgtgtaggggccagttcatgtccctgactctcacctcccattagataaatgaagcccacccccctttctagagtgatgagagtcaagaagaggggatgtatgaacggccaaattcccatgtgagaggaagatgacctgatccacctagccttttcttctggatctgtcctccctcacccctttcacctgagctgtccacagtaggaaacataaagaaacaatgtcccctacatatccccatgactacataatccatcatcgtaggaaataggaaagcaaatttgattttggttttgtaaaacgtacatgcttcaataattcttttttgtgtcttaaatactcataggggaaaaaaacagctcacccaaggtgttaggtttcacatatatattcatcaactattttagaagatttaattctatcaaatcttgtattacctcagatcattttaaatagcaagccaataacgagctttgaaggctattttaccattcctgttcacaaaaggttctcatggtgcctgacaggttacccttgagggcttgtgtctactttttaaaagtcaatggttttttttcttgtgttctagtttccataataggagagaaaatatagaaatatatgcaaaaattatagttttctttagatcagaaactgatatttttgggtcagccatatgtattttgtttaaaggatttaaaataaagtgccgtcatgtagccctgtggaagggagcacataaccagctgtttggcatgacaggtgacttagtatatttgtaattggttttaaaaccaatacaccatactttctttctgcaaacagccatctttatacttagggaagaaaaattgttgggttctagacttttttaatataaattttgttgatatggaattaggtaagtttaagtgtctatgtgcatatgttttttatataagttttttctattcagtttcactgatccaactggcagtgggtaaatatggcataagttaataacacttttccccaaaatggtgctttggatttgaaaagggtctgatggggagaaggagaacgtatcatcctagcttcctctcttaataaacctagaaaaacgggtagtaaactgtggatagtcaggaaaacacccagcaagggacacagctgtcaggaaatgaatcttccccccaacccccaccatgcagatggatagacagaatctttcctgactagtcattaggatcaggggcctctgttggatttgtgtttcttgaagaatagctggcagagtggtataaaagacacgaatatctcctggtctataaggatactctgatttggggtttgcatttttcatggtttttatttcctgttccccctggagttttccattagtgagtttttgtgcaaggatcttatttgtgatgccttccctcccctagaaagattttgtgcaatatattaaatggggacagaattctaaatggataaaacaatggctggttctagccctgagtgacagtcttaaggctagatccttcccatagtatcatctgtcctctggaatgactctcctgtccctaaaggggttaagagagagatcacctagaaatccctctggacacttgtgggttctttagggtttgagtttcttcttccccttgagcttcagagaggagagttggcatggttaaatctgaatggttacctcactgctgaaaacccagaggggcgtggcacactcgcttgtgtggaaaagcctctaaatgcatcccttcctttctttcctgcttcctttgccttacaattgaagcagcccgtggtaccatcacagtatgcagagacttcctcacctttcatatctagggaccacccccgatgcattggtgagggtgggcacttataaatgcctgctattgttaagccattccagcctcttcctctgaatagaccagacgccctttcacttagttcagtgccagtccttttgccttcccaaccctgctgttaggcctgctgttccctttgctcttgattaggagagatggaaggagatgagctcccataactgaattggcctttggttcatgttttctccccatatgtatatatgccatatgtgaatatgccatatatatgtgccaacaaatctatctacgttgttcttttcaaattagcacgcagataggaattttgagtttcttcttcttttagtaactagtataacaagcactggtatttttgtacaaaaaagaaaaacaaaagattgactattgtggtctgcatgacataaacaaacaaatggtgatatcaaagcaacgtataccccagtccagtgtgtgttgccataatttgcaattcagcttaacagtgcacccaatctatatttgcattttgatattatttaagctctatgtacaaggttttgcatgtatttatatggttcttagggaaaaaaaatgctataaactgcaaatctgaaattcaaatgtgttgttccactgagaccagaagaagaagaggagttttaaaagggataatttgttggagccaataaagctttttgctgatgaacagaaaccaatactgctgtgcactgagaataaaaactcatgcccacttgtaaaaaaaaaaaaa

SEQ ID NO: 98 - DNA, 3054 bp, Homo sapiens
agagagctaggtgcagagcttcaggctgaggcgctgctgagagggcctcgccccgcctctgccgccagctgcaccccactcctggaccaccccctgctgagaaggacagggagccaaggccggcagagccaaggctcagtcatgagaacacaaattgaagtgatcccttgcaaaatctgtggggacaagtcgtctgggatccactacggggttatcacctgtgaggggtgcaagggcttcttccgccggagccagcgctgtaacgcggcctactcctgcacccgtcagcagaactgccccatcgaccgcaccagccgaaaccgatgccagcactgccgcctgcagaaatgcctggcgctgggcatgtcccgagatgctgtcaagttcggccgcatgtccaagaagcagagggacagcctgcatgcagaagtgcagaaacagctgcagcagcggcaacagcagcaacaggaaccagtggtcaagacccctccagcaggggcccaaggagcagataccctcacctacaccttggggctcccagacgggcagctgcccctgggctcctcgcctgacctgcctgaggcttctgcctgtccccctggcctcctgaaagcctcaggctctgggccctcatattccaacaacttggccaaggcagggctcaatggggcctcatgccaccttgaatacagccctgagcggggcaaggctgagggcagagagagcttctatagcacaggcagccagctgacccctgaccgatgtggacttcgttttgaggaacacaggcatcctgggcttggggaactgggacagggcccagacagctacggcagccccagtttccgcagcacaccggaggcaccctatgcctccctgacagagatagagcacctggtgcagagcgtctgcaagtcctacagggagacatgccagctgcggctggaggacctgctgcggcagcgctccaacatcttctcccgggaggaagtgactggctaccagaggaagtccatgtgggagatgtgggaacggtgtgcccaccacctcaccgaggccattcagtacgtggtggagttcgccaagaggctctcaggctttatggagctctgccagaatgaccagattgtgcttctcaaagcaggagcaatggaagtggtgctggttaggatgtgccgggcctacaatgctgacaaccgcacggtcttttttgaaggcaaatacggtggcatggagctgttccgagccttgggctgcagcgagctcatcagctccatctttgacttctcccactccctaagtgccttgcacttttccgaggatgagattgccctctacacagcccttgttctcatcaatgcccatcggccagggctccaagagaaaaggaaagtagaacagctgcagtacaatctggagctggcctttcatcatcatctctgcaagactcatcgccaaagcatcctggcaaagctgccacccaaggggaagcttcggagcctgtgtagccagcatgtggaaaggctgcagatcttccagcacctccaccccatcgtggtccaagccgctttccctccactctacaaggagctcttcagcactgaaaccgagtcacctgtggggctgtccaagtgacctggaagagggactccttgcctctccctatggcctgctggcccacctccctggaccccgttccaccctcacccttttcctttcccatgaaccctggagggtggtccccaccagctctttggaagtgagcagatgctgcggctggctttctgtcagcaggccggcctggcagtgggacaatcgccagagggtggggctggcagaacaccatctccagcctcagctttgacctgtctcatttcccatattccttcacacccagcttctggaaggcatggggtggctgggatttaaggacttctgggggaccaagacatcctcaagaaaacaggggcatccagggctccctggatgaatagaatgcaattcattcagaagctcagaagctaagaataagcctttgaaatacctcattgcatttccctttgggcttcggcttggggagatggatcaagctcagagactggcagtgagagcccagaaggacctgtataaaatgaatctggagctttacattttctgcctctgccttcctcccagctcagcaaggaagtatttgggcaccctaccctttacctggggtctaaccaaaaatggatgggatgaggatgagaggctggagataattgttttatgggatttgggtgtgggactagggtacaatgaaggccaagagcatctcagacatagagttaaaactcaaacctcttatgtgcactttaaagatagactttaggggctggcacaaatctgatcagagacacatatccatacacaggtgaaacacatacagactcaacagcaatcatgcagttccagagacacatgaacctgacacaatctctcttatccttgaggccacagcttggaggagcctagaggcctcaggggaaagtcccaatcctgagggaccctcccaaacatttccatggtgctccagtccactgatcttgggtctggggtgatccaaataccaccccagctccagctgtcttctaccactagaagacccaagagaagcagaagtcgctcgcactggtcagtcggaaggcaagatcagatcctggaggactttcctggcctgcccgccagccctgctcttgttgtggagaaggaagcagatgtgatcacatcaccccgtcattgggcaccgctgactccagcatggaggacaccagggagcagggcctgggcctgtttccccagctgtgatcttgcccagaacctctcttggcttcataaacagctgtgaaccctcccctgagggattaacagcaatgatgggcagtcgtggagttgggggggttgggggtgggattgtgtcctctaaggggacgggttcatctgagtaaacataaaccccaacttgtgccattctttataaaatgattttaaaggcaaaaaaaaaaaaaaaaaaaa

SEQ ID NO: 99 - DNA, 3716 bp, Homo sapiens
cccgaggagccgggccccggccgctgtccagccgctccgtgccccgcgcgtcctgcgccgccgccaccgcctcctggggagacgcagccacttgcccgccatggatactcccagggtcctgctctcggccgtcttcctcatcagttttctgtgggatttgcccggtttccagcaggcttccatctcatcctcctcgtcgtccgccgagctgggttccaccaagggcatgcgaagccgcaaggaaggcaagatgcagcgggcgccgcgcgacagtgacgcgggccgggagggccaggaaccacagccgcggcctcaggacgaaccccgggctcagcagccccgggcgcaggagccgccaggcaggggtccgcgcgtggtgccccacgagtacatgctgtcaatctacaggacttactccatcgctgagaagctgggcatcaatgccagctttttccagtcttccaagtcggctaatacgatcaccagctttgtagacaggggactagacgatctctcgcacactcctctccggagacagaagtatttgtttgatgtgtccatgctctcagacaaagaagagctggtgggcgcggagctgcggctctttcgccaggcgccctcagcgccctgggggccaccagccgggccgctccacgtgcagctcttcccttgcctttcgcccctactgctggacgcgcggaccctggacccgcagggggcgccgccggccggctgggaagtcttcgacgtgtggcagggcctgcgccaccagccctggaagcagctgtgcttggagctgcgggccgcatggggcgagctggacgccggggaggccgaggcgcgcgcgcggggaccccagcaaccgccgcccccggacctgcggagtctgggcttcggccggagggtgcggcctccccaggagcgggccctgctggtggtattcaccagatcccagcgcaagaacctgttcgcagagatgcgcgagcagctgggctcggccgaggctgcgggcccgggcgcgggcgccgaggggtcgtggccgccgccgtcgggcgccccggatgccaggccttggctgccctcgcccggccgccggcggcggcgcacggccttcgccagtcgccatggcaagcggcacggcaagaagtccaggctacgctgcagcaagaagcccctgcacgtgaacttcaaggagctgggctgggacgactggattatcgcgcccctggagtacgaggcctatcactgcgagggtgtatgcgacttcccgctgcgctcgcacctggagcccaccaaccacgccatcatccagacgctgatgaactccatggaccccggctccaccccgcccagctgctgcgtgcccaccaaattgactcccatcagcattctatacatcgacgcgggcaataatgtggtctacaagcagtacgaggacatggtggtggagtcgtgcggctgcaggtagcggtgcctttcccgccgccttggcccggaaccaaggtgggccaaggtccgccttgcaggggaggcctggctgcagagaggcggaggaggaagctggcgctgggggaggctgagggtgagggaacagcctggatgtgagagccggtgggagagaagggagcgcagccttcccagtaacttctacctgccagcccagagggaaatatggattttcacaccttgcctggccaccctggaaaaacaagccaaggaggatttcttttgttctgttttctctctctctctctctctctctctctctctctctctctctctctctattactgtggctttggatttccttatgtgtcttacaggctttgatagaaggggaggggaggagagatgcatacccgtttctcaactgctccatggattgaaaaaataacagtttaaaaagggaaacaatgtgggaggaagaatcaccgttgacgcatcttgatttggttggtttttacatgtgtaaagaaggtggggtctctggccatgtcatagcccatgtcttgtgccctcccacacagaaagtgttagatagggaaattggcaaaaagaatagttaagtcaggaatggtcctgcctatagaagagctttgagagaggtgggcccacgggtgcccctctcacccatttgtgtactctgtgagtttaccagctctgccctggcctctttcggtaccaggaactggcaaccttcatctcactcctgagggcccaggtctctgccttcattgttgctttttctggtgggggcaaggggagctggtatggatggaatgacaagaattagtccaaatggaaccccttgaaggataatgagaaaccacaaggcctgcctctgactggggctgacacggaggtgcattagcccaggctggaggtagcccacccaaatgccctttctgattctaattgatttctttcaacagaatttgccaaaattcagacatgcacttctaaggggaaggtgattttccagttcaaaaaaatgggcaggagtggggaacaaaacaattaacgtaagagctacaaaggagggaaaaggaaccaagaagtagaaggagtcccatcaggagggaagatggtgggcctcagggaggatggggatcaagggacaggccaggagccaggagtggggaagggagggatgaaaggggacacaagtccctgtctctgaagtttctttaaaatctgagttccctcccctctctttgacattcctgaaagattaccagccagcaatagcccagggctcccccaaaagaattggttcagattgtaattatcagttaggcaatgtttttaaaacttagtaatgagaaactgtgaaaagagccaagtgttacattgagcttggggtgggagatggggaacaggcagtgaggaaggagacaggggtggaattcgtcttctgggaggaagctggagagagcacagtgaaattgaaatacccattcccagatagtcaaaaacatgaactttcccccagcctgcaccagtattgttttcaaacattgcccatgagtaggccctttgaagagttagcttcctcctcatctttgactataaaattgtttaatcaatggaatttgtaccagccttttaaaaagttttagtttttcctaagtgattttgctctcttccaatctaaacctgttgcttgtttggttcagagaactacaaactgtcaaagaaagggtggggatgataagaaatgctaatataaaaatgctaagtgaaaaaaagacttggccaggagaaataatttaaaatgcacatttgctttggatgcactgttgttctgttaaggctgtatatatttgtttatttaaggtgactgaaagtgcaaagaggaaatggacagcatgcaattcatcctaatgtacaaaacgttatatgcactcaaatgttataatttctaatatttttaaagtttatattcgagttgtacaaagttaagcattaatcagatatttcattttttcataatgttaccattttcttaaatattattacaaaattttaagtctgtctaatggagagttttttttaaactgtctacctcatataatacaagtatttacaacgctaaagttaccagaggtcaatgaataatcaaaacattttttacagtacacctttcctggatgatatgcaatcgaatgctatattattaaacgcatttttctccttaataaaaaaaaaaaaaaaaa

SEQ ID NO: 100 - DNA, 6435 bp, Homo sapiens
aaagggggcggcagcgccggcggagcggaggcgggtctcacgtgggccagcgcagagcctgcggaagggacggatgcggatctcgtcgctgtcaccttgaaagtgaccgaggggcttgactgtggactccttacgccgcccacccgggcccggcggtcccagccttctcgcagggccccttctcagcagaagcaagcggggccgagaaagcgggtggaatagggttgctgcaggtcccaaagacccctcgtggcgcctcgctactttctgcagcttgtttgcactttttcacgctctagaaaaatctcatcttaattaagggaacaacaaatcatttaatcttcagagcatcttagactgaaaacctttcaactgtgctgaaaaacctagaagacagaccattttgcccaccctctcatttaaaaggaattgaagaagaaataaaatggcagaggtttaaggttactattcaggatgactgatgataattcagatgataaaatagaagatgaattgcaaaccttctttaccagtgataaagatggaaatacacatgcatacaacccgaaatcaccacctacacaaaactcttcagccagcagtgtgaactggaattctgccaacccagatgacatggtggttgattatgaaactgaccctgctgtagttactggtgaaaatatttctttaagccttcagggtgttgaagtatttggtcatgaaaagtcttctagtgatttcattagtaagcaggtgttagatatgcataaagattctatttgtcagtgtcctgcacttgtaggtactgagaagcccaaatatctgcaacacagttgtcattccctagaagcagttgagggccagagtgttgagccatctttgccttttgtgtggaagcctaatgacaatttgaactgtgcaggctactgtgatgccttggagctaaaccaaacatttgacatgacagtggataaagttaactgcacctttatatcacatcatgccatcggaaagagtcagtccttccatactgctggaagcctgccaccaactggtaggagaagtggaagtacatcttctttatcctattccacttggacatcttcccattctgataagacgcatgcaagagaaactacttatgatagagaaagctttgaaaaccctcaagtcacaccatcagaagcccaagacatgacttacacagcattttctgatgtggtgatgcaaagtgaggtttttgtttcagatattggaaatcagtgtgcatgttcttcaggaaaggtcaccagtgagtacacagatggatcacaacaaagactagttggagaaaaggagacacaagcactaacaccagtttctgatggcatggaagtccccaatgattctgcattacaagagttcttttgtttatcccatgatgaatccaatagcgaaccacattcacagagctcatacaggcacaaggaaatgggccaaaatctgagagagacagtgtcctattgtcttattgatgatgaatgccctttaatggtgccagcttttgataagagcgaagctcaagtgctgaacccagagcataaagtcactgagactgaagacacacaaatggtctccaaaggaaaggatttgggaacccaaaatcatacctcagaattgattctaagtagcccgccaggacaaaaggtgggctcgtcatttggactgacttgggatgcaaatgatatggtcattagcacagacaaaacgatgtgcatgtcaacaccagtcctagaacccacaaaagtaaccttttctgtttcaccgattgaagcgacggagaaatgtaagaaagtggagaagggtaatcgagggcttaaaaacataccagactcgaaggaggcacctgtgaacctgtgtaaacccagtttaggaaaatcaacaatcaaaacgaataccccaataggctgcaaagttagaaaaactgaaattataagttacccaagaccaaacttcaagaatgtcaaagcaaaagttatgtctagagcagtgttgcagcccaaagatgctgctttatcaaaggtcacgcccagacctcagcagaccagtgcctcatcaccctcatcagtgaattcaagacaacaaacagtcttgagcagaacaccgagatctgacttgaatgcagacaaaaaagcagaaattctaattaacaagacacataagcagcagtttaataaactcattactagccaggctgtgcatgttacaactcattctaaaaatgcttcacacagggttccaagaacaacatctgccgtgaaatcgaatcaggaagatgttgacaaagccagttcttctaactcagcatgcgagaccgggtccgtttctgcgttgtttcagaagatcaaaggcatactccctgttaaaatggaaagtgcagaatgtttggaaatgacctatgttcccaacattgataggattagccctgaaaagaagggtgaaaaagaaaatgggacatctatggaaaaacaagagctgaaacaagagattatgaatgagacttttgaatatggttctctgtttttgggctctgcttcaaaaacaacgaccacctcaggtaggaatatatccaagcctgactcctgcggtttgaggcaaatagctgctccaaaagccaaagtggggccccctgtttcctgtttgaggcggaacagtgacaatagaaatcccagtgctgatcgagccgtatctcctcagaggatcaggcgtgtgtccagttctggaaagcctacatccttgaaaactgcacagtcgtcatgggtgaatttgcctagaccacttcctaaatccaaagcatctttgaaaagtcctgcgctgcggaggacaggaagcaccccctcaatagccagcacccacagtgagctgagcacttacagcaacaattctggtaatgccgctgtcatcaaatatgaggagaaacctccaaaaccagcatttcagaatggttcctcaggatccttttatttgaagcctttggtatccagggctcatgttcacttgatgaaaactcctccaaaaggtccttcgagaaaaaatttatttacagctcttaatgcagttgaaaagagcaggcaaaagaatcctcgaagcttatgtatccagccacagacagctcccgatgcgctgccccctgagaaaacacttgaattgacgcaatataaaacaaaatgtgaaaaccaaagtggatttatcctgcagctcaagcagcttcttgcctgtggtaataccaagtttgaggcattgacagttgtgattcagcacctgctgtctgagcgggaggaagcactgaaacaacacaaaaccctatctcaagaacttgttaacctccggggagagctagtcactgcttcaaccacctgtgagaaattagaaaaagccaggaatgagttacaaacagtgtatgaagcattcgtccagcagcaccaggctgaaaaaacagaacgagagaatcggcttaaagagttttacaccagggagtatgaaaagcttcgggacacttacattgaagaagcagagaagtacaaaatgcaattgcaagagcagtttgacaacttaaatgctgcgcatgaaacctctaagttggaaattgaagctagccactcagagaaacttgaattgctaaagaaggcctatgaagcctccctttcagaaattaagaaaggccatgaaatagaaaagaaatcgcttgaagatttactttctgagaagcaggaatcgctagagaagcaaatcaatgatctgaagagtgaaaatgatgctttaaatgaaaaattgaaatcagaagaacaaaaaagaagagcaagagaaaaagcaaatttgaaaaatcctcagatcatgtatctagaacaggagttagaaagcctgaaagctgtgttagagatcaagaatgagaaactgcatcaacaggacatcaagttaatgaaaatggagaaactggtggacaacaacacagcattggttgacaaattgaagcgtttccagcaggagaatgaagaattgaaagctcggatggacaagcacatggcaatctcaaggcagctttccacggagcaggctgttctgcaagagtcgctggagaaggagtcgaaagtcaacaagcgactctctatggaaaacgaggagcttctgtggaaactgcacaatggggacctgtgtagccccaagagatcccccacatcctccgccatccctttgcagtcaccaaggaattcgggctccttccctagccccagcatttcacccagatgacacctccccaaagtccacagactctctgaaagcattttgatgcaggtctgcaggactgaccccaaggaggaacgtgggcacaagaggtatatcagcacacgtgtgatcaccgtagggtaactggagcgtcaccaccggcggaatcgcagcttctgagactggaactctggaggaagacttttgcctccgtccaaaagattcctccaaaaaaagatttaaaaaaagatttcggcatcgacacggacgttgttgcacaaagcacttaaagaacgagagcatcttgttcattgcctttttcacctaagcatagggggaaaaactctcagggccctattaagatttataacctttgtaatgttcttcaccacagacaccttcttgtgagttttcagtctgactgtgggggtggggggtgtgaatgaaatggatgtcacagagtgtcatgtgtctgatgcagcctcctctgctgtgtattaaatgtcaaaatctgaatatatctggatatgtactaatcaaataataatcaatcaatcagcatatacatttcagccaaagccatagaagaaaaagcaatagttgcttgaattatgatcatctaccaccaactctgctcagccctgtaacagggtagggagagggtataacaggaagagctttgacttgtccctgtctatacattctctgtatcttttgggggtaacttcttggcagtttttcagtgttcagccatgtcagttgaaactagatttttctgtagattttttacttacccatgtgagcctaacactatcctgtaattcattttctcaggctatgtgtaaatgtagaaccctaatttttctataaaaaaacaaactaactaactaactgtgtaaagaaagaaaaagggaagtaccaatgggtttttccaccttatttttacctttgatctacccttgcagatttaacctgtcttcttccctcccattattctcattttccttttacctttctccaccatccagagccacaaaagcaaaccttctacctcctacctacttttctctgggacaaggataaaggaatatgattttccagagccccagagccagctcatcttccaggtgctgaaaccactttccaaataaactaaagcctggatttgatattacaaattttgggaaatcttagaataaagaacgagaacaaggaagtcattggctagtataattaagaaaggtaggattcagtgcttaccgatgatgcagtacttgatagaagaaaacagtctgggaggatagcgctcatttttcagttaccctttaaggagtccctttgtctttgggaaagtagcagaatggtccgcttctttcccatgagtggaaaatgtggcttgtccaactctcctccaggttgcatttcagtttctttccaaaacttattacctcccctaatcctgagactttggaaaaggtggaaggaagaactgttgctttatctccccctccctgcatgtgtcaacattgtgatgtcagtatttactaatctacattcagtggctgtacaaataacagctgtagtaagaagagattcaggatgctagaggtgaatatttgggtcatttacatgtacactacatagcaagttgatactcatgttgcatgttcttttaaattagtgattttgtgtcttaagtctttaacttccaatacttcatcatgtatgtaaccttccatgtttgcttctgataaatggaaatgtaggttcactgccacttcatgagatatctctgctcacgcttccaagttgttctcaatgacattagccaaagttgggtttgccattcatcccctaggcatggtaaatcttgtgttgttccctgctgtcctccgtattacgtgaccggcaaataaatctcatagcagttaatataaaacatctttggaggatgggagagaacaggagggaagatgggaaacaaaatagagaattcttaagattttgtttaaaccaaatgtttcatgtagaatgcaaaatgttggcacgtcaaaaatatgaatgtgtagacaactgtagttgtgctcagtttgtagtgatgggaagtgtattttactctgatcaaataaataatgctggaatactcaagaattgcaaaaaaaaaaaaaaaaa

SEQ ID NO: 101 - DNA, 9965 bp, Homo sapiens
gcgccgcctccttcggcgttcgccccacggaccggcaggcggcggaccgcggcccaggctgaagctcagggccctgtctgctctgtggactcaacagtttgtggcaagacaagctcagaactgagaagctgtcaccacagtagcttggagctcggcggcacaaccagcaccatctggtcgcgatggtggacacggaaagcccactctgccccctctccccactcgaggccggcgatctagagagcccgttatctgaagagttcctgcaagaaatgggaaacatccaagagatttcgcaatccatcggcgaggatagttctggaagctttggctttacggaataccagtatttaggaagctgtcctggctcagatggctcggtcatcacggacacgctttcaccagcttcgagcccctcctcggtgacttatcctgtggtccccggcagcgtggacgagtctcccagtggagcattgaacatcgaatgtagaatctgcggggacaaggcctcaggctatcattacggagtccacgcgtgtgaaggctgcaagggcttctttcggcgaacgattcgactcaagctggtgtatgacaagtgcgaccgcagctgcaagatccagaaaaagaacagaaacaaatgccagtattgtcgatttcacaagtgcctttctgtcgggatgtcacacaacgcgattcgttttggacgaatgccaagatctgagaaagcaaaactgaaagcagaaattcttacctgtgaacatgacatagaagattctgaaactgcagatctcaaatctctggccaagagaatctacgaggcctacttgaagaacttcaacatgaacaaggtcaaagcccgggtcatcctctcaggaaaggccagtaacaatccaccttttgtcatacatgatatggagacactgtgtatggctgagaagacgctggtggccaagctggtggccaatggcatccagaacaaggaggcggaggtccgcatctttcactgctgccagtgcacgtcagtggagaccgtcacggagctcacggaattcgccaaggccatcccaggcttcgcaaacttggacctgaacgatcaagtgacattgctaaaatacggagtttatgaggccatattcgccatgctgtcttctgtgatgaacaaagacgggatgctggtagcgtatggaaatgggtttataactcgtgaattcctaaaaagcctaaggaaaccgttctgtgatatcatggaacccaagtttgattttgccatgaagttcaatgcactggaactggatgacagtgatatctccctttttgtggctgctatcatttgctgtggagatcgtcctggccttctaaacgtaggacacattgaaaaaatgcaggagggtattgtacatgtgctcagactccacctgcagagcaaccacccggacgatatctttctcttcccaaaacttcttcaaaaaatggcagacctccggcagctggtgacggagcatgcgcagctggtgcagatcatcaagaagacggagtcggatgctgcgctgcacccgctactgcaggagatctacagggacatgtactgagttccttcagatcagccacaccttttccaggagttctgaagctgacagcactacaaaggagacgggggagcagcacgattttgcacaaatatccaccactttaaccttagagcttggacagtctgagctgtaggtaaccggcatattattccatatctttgttttaaccagtacttctaagagcatagaactcaaatgctgggggtaggtggctaatctcaggactgggaagattacggcgaattatgctcaatggtctgattttaactcacccgatgttaatcaatgcacattgctttagatcacattcgtgatttaccatttaattaactggtaacctcaaaattcgtggcctgtcttcccattcaccccgcttttgactattgtgctcctttataattctgaaaactaatcagcactttttaacaatgtttataatcctataagtctagatgtatccaaaggtgaagtatgtaaaaagcagcaaaatatttatttcaaagacttcacttctgtttcctgaatctaaagaaagacaacatgctgctttttaatcataggatggagaattttaaagaactgtttgggccaggcacagtcgctcatacttgtaatcccagcactttgggaggccgaggcgggtggatcacaaggtcagcagatcgagaccatcctggccaacatggtgaaaccctgtctctactaaaaatacaaaaattagccgggtgtggtggcacatgcctgtaatcccagctactcgggaagctgaggcaggagaattgcttgaaccagggagttggaggttgcagtgagctaagactgcaccactgcactccagcctggtgacagaacgagactctgtcttaaaaacaaacaaacaaaaaaaaaatctgttagataagctatcaaaatgcagctgttgttttgtttttggctcactgttttcgtggttgtaactaatatgtggaaaggcccatttccaggtttgcgtagaagagcccagaaaacagagtctcaagacccccgctctggactgtcataagctagcacccgtggtaagcgggacgagacaagctcccgaagcccgccagcttcctgctccactcagctccgtccagtcaacctgaacccacccagtccagctgtctgtgggaatggtggtgttcttagggacagactgacaccttacttgtcagtgttcctccgggccccatttggcagctcccgtatcttttgttatgttgcttttaaagatatgatgttttattgttttaactcttggtgacagtagatgctctctggagcgcagacgaggcacatgtgtcttcatagcctgggctgggtgggagccagtcaccctgcggatcgagagagggggtagagtcttcttcaaatggcagttttacttcaaatggcagatttcacaagagttggttattttttacaatggtttaggttgttaagtctcctttgtatgtaaggtagttttttcaacatctaaaatttttgttttagccttcaaaaccaacttaccaacctcagtccagctgggaaggcagcgttgattatggtagtttgtcaagaatatatggacctggaaacactttctctctctgtccacctggtagataaattgtcctgttgagaatttttagatctggactggaactgccaggaccaccgcctccagggagtcgctgggcacctggaggtatcgtcgatgcctctcccccatctttagaaaatttggctcttctgaggtcattattattttaagaatgattaggattgataagggtcccatgaccagcattatgaaaatgcgagagtgggaaggacacagtgtgagacttccactagaaaaaagtgaaagttagggttaggacatccttttttaaaaattacaaatttagtccgttttggtttttgtaatcaggctaggcacagtggctcacacatggaatcccagcactttgggaggccgaggtgggaggatcacttgagcccaggagttcgagaccagcctaggcaacatagcaagaccctgtctgtacacaaaatttaaaaattagttcatcggggtggcacacatcagtagtcccagctactctgcaggctgaggtgggaggattgcttgaacccaggaggtcgaggctgcagtgagctgtgatctcaccactgcattccagcctgggtgacagagttagattccaccctctcccaccccggcaaaaaaaaaaaaaaaagatgcaatcaaaggggctgttggccagcaatggcagcagcagcggcgggcagtctgcccaagtgtcttaggaaccaaaagcaaataaaagtgtttccatatatgccaccagccaagtggccatcctaattcagaaagaagctagcctttgagtgtctgtcatggtgcatccgtttcagtattatttcctaaaatgagaagcccctgtgtcaacaagatccaggggctggagcccaatgccaagcctgtgttgtccccagcgaccctgcagctgctcgctctgatgtaccctgtgccattcaaggagatgtggtccaggaaagtgagcctcatggttttcagagaagtcattgttctgtttacattttcataaaacctgtttaaaatagctccccgtctcaggctttcagcagtaacagtgagctgactggcaagttcgatgttagctcccgggacactcagcagcgatggtgagcattttggtttccttaaggcccagcaagacttccagggacatctctggtgaagccagaatggagacacccgtgacctcaggctgaaagtcactcgacattggtctcttgtgttgatagggaaggaaatcaggcattcctatttctttaaataacaaaaccactaattgccactcaatgctggaatattttgggtcacctaatcatagatttctcagggcatcaatactcaaatataggctgattatgccccagttcaaatgggaactattaacagagtgcatttcttgcttgctgggtttcaacagacatcagccaaaagaacaaaagagatgtcaggacagattccaggagtgtcggagcacatgtgtggcacccgctccctctggcagcgaatgtaggaagtcgccaaatttacccactcttcaacaagtcattgtttaaacacggtttttcattttctcaacttttaatagcaaaaagtgccaaagtcctcagagacctaacagccttggtctaccgtgctgaccagggtgaaggcacggcgagggactcctcccagacgtgcctcttgtgtgccagctggctgtggctcgggagcagacgcaggcctctccattgtccaggggagcctggcggcgcatccctcctctcccacctcctggcacttccagctgggtgtcccacatgttggattccgtccccaccacacttccagagaccggagaactgtgcagggcctaaggccgtttggatgaattgtcaaaacaagatgcttccagttacagcggcaggagcgggactgggagcacgggctgacggctgctggtgcctttcttcccacctcgcttgcctgtttccgcttgacccttcctccagctccgatgagaagagtataaagcatcttcctaacgggtgtgtttgctatacgaacataatggacgtgaagtggggcagaaacccagaactcagcattcaaggatgcccaggagagctgtccctgttttaaagagctgtgttttgttttgtttcgcatttagagagcagacaaggcacccttctgctgcgctgatacgtttcttacactgggccattttagacccccagggaaacagccttcctggagcgttgtctggaggttccagggacagggcagcctcccagagccgagcaagagctcaaggtacaaatgagagatttgctataccgtgagaagtcaacaacttagccaccacttccccgcaatggaccatgtaacaaatacctcagcaggccctgcaaaaggccatgctagagctgaggcgcacagcctgtggcctctgtagttagggcaggtgggatggagactccttgagtgcacacacctgagcctgcccacacacaggggagcagcatctcgtatgacgtctggaaggaacttcggttgtgtaaagggagccttgaagatacgtgcaaaaggtgctaccccaatttggtgaaactgacattgggcacgtcttgggcttaggagaagcggccgatggtcccggcctgcagtgacaaacccccctccccgcaccgcccccagcaccccctctcctcttcacctcttcctgctggccacgaggaagccacttcctcagagagaccctaccagatgcggatggaaacagatgcaccaaagcaagccctgatgaaaccgcgacttcctaaggtctgtctcctctgaacttgcacctgggcctctctgtgtttggttccaagcacttcccacctcaaactcccattttcaaaccactgtatctctgcgcacatctgctacttaccagccgcatacatgatggagggttttttggtcctgatccagtggccacacctgtctttgaaatgtctcactgaactccagttttaaaatagattcattgcttcaacacagcaagcccaatgcacccagctaagactggcttgaccgacagcctggcctttggtggggggcttcctggggcctggggaaagctggccaccttcaacagctggtacctcttcaacagtgtggcctttcaaaatgcagatgccaccaggagaacatgcccacagctcaccacctatggatgccatggctctgggcagctttcaaagcaggttcctgtggtctcctcagctgtttgagggggtaacagcaaatcagcctccattttaaaatgaaaacaccagcctccagatgtagggcctgctgggtgttgctagccgctggtccccaggcacggtgcactttctccacctcctgcagcctccctgttgtttctagactcttgcacctggtgagtgcaaggataggtgacccaggggcctgcagccttgtcctcagctcccatctcctggactgccagcctcaccctctgcagttagcatggttggcctgatgcagggatcccgagggattactttttagaccttctttcacattcagaaaagtagtatagattcaggagaggcaagaaaattatgctgtccatagaagtcacccatgaagactgatgccaccacctgaaggctcatgattgttaaaaatgtccacgggaacctctcgtccacaggaggtttgtctcaacacttcccatttttacggcattggcattgccaagcatggggaagtatctgctcttctcatgttaaaagtggcccagcttttcttaactcagtccaagctgacttgtttagctgcactggaatttcttaccaaccaaatatttgcatcgagcaaagggggctgtgtgcacctccctaatggcagcgatgatggctgctgtcattcaagcccatcttcagacgtcacagtctggaagtgaaatgtccacaaacatctgtggcagaaaaggctatacggaccacccagttgtgctgcagctttacagagcaaggaagggttgtggcaaataaatgattaacctgcctcgactgtgctgagggcaacaaaggccatctcaccaaaggattattcgatgccattaaatcatcccgtgaccttcctgcttccgagtccatggcctttgcccagggcatgtactcccctgagaggccttctgcctagaaagatctatgactgggttccaaagttgaggcctaggtttttgctgggatttagatattttcaggcaccattttgacagcattcaggaaaacggttattgaccccatagactagggtaagaataaaggcaataaatttggtctgactcagaatataggagatccatatatttctctggaaaccacagtgtacactaaaatgtgaaattgaaggttttgttaaaaagaaaaagataatgagcttcatgctttgtttaattacataatgatttccattacgctatttctgtgaaatgcagcaggttcttaaacgttatttcagtggcatgggctggaagcttatcacaaaaagccatgtgtgtggccttatcagaacagaaagagacaggctggtgcccaaggctgctgcctgctccaccttttgccagctctggacatctgaggacgtcccggcagatctggaatggggccctcaactgaccatttgcttctcagaatttcagtttgagacatgagaggtataatcagttacttttctccccccagagaaacccttttgtgaggggagaggagctatggtatgtggttcagctgaaacacatacaactgcatccttttggagtcctttgccaacaaaaacagaccaacagaccagatggtgtccatgttcaatatcatgtcttgatggacgcagctgatgacctcaaatacttgagtggtctcatggctgttagatggattatttgaaaaaaaaaaaaaaaaaagagagaaaaaataattgatttttacatcagagatagcaaactaagacctggggaggggggtcagcttttattttattttattttttttaagtttgctagttgggtcaaatgtgaggaggagggagtctacctgccacctcttctcttgcccctcttctgcccacacatccagcatccaaaatccattcatttaatgaattgataaagtgccgtgcaaactggtgcacaaacaggcccccagtccacgcagcctggctcctaggaaaagtggtgaccgggcgtgggggggcatgccgcagccctgggacacagtcgggcaccttccccggacccccaggccttggctgtgcctcaagtcagagagggtcagccttcaggccccggagacgagtgactggccgatcatttcacaataaaatcactcacttttggcaacttcactttttttaaggcacagtcagttccttttctcatgtacctcacaaaagatgaagaccatgtagtactctttttggtaaagttacagtgttcatgttaaatatcacttttttctacattgtgtggtaaaaagaactacgttaatagctatatcttaaatactgtgatttgactttttgaaaaatatcctaatacaaatattttactaacttacaatcactcatttaataagaaacatttggattcttttgaaatcagtgttaattgactcatattcttaaaagcctggctcttgaccctattggaaacacaaaggaagctgaaatcaaacatctaaaatacactgcgtacacgtgtgcgtgcacacacacacacacacacacacacacacagctcttcatttctcctgagccatgcagaatttactttcaatgtggaaatctgttccctttaccacactgtatatgcacagagcacaagagaggctatctctagtcacttccaccagcgaggccttagactccgtattagaggccaccgatttcatacaacagtgtttcgctaaagacccttcactattcttgtttagtaaatagctgtctgctcttcagggaactgttacctatgggttattaccaaagaacgctggcaattggaaatgtcctgatggaaattctttgcacgtgccggttctctggcatcctccaggtggcccaacccaaagcagaaagcagaaaccacagaccccgtgagtctccccataccttgtttccaataacttggcaaaacttcttggtgcatattggttacaccctctgggattcataatgccattaggctaaaaccctaagagagagggttgacagaaacacacgcgagaatgaggcagatcccagagcaaggactgggcccagactctccacatgtgctctactagtgagtgccttatactctcagtattttggggcttacagcttcttatttgtgctaaaaaggtgcagttccaaagtaggaactgccacacaggccccagcatcctctctccaacttcatacctctctcctggtggggggagcgggcatccaggacctccggaatcaaggatgtgcagagaagagcgaaagtaatttttctagtcacatgaactgattggttccaggcaattagaaaatggctataaaataaccttaattttaaaaaaaaatcttgggtcttcgttttcctattaggagactgaactgaccacatgtattgatttatatcctgaatatatgggaacttctgtgtttgggatgtcctactgtaagactgatgaatgtacagagttaatttcagggtacagttttgccttaatggttttaaaaaataaactattttttaaaatttt

SEQ ID NO: 102 - DNA, 2042 bp, Homo sapiens
cgcggggcctgggccaggcggcagctaaggcccgcggtgacagcatgggtgaaggggagcggggcagaggaggccttgggctgttttcggcggcgggtgggggcgaggggctggcgggtcagagtcccgggtccaggccggggctctgactcgcggttggtgttcccccgaccccgcagcgcggggtgtcctgtcctcgccatgaggccgcagcaggcgccggtgtccggaaaggtgttcattcagcgagactacagcagtggcacacgctgccagttccagaccaagttccctgcggagctggagaaccggattgataggcagcagtttgaagaaacagttcgaactctaaataacctttatgcagaagcagagaagctcggcggccagtcatatctcgaaggttgtttggcttgtttaacagcatataccatcttcctatgcatggaaactcattatgagaaggttctgaagaaagtctccaaatacattcaagagcagaatgagaagatctatgctccacaaggcctcctcctgacagaccctattgagcgaggactgcgagttattgaaattaccatttatgaagacagaggcatgagcagtggaagataaaccgaagaattaaagatcccacttccagccgggcccctcatgtatccactggccgaccgcagagtgtccctacctcctctccagagcatcattcctttctatctgctgccagagccacggtgccatttactccaaggactcactttctaaaattccacacctggagtgacctctagtcgctcagcatccactttgtgtctccaaattgtgtaggactctgtaatcttttgattagtttctgagaaaacacaatgaagcacttcacttttttttattcaaagccatttaataaaacacagttggtcagcccagtgcaaagcttgttatctgccaccagtacataccattggttctcttcattccttgggccagcttctcaggtggctttagacctcaacaagccgtatcttcaccagtgttctatcttgttcccctaaattaataaaatgtttttctccaggattttggtgagggttggctgtggctgtcgttttgcacctcccagatttcaaagaattactggttttaccatgactcaaatcttaagatctgtttctactattcagttcctcaaactgaagcttattgaaaaaaaaatgtataatgttatttgttttattatagcaattatgcctaattaaagcagtatttaatgcaatttccagttatttctttggagaattttatgtcattgttccattaccttgaatgttggaaagatatgatacgtgctgcttgttcatcacaaaaatcagtaagcacaataaagtggatgccaaaccatcagacacataaatgttcccgctgtgtccctggatatggaataagcaggtataaaaaatattttaattatagttttgttataaatataacttatgagaaaaaaatttgataggaataatactgtatattactaatttttaactatccctaaggcaaaccttatgacccacagaattttctcatatacagtattcagtgcacagaaatcttatgattggctcaagtacagtaagttacttctcagtaaaactctcaagtctgagtccatatttgtagctctgcttttggctgtacgttcctaggatcggggctgcttatgcctttcgtttatccttggggtttgagagcgctgtatttgggagagagtttaaaaatacattaggagagagaaaccattaaaagtttcactgtcagatatattgtaggtgctaatactggatttcgtctcagatttaatttcttttatgggtctgttagtcattcaacaaatcccataagtatgtgttaatattttaattgtgtaaaactcatttgttactttacagcctgtaatagtgtgtctgcattttcaacctgttgcaataactttgctgaaatattaacacattaataaaacttttcttaaacaaaaaaaaaaaaaaaaa

SEQ ID NO: 103 - DNA, 11185 bp, Homo sapiens
ctcagctccgggccgagcgcgagcttgggctcgtaccccgctcccctctctccgcccgctctttacctaccggccgtagctggcccggtgggctcgcggggagacgctcgcgcgcgcaagcgcacacgacgcggagcggagctcgagacatcgaggagaggagtaagaagcatcggaggaggcgatcgaggaggaggcggtgtgtgtgtatgtgtctattctacggtgtggctcgtcgtggggcgagaggaggctcgagagagggcgagggagaagcgaaaagagtaagagagtcttcctttgcgagagcctctaatctggttgctatggaaatacatgaccacgcaaaaggaagtccattctgataattctgatacctgagatgtaactggactgaagagtagaaacaggaaaaattttagtgccaactttaattacaatggccactgattcaggggatccagccagcacagaagattctgagaaacctgatggaatttcatttgaaaacagagttccccaggtcgctgcaactttgacagtagaagctagactaaaggagaaaaacagtaccttctctgcttctggggaaactgtagaaaggaagagatttttccgaaagagtgttgaaatgacggaagatgacaaagttgccgaatcatcccccaaagatgagagaattaaggctgcaatgaatattccaagagtagataagcttccttcaaatgtgttgagaggtggacaagaagttaaatatgaacagtgttcaaagtcaacctcagaaatctcaaaagattgtttcaaggagaaaaatgaaaaggaaatggaagaagaagcagaaatgaaggctgtagctacttctcctagtggcagattcctgaaatttgacatagaactaggaagaggagcatttaaaacagtatataaaggactggacactgaaacatgggttgaggttgcttggtgtgagctgcaggaccgaaagttaaccaaagctgagcagcaaagattcaaggaagaagcagagatgttgaagggtctccagcaccccaatatagttcgattttatgattcctgggaatctatattaaaaggaaagaaatgtattgtattagtgactgaactaatgacatctgggaccttaaagacgtacttaaaacgatttaaagtcatgaaaccaaaggtcttaaggagctggtgcaggcaaattttaaaggggttgcagttcttgcacactaggactcctcctattattcaccgggatctgaagtgtgacaatattttcatcacgggacccactggatctgtgaagattggtgatctaggattagccaccttaatgcgtacctcatttgctaagagtgtcattggaactcctgagtttatggctccagagatgtatgaagaacactatgatgaatccgtagatgtttatgcttttggaatgtgtatgctggaaatggccacatcggagtatccttattctgagtgtcagaatgcagctcaaatataccggaaagtaactagtggcataaaaccagccagcttcaataaagtcactgatcctgaagtcaaagaaatcattgaaggatgtattcgtcaaaacaaatctgaaaggttgtctatcagggacctattaaaccatgcattttttgctgaggatacaggactgagggtggagttagcagaagaagatgattgctcaaattcatcccttgctttaagactctgggttgaagaccctaaaaaattgaaaggcaaacacaaagacaatgaagctattgaatttagtttcaacttagaaacagatacacctgaggaagtagcatatgaaatggtcaagtctgggttcttccatgaaagtgattccaaagctgttgctaaatccattagagaccgggtgacgccaataaagaagacaagagagaagaagcctgctggctgtttggaagaacgcagggattctcagtgcaagtctatggggaatgtattccctcagccccagaatacaactttaccccttgctcccgctcagcaaactggggctgaatgtgaagaaactgaagttgatcaacatgttagacaacagcttctacaaagaaaaccacagcagcactgctcctctgttacaggtgacaatttgtctgaggcaggagctgcatcagttatacattcagatacttcaagtcagcccagtgtagcctattcctcaaatcaaacgatgggctctcaaatggtttctaatatcccgcaggctgaagtaaatgttccagggcaaatttattcatctcagcaactagtaggacattaccagcaagtttcagggttacagaagcattcaaagctgactcagccgcagattttgcctttggttcaaggtcagtccactgttttacctgtacatgtccttggaccgacagttgtttcacaaccccaggtttccccattaactgttcagaaggtcccacagataaagcctgtatcccaaccagttggagctgaacaacaagcagctcttctaaaaccagatttagttcgaagcttgaatcaagatgtggcaactacgaaggaaaacgtcagtagccctgataacccaagtggaaatggcaaacaggatcggatcaaacagagaagagcttcctgtccccgaccagagaaggggactaaatttcagcttaccgtccttcaggtatcaacctctggagataacatggtagagtgtcagctggagacacacaacaacaagatggtcaccttcaagtttgatgttgatggtgatgcgccagaggatattgcagactatatggttgaagataactttgtgctggaaagtgagaaagaaaaatttgtagaagaattgagagctattgtaggtcaagcccaggagatccttcatgtccactttgccacagaaagagccactggagttgattctattactgtggactccaacagtagccagacagggtcatctgaacaagtacagataaattctacatctactcaaaccagcaatgaatctgctcctcagtcatccccagttggtcggtggcgattctgtatcaatcagacgataagaaaccgtgagactcagtctcctccttctcttcagcattccatgtctgcggttcctggccgacatccacttcctagtccaaaaaacacaagtaataaggaaatatcacgggacacattgctcactatagaaaataatccatgccaccgtgcacttttcacctccaaatcagaacacaaggatgtggttgatggtaagatttctgaatgtgctagtgtagaaaccaagcagccagctatactttatcaagtggaagataacaggcagataatggcaccagttactaatagttccagttactctactacttcagttcgtgcagttccagctgaatgtgagggactcaccaaacaagcaagcatattcatacctgtgtatccatgtcaccaaactgccagtcaggctgatgcacttatgtcccatcctggcgaatcaactcagacttctggtaactctcttacaactctggcatttgatcaaaagcctcaaaccttatcagtacagcagccagctatggatgcagagtttatttctcaagaaggagaaactacagtgaacactgaagcaagttctcctaagacagtcattcccactcagacccctggccttgaaccaactacccttcaacccactactgtcctggaatcagatggagaaagacctccaaaactggagtttgcagacaaccgaattaaaactctggatgaaaaattaagaaacttgctctatcaggagcacagcatctctagcatctatcccgagagtcagaaggatacccaaagcatagactctccattttcttcctctgctgaagataccctctcctgtccagtgacagaagtcatagccatcagtcactgtggaattaaagatagccctgtacaatcccctaatttccaacagacaggctctaagcttctgtccaatgtggctgcaagtcagcctgctaatatatcagtgttcaaaagggacctgaatgtgataacttctgtacccagcgaattgtgtttacatgagatgtcctcagatgcttcacttccaggggatccagaggcctatcctgctgctgtgtcaagcggtggagccattcatctgcagacaggagtggaaacagaagagatgagatcagcaattgctcctgatcccattcctctgacacgggagtccacagctgatactagggctttgaatagatgtaaagcgatgagtggatcatttcagcggggtcggttccaggtgattacaattcctcagcagcagtcagcaaaaatgacatcttttggaatagaacacatatcagtgttcagtgagacaaaccattctagtgaagaagcctttattaaaacagcaaagtctcagttggtagaaatagaacctgccacacaaaatccaaaaacttcgttttcttatgagaagttacaagctcttcaggaaacctgtaaagaaaataaaggagttcccaaacaaggtgacaacttcttatctttcagcgcagcttgtgagactgatgtatcttcagtgaccccagaaaaggaatttgaagaaacttcagccacaggaagtagcatgcagtctggatctgaactgttgcttaaagagagagagatattgactgctgggaaacagcctagctctgatagtgaattttcagccagtcttgctggcagtggaaagtcagtggcaaagactggtccagagagtaatcagtgcttaccacaccacgaagaacaagcttatgctcaaacacagagttcactcttctattcgccatcttccccaatgagcagtgatgatgaatcagaaatagaggatgaggacttgaaggtggagcttcaaagattacgagaaaaacacattcaggaggtggtaaatcttcaaacccagcagaataaggagctgcaggagctctatgaacgccttcggtcaattaaagatagcaaaacccaatctactgagattcctttgccacctgcatcaccacgtcgaccaagatctttcaaaagcaaacttcgaagccgcccccagtccttgacacatgtggacaatggcatagttgctacagatccactgtgtgtggagagtaatgcagcatcatgccaacagtctccagccagtaaaaaagggatgttcacagatgacttacacaagctggtggatgactggacaaaggaagcagtaggaaattctcttattaagccaagtttaaaccaacttaaacaaagtcaacacaaactagagacagaaaactggaataaagtatctgaaaatactccgtctactatgggctacacatcaacatggatttcttctctgtcccaaatccgtggagctgtcccaacttccttgccacaaggactctcactcccttcatttcctgggccattatcatcatatggaatgcctcacgtttgtcagtataatgctgtggcgggggcggggtatccagtacagtgggtaggaatttcaggaacaacacaacaatctgtagtaattcccgcccaatctgggggaccattccagccagggatgaatatgcaggcatttccaacttcatcagtgcagaatcctgccacaatccctcctggtcctaaatgaatcagagtagatggtgataaaaagggaggttttttcagaattattttcaggacacccaagatattaaagtttcttcctcttgggttctgtcatattttccctcatttgagtttactttagactatatattttttgttccagtgtggtatttgatacagctcatcattctgtagaaatgtgcagtttgcagatagaacactgcacacagaaatgttttttcacttcaaattctatcctctttgatacttgattttttaaaaatactgttcagaatgctttaataagctcagcttgagcattaccatttccaggacactttccatgaattgttgagaagctccccatcccccgccttttttttttttttttttaactgctgctatctgcagctggatactcttctttaaaaatgtttaaaaattatttagattgattctccccaaatgtggatgaactgagaccctccatcagccagagtcttatgggatcttcacttcacatgtttgtcttaggtttacctttcacagaaggcagggtaacttgctgcaggaaacgttttggtgtataaaattagaatcacttttttttttttttttgagatggagtctctctctgtcacccaggttggagtgcagtggtgtgatcttggctcactgctgcaacctccccctcctgggttcaagcgattctcctgcctcagcctcctgagtagctgggactacaggcgccagccaccatgcctggctaatttttgtatttttagtagaggatggggtttcactatgttggccagactggtctcaaactcctaaccttgtgatccgccctccttagcccccccaaaaaattacaataattttgtcaaccaatacagaacatgagccctttttaaatgtgatttcccgtcatcacagcagtaggatgaagccttgttttgggtgagacagagggaaagggaaaaaacagaattgtaacagttccttgattctgcagatactgctgctgttttacgatttcagtaataattcaaagcagctgtctccttgtttctcacatgcatactacattggttttgagcatctgagaggcattggtttgtcttgcattcttttgcaaggcatatattgcagctgatatgaatctcgtttggggggaatccttgtattcctaacaagggggattaaagctacacctcaatccattcttctgaagtgaaatttacttgacacagtaggtttcgagacttacatatgaaacactggctttacagggttctcagagatgtggggtatacactgtcctgcagtgagatagtagaccctagaaggatactatttaagttgtccttagctctttttaattacaatttttagttgttagaatttctttttagtatctatagtatcttagatgattttagatcttaaatgagtttggcagcctctttagaatctgagagagatcactgtcaagttgcactttactgggttttatccagttttaggaggaggggaggcaatgtcaaaatgtacacctttggtttttaagaaggttaactataataatgttaaaggctagtcacagggttacctaatgctcagtctgtgaaacctaaatagaattcttaaaatgttatttaccaactaagtattcatgttcaaattacttaccttccactctgaagactttaaggtcatttctaatacacatttacctaattaggagttctgtctactagtaaacattccaaattgctacccaacattactgttaacagattttcctccgtattcttctaaaaattataccccatgggcttgccaggtaatgacgaaaacttaatgggtgtacttttttttttttttgcacagtctactttgtgacattaagtacctcttttccaaaaaaaaaaaaaaatgtgttttatgttgcttacctgaggatcacatccattatcaagaagattctgtcgctataatttgaggcatctagggcagcattttgagaattgctgttgataagatccactgtttcttttcatagaacatgatctgttttgtatgagtctttccaaatgttaagtacagattcttcaaatttcttgtacagtattggtttgcagtttaaagtgattttaggacattagtgtaatgcaaatgcttgcattgcactgttttccatatgtataaaaacaatgctcctaaaatccctaattctttaaaactgcctgtgtttcattataaaaagttggctttgtgtaattacaccgagccatacaacctataaagtgaaaatactgcagattttaggaccccttcttctctagtcacaatcattttaaacagtgtaccccaggatgaaaaaagctccatggctgacatgtacaattacatgtattaatgactgctctacatcctatgttctgcctttggccaccacctctattccacatataattcatcattcttgtttgcctgcagactcttgcagtgccttgtaatatttacaatcttttcaggtttttgctggaaagaaaagtagtcttctaaagtttgaagatggtgaatagtgtactgctgtctccatgctgactgcagtaaccgggttatcatatatgttatgtatacattatgtatatataacatgtgtacatttaaaaatacagaaaaaagtgagcttgtgcagaaatggagaaaacaatgttattctcatcactgtggggttttattaaaattattttttcccatgacttacatgtttggttcagattatagtcactttgactgtaaatactggctagttttctatccagggcttttgcattatttcataattttgctaaatcatataatagtgctattttcatccttgtctgaggtacttttcctccccagaaataattaacttgaggtaaagctcagaaattcccttcttaacaaagagcctactatataaaaagggccttcctttccaaaaaacacacaaacctgtccttttcattttccttcttgtagaggagaaaatggttgtacttaaccatcctgcttgtaaagtttattcagaggatagtctgtatgtccagccaccatgtttacttctcaaagtgcaagtctgatgaatagtactgtatctccatatgtggtaatgtgagcatttcatcatgaagtacctgctgctatgtctgtgaagttgggtgtaacatcataagaatatgaaaccagtattggtgtaaatctaatgaaaataaccctatgtatatttgtagcagtcttgaatctctatttaaggtaatttgctgtaatataacaaatattcattctgtttttcatcccttccttgccagttttatatcaagcatgaattccaatggtttgacagcaaaattatctgtgaaagtttaaaaggcacttttctgctgtgatttttggattgagtgtggagtgttatgtacagtttgatgggatatatcattttagaaccccagatttaattctagtccaattaattttgtttaactacctcgttttcagtgctgttttgggtgcacaagtaaacactacctgtgaaacttgcttttttgccttgattctcagtattctttcagattataaatctggtctgcctcttttttcccagtgctagccaacagtttgagatgagagggatcatcactctcatctgtgtttaagtggagagccatgtgcttctgtgaaatatgctttggggatttgggggtggagagcagaagaataattgaaattggtggcaatataggatttaggtgtaggagttagttataaaataaacaaatggtaagaaagtacctgaattagacaatccagtgcctataactttgcattttttattagagatgcatttctcgtctgtgtgcctaaagggcaatgggttgaaattgctttaactaccacagcgaaatatttgacaaatccttcagcaatggcctatcattcaacatatattagcacagtgctaggtatttgcagtggtattttgttaccttaaaacggccaaatgcatttagttgaaatgtagttgatagtaagggttttatataactttatccaatctctaaagtttatggaagcattgactttcttctttgctgtcttttctgagtgatgaaaatgatgcattccttttttttccttgaaaactcagcaaatgtttgtaaccagatgttccttgtttcacatgtttactgtgtaacactacagcatatttaatattggtaaatactgtatttcagtcattatgcataagtacattcctgaggtatatttgccatcattttgggattcagttattttatcttctgtttgggtcagaaaaacttgaactatctgaggtggtatgcaggccattttctagaagattgttttttgaatctgtagtttatcaaggacttgttccccccctccctttgtttagaagaggaatcagaaaaggggggtggtgtgtagaaaaggcctttgatttgataggtgtaatttctaagattgaaattttaaaaatgcagatcgtaagatagtaacactcaaacttgataaaatcctttgaattgaaattagtatgaaatttttatggaaccaaatgccttcaggtcaccctggaaatagtctttgtatgtgaaagatcaacacaaacattggtcaggaaccctgacagccaatatatgaaggagcctgggatagtaactaggttacactaaagttattttcaactaagatagctagacgagtgtacaaaccaatagctcctattctggaaggttttctttttattaaaaaaaattcaaacaaggttaaaagtcaagcaagaagggaagagagaaactgggttctgagaaaaaaatgtgccagtataaaataaactcctaaatgcgtgcttgtcatcctctagtttttttttaagttgaatttcttttccactgtaacttaagatttgagattgaggtttgcggtccagaacataccctcagcagatacagtgactaactggaaagtgcagttgttcaaggtctgtcatgctcaatcacctaaagctataatttgtttgatatattaagcatgtagacctagtgcagcatgggagccactcaggaagtttatgcaattaataaactttcagcataatttactatgaagtatgcagaatttcaccctcttctccacacttaacatttagttgtatatgtgaactctcctttcttaattggggaatgtagcattatatagaatgttgttaaagttaattttaatcctttttgacattaacctttttttttttttggtaaaccaagtgatctgcctttcagcaactgtcttattttggttctttgaaactgtgatttttatttcatttgtacccaaccattgtaagtattttgttttgtttcctggaaattctgttttgaaacagaaaataaaggctgtgttaaatgagtatgttatcttattaaaatgctgccatagtcactgcaaaaaaaaaaaaaaa

SEQ ID NO: 104 - DNA, 9902 bp, Homo sapiens
atggctgagagcgcctccccgccctcctcatctgcagcagccccagccgctgagccaggagtcaccacggagcagcccggaccccggagccccccatcctccccgccaggcctggaggagcctctggatggagctgatcctcatgtcccacacccagacctggcgcctattgccttcttctgcctgcgacagaccaccagcccccggaactggtgcatcaagatggtgtgcaacccgtggtttgaatgtgtcagcatgctggtgatcctgctgaactgcgtgacacttggcatgtaccagccgtgcgacgacatggactgcctgtccgaccgctgcaagatcctgcaggtctttgatgacttcatctttatcttctttgccatggagatggtgctcaagatggtggccctggggatttttggcaagaagtgctacctcggggacacatggaaccgcctggatttcttcatcgtcatggcagggatggtcgagtactccctggaccttcagaacatcaacctgtcagccatccgcaccgtgcgcgtcctgaggcccctcaaagccatcaaccgcgtgcccagtatgcggatcctggtgaacctgctcctggacacactgcccatgctggggaatgtcctgctgctctgcttctttgtcttcttcatctttggcatcataggtgtgcagctctgggcgggcctgctgcgtaaccgctgcttcctggaggagaacttcaccatacaaggggatgtggccttgcccccatactaccagccggaggaggatgatgagatgcccttcatctgctccctgtcgggcgacaatgggataatgggctgccatgagatccccccgctcaaggagcagggccgtgagtgctgcctgtccaaggacgacgtctacgactttggggcggggcgccaggacctcaatgccagcggcctctgtgtcaactggaaccgttactacaatgtgtgccgcacgggcagcgccaacccccacaagggtgccatcaactttgacaacatcggttatgcttggattgtcatcttccaggtgatcactctggaaggctgggtggagatcatgtactacgtgatggatgctcactccttctacaacttcatctacttcatcctgcttatcatagtgggctccttcttcatgatcaacctgtgcctcgttgtcatagcgacccagttctcggagaccaagcaacgggagcaccggctgatgctggagcagcggcagcgctacctgtcctccagcacggtggccagctacgccgagcctggcgactgctacgaggagatcttccagtatgtctgccacatcctgcgcaaggccaagcgccgcgccctgggcctctaccaggccctgcagagccggcgccaggccctgggcccggaggccccggcccccgccaaacctgggccccacgccaaggagccccggcactaccagctgtgcccgcaacatagccccctggatgcgacgccccacaccctggtgcagcccatccccgccacgctggcttccgatcccgccagctgcccttgctgccagcatgaggacggccggcggccctcgggcctgggcagcaccgactcgggccaggagggctcgggctccgggagctccgctggtggcgaggacgaggcggatggggacggggcccggagcagcgaggacggagcctcctcagaactggggaaggaggaggaggaggaggagcaggcggatggggcggtctggctgtgcggggatgtgtggcgggagacgcgagccaagctgcgcggcatcgtggacagcaagtacttcaaccggggcatcatgatggccatcctggtcaacaccgtcagcatgggcatcgagcaccacgagcagccggaggagctgaccaacatcctggagatctgcaatgtggtcttcaccagcatgtttgccctggagatgatcctgaagctggctgcatttgggctcttcgactacctgcgtaacccctacaacatcttcgacagcatcattgtcatcatcagcatctgggagattgtggggcaggcggacggtgggctgtcggtgctgcggaccttccggctgctgcgcgtgctgaaactggtgcgcttcatgcctgccctgcggcgccagctcgtggtgctcatgaagaccatggacaacgtggccaccttctgcatgctgctcatgctcttcatcttcatcttcagcatccttgggatgcatatttttggctgcaagttcagcctccgcacggacactggagacacggtgcccgacaggaagaacttcgactccctgctgtgggccatcgtcactgtgttccagatcctcacccaggaggactggaacgtcgttctctacaatggcatggcctccacttctccctgggcctccctctactttgtcgccctcatgaccttcggcaactatgtgctcttcaacctgctggtggccatcctggtggagggcttccaggcggagggtgacgccaatcgctcctactcggacgaggaccagagctcatccaacatagaagagtttgataagctccaggaaggcctggacagcagcggagatcccaagctctgcccaatccccatgacccccaatgggcacctggaccccagtctcccactgggtgggcacctaggtcctgctggggctgcgggacctgccccccgactctcactgcagccggaccccatgctggtggccctgggctcccgaaagagcagtgtcatgtctctagggaggatgagctatgaccagcgctccctgtccagctcccggagctcctactacgggccatggggccgcagcgcggcctgggccagccgtcgctccagctggaacagcctcaagcacaagccgccgtcggcggagcatgagtccctgctctctgcggagcgcggcggcggcgcccgggtctgcgaggttgccgcggacgaggggccgccgcgggccgcacccctgcacaccccacacgcccaccacattcatcacgggccccatctggcgcaccgccaccgccaccaccgccggacgctgtccctcgacaacagggactcggtggacctggccgagctggtgcccgcggtgggcgcccacccccgggccgcctggagggcggcaggcccggcccccgggcatgaggactgcaatggcaggatgcccagcatcgccaaagacgtcttcaccaagatgggcgaccgcggggatcgcggggaggatgaggaggaaatcgactacaccctgtgcttccgcgtccgcaagatgatcgacgtctataagcccgactggtgcgaggtccgcgaagactggtctgtctacctcttctctcccgagaacaggttccgggtcctgtgtcagaccattattgcccacaaactcttcgactacgtcgtcctggccttcatctttctcaactgcatcaccatcgccctggagcggcctcagatcgaggccggcagcaccgaacgcatctttctcaccgtgtccaactacatcttcacggccatcttcgtgggcgagatgacattgaaggtagtctcgctgggcctgtacttcggcgagcaggcgtacctacgcagcagctggaacgtgctggatggctttcttgtcttcgtgtccatcatcgacatcgtggtgtccctggcctcagccgggggagccaagatcttgggggtcctccgagtcttgcggctcctgcgcaccctacgccccctgcgtgtcatcagccgggcgccgggcctgaagctggtggtggagacactcatctcctccctcaagcccatcggcaacatcgtgctcatctgctgtgccttcttcatcatctttggcatcctgggagtgcagctcttcaagggcaagttctaccactgtctgggcgtggacacccgcaacatcaccaaccgctcggactgcatggccgccaactaccgctgggtccatcacaaatacaacttcgacaacctgggccaggctctgatgtccctctttgtcctggcatccaaggatggttgggtgaacatcatgtacaatggactggatgctgttgctgtggaccagcagcctgtgaccaaccacaacccctggatgctgctgtacttcatctccttcctgctcatcgtcagcttctttgtgctcaacatgtttgtgggtgtcgtggtggagaacttccacaagtgccggcagcaccaggaggctgaagaggcacggcggcgtgaggagaagcggctgcggcgcctggagaagaagcgccggaaggcccagcggctgccctactatgccacctattgtcacacccggctgctcatccactccatgtgcaccagccactacctggacatcttcatcaccttcatcatctgcctcaacgtggtcaccatgtccctggagcactacaatcagcccacgtccctggagacagccctcaagtactgcaactatatgttcaccactgtctttgtgctggaggctgtgctgaagctggtggcatttggtctgaggcgcttcttcaaggaccgatggaaccagctggacctggccattgtgctactgtcagtcatgggcatcaccctggaggagatcgagatcaatgcggccctgcccatcaatcccaccatcatccgcatcatgagggttctgcgcattgcccgagtgctgaagctgttgaagatggccacaggaatgcgggccctgctggacacggtggtgcaagctttgccccaggtgggcaacctgggcctcctcttcatgctgctcttcttcatctatgctgctctcggggtggagctctttgggaagctggtctgcaacgacgagaacccgtgcgagggcatgagccggcatgccaccttcgagaacttcggcatggccttcctcacactcttccaggtctccacgggtgacaactggaacgggatcatgaaggacacgctgcgggactgcacccacgacgagcgcagctgcctgagcagcctgcagtttgtgtcgccgctgtacttcgtgagcttcgtgctcaccgcgcagttcgtgctcatcaacgtggtggtggctgtgctcatgaagcacctggacgacagcaacaaggaggcgcaggaggacgccgagatggatgccgagctcgagctggagatggcccatggcctgggccctggcccgaggctgcctaccggctccccgggcgcccctggccgagggccgggaggggcgggcggcgggggcgacaccgagggcggcttgtgccggcgctgctactcgcctgcccaggagaacctgtggctggacagcgtctctttaatcatcaaggactccttggagggggagctgaccatcatcgacaacctgtcgggctccatcttccaccactactcctcgcctgccggctgcaagaagtgtcaccacgacaagcaagaggtgcagctggctgagacggaggccttctccctgaactcagacaggtcctcgtccatcctgctgggtgacgacctgagtctcgaggaccccacagcctgcccacctggccgcaaagacagcaagggtgagctggacccacctgagcccatgcgtgtgggagacctgggcgaatgcttcttccccttgtcctctacggccgtctcgccggatccagagaacttcctgtgtgagatggaggagatcccattcaaccctgtccggtcctggctgaaacatgacagcagtcaagcacccccaagtcccttctccccggatgcctccagccctctcctgcccatgccagccgagttcttccaccctgcagtgtctgccagccagaaaggcccagaaaagggcactggcactggaaccctccccaagattgcgctgcagggctcctgggcatctctgcggtcaccaagggtcaactgtaccctcctccggcaggccaccgggagcgacacgtcgctggacgccagccccagcagctccgcgggcagcctgcagaccacgctcgaggacagcctgaccctgagcgacagcccccggcgtgccctggggccgcccgcgcctgctccaggaccccgggccggcctgtcccccgccgctcgccgccgcctgagcctgcgcggccggggcctcttcagcctgcgggggctgcgggcgcatcagcgcagccacagcagcgggggctccaccagcccgggctgcacccaccacgactccatggacccctcggacgaggagggccgcggtggcgcgggcggcgggggcgcgggcagcgagcactcggagaccctcagcagcctctcgctcacctccctcttctgcccgccgcccccgccgccagcccccggcctcacgcccgccaggaagttcagcagcaccagcagcctggccgcccccggccgcccccacgccgccgccctggcccacggcctggcccggagcccctcgtgggccgcggaccgcagcaaggacccccccggccgggcaccgctgcccatgggcctgggccccttggcgcccccgccgcaaccgctccccggagagctggagccgggagacgccgccagcaagaggaagagatgagggtcgcaggggcccccggccgcccaccgcccgccccgtctcaccttctttacctcaggagccaggagcagacagcaatacttcgtccacacctgggatcgcgcagggcccgcagggcacaggcgcccgacagccgggctgagcggagtctgggttagccaggcctgcgtggcccatggtggcccttccagtgcatatacatacatatatatatatatatgcatatatatatatatatatatatatatgtgtatacacacacacatagacagacatatatatatatatttattttttttactgagagcttatgacttccagaaagtgctaaaggtgggaggtgggccagggcctggacggggcttttgtctgatgctctgggattctggccagacccaccccagggcacatgtcctgcgggggcgtcccagctgtgttttttgatgtctcctccctggttaagagtagcttggagaggaccctcaggcctctgagggcaccaggccctggagaagaggtgcaattcagggtgtgtgtgtgttttttttcctttaaagaagaaacgctgctaagatcccacgtggctcccacgtgtcggggtgtctgtcctgtcatcctgactgtctcgttattgtgaagtctttcgtagacaccccagagcacacacatccccttagtccaccggttagatgtctctctttagaaaaatcaggggtgagtagctgtgtttccttaggcctggggtaggggatggagagcagctccaaggctgagctggggctctggccccaggtgaggtccccagctcctgagcacttctgagggggtgggttccacccccaggagggcgggggtgggtggagcaggagtggaggcagcctgcagaggaagggtgcgggagactgagccggcagtggcttgcttggaggggctagggtacccgcctggtctcggctggctccagctgccctgcaggtgcccctgggctcaggtagttagttgttcagccactaatgccttttatcccccatatgggcgctgagctgtggctgttcctggacactgtgctgtccccgtcctgagcaactatgcccccgccccagtaggttcaaggcaaagcagctctgaccgaattctaggcaggggtgggggcacctgcctgggccctgggtccagccgcatccccatgcccagcctttcgcgtcacctggaggccacatcttcccaccccacctgccagcccctgtctctcctccccgctgcccctaactgcagctcagctttcactatagcagtgcttcccaaacgggttctagacttgggtgtttgatttgaagagttacgcatttatttcactatttattgggaaaaaaatgcattgaacccgtgatttcacagacattttgcttaggtcaaggctactttttaaaaagggagtgactttcatgaagtcagtttgaagaaggaggttgggagcatgttggtggcagtgatctggagaggctgcaggggccacgagtttgcagatgctgtacttcagcaataaccttgcctttgctaagaccccctccgagggcttcaggggggcctgccaagggggggccttgttcttgttcccaaactctgacttggaagaactcagcttgtggccgggctggtgagggtgtggggtgcgcccttcccttttgggctgagggagagggggccgggaggggttgtcaagcccacccgggaaactgagccctggagaggggaagcagccagcccaggatgcttcagggccctggcagcaaagaagctggggtggtgtggagggccctactccacaccctagagctgtgatgctgagcaaggtgcctgtggcggaaggaactgcccagtcctccctgggggcaggtagacctgtggggatggctcggtccaagcccaacactgcccgctccagagagcctcagccctgcctccctttccacagaggtggttttatgtggaacgaggtaccttgtctggggaagaagtggagctgggcaggcttgactgctcctggctgaccctgagctctcgcagttggagggaagcagacagacttgactttttgcaagtccgcgtgttgctggagggacacgtgtattggagcccagaagaggggctgtgtggcctgggaataccatgtggaaggttgggcttcaagttaacaggatcagacaccagtcaagcagcctcaggtcatcttgcgactccactgagcagcctttcctgttgtcacatgggttcagagcagctgagcagggaacacgtcctaggcaggtctgacgtgaaacctccccttaccctgaaccgtgtgactctgcaagcagacacctcgaggcaggtgttctaggcaaagggatgggcatgagcgaaggctccagggtccacagagcagggagtgtggagaaggtggaagagctgagctcagaggcagagaagctccttgcagggagcactgggagatggcctggcccgtcccaggctcctggaggccccacctgccgatcccaggcacttgaccttgttcctgtgggtgacagagatgagaaccagggaagctgtgatccactggccaggacaagtcaacatgggtgagggttgggcaaagggcccttccttcctccccaaccctgtggtctggggccatggcctcaggcttgtgtctatcacaaaagcacaaacttgccctaacccacatgggcctggctgtggggaaagtggggacccaggtccctgagctgtctgctgggctccgtagagcggtggtgggcaggcaccttggcatctgtgcagagacggcccagtctggccaaatcctcttcctctcccctgctctaccttctccggcaccaggcagccccttaaaggaggacaaagtgtgtaaagcccgtctgctgtcttcccccaaatcctcagctcagagccttccgcttccagggccaaccccagccccgtttgctgcgttgtgtaagggcttggggtcttagaagctgctctttagcccagatacacatactcttttttgtctttgtgcaataatcagtgttcctggcagagcctgggccaagctgcagcctactgaggaggcagaggccacctcctccagaaagccctcggcctgggccgccgccgtgactctagcactctcagtcgctgtacagtttctatggtgtgaatgaacttccctcctagttgctgatggcgctggtacctgctggcccatggcccgggtgtagagaaaccaagcggcagccaccaccagtgttgttttgaataaaagcccagaagcctatttaagaaaaaaa

SEQ ID NO: 105 - DNA, 10551 bp, Homo sapiens
cggccgggaggcggggcgggccgtaggcaaagggaggtggggaggcggtggccggcgactccccgcgccccgctcgccccccggcccttcccgcggtgctcggcctcgttcctttcctcctccgctccctccgtcttccatacccgccccgcgcggctttcggccggcgtgcctcgcgccctaacgggcggctggaggcgccaatcagcgggcggcagggtgccagccccggggctgcgccggcgaatcggcggggcccgcggcccagggtggcaggcgggtctacccgcgcggccgcggcggcggagaagcagctcgccagccagcagcccgccagccgccgggaggttcgatacaagaggctgttttcctagcgtggcttgctgcctttggtaagaacatgtcgtccatcttgccattcacgccgccagttgtgaagagactgctgggatggaagaagtcagctggtgggtctggaggagcaggcggaggagagcagaatgggcaggaagaaaagtggtgtgagaaagcagtgaaaagtctggtgaagaagctaaagaaaacaggacgattagatgagcttgagaaagccatcaccactcaaaactgtaatactaaatgtgttaccataccaagcacttgctctgaaatttggggactgagtacaccaaatacgatagatcagtgggatacaacaggcctttacagcttctctgaacaaaccaggtctcttgatggtcgtctccaggtatcccatcgaaaaggattgccacatgttatatattgccgattatggcgctggcctgatcttcacagtcatcatgaactcaaggcaattgaaaactgcgaatatgcttttaatcttaaaaaggatgaagtatgtgtaaacccttaccactatcagagagttgagacaccagttttgcctccagtattagtgccccgacacaccgagatcctaacagaacttccgcctctggatgactatactcactccattccagaaaacactaacttcccagcaggaattgagccacagagtaattatattccagaaacgccacctcctggatatatcagtgaagatggagaaacaagtgaccaacagttgaatcaaagtatggacacaggctctccagcagaactatctcctactactctttcccctgttaatcatagcttggatttacagccagttacttactcagaacctgcattttggtgttcgatagcatattatgaattaaatcagagggttggagaaaccttccatgcatcacagccctcactcactgtagatggctttacagacccatcaaattcagagaggttctgcttaggtttactctccaatgttaaccgaaatgccacggtagaaatgacaagaaggcatataggaagaggagtgcgcttatactacataggtggggaagtttttgctgagtgcctaagtgatagtgcaatctttgtgcagagccccaattgtaatcagagatatggctggcaccctgcaacagtgtgtaaaattccaccaggctgtaatctgaagatcttcaacaaccaggaatttgctgctcttctggctcagtctgttaatcagggttttgaagccgtctatcagctaactagaatgtgcaccataagaatgagttttgtgaaagggtggggagcagaataccgaaggcagacggtaacaagtactccttgctggattgaacttcatctgaatggacctctacagtggttggacaaagtattaactcagatgggatccccttcagtgcgttgctcaagcatgtcataaagcttcaccaatcaagtcccatgaaaagacttaatgtaacaactcttctgtcatagcattgtgtgtggtccctatggactgtttactatccaaaagttcaagagagaaaacagcacttgaggtctcatcaattaaagcaccttgtggaatctgtttcctatatttgaatattagatgggaaaattagtgtctagaaatactctcccattaaagaggaagagaagattttaaagacttaatgatgtcttattgggcataaaactgagtgtcccaaaggtttattaataacagtagtagttatgtgtacaggtaatgtatcatgatccagtatcacagtattgtgctgtttatatacatttttagtttgcatagatgaggtgtgtgtgtgcgctgcttcttgatctaggcaaacctttataaagttgcagtacctaatctgttattcccacttctctgttatttttgtgtgtcttttttaatatataatatatatcaagattttcaaattatttagaagcagattttcctgtagaaaaactaatttttctgccttttaccaaaaataaactcttgggggaagaaaagtggattaacttttgaaatccttgaccttaatgtgttcagtggggcttaaacagtcattctttttgtggttttttgtttttttttgtttttttttttaactgctaaatcttattataaggaaaccatactgaaaacctttccaagcctcttttttccattcccatttttgtcctcataatcaaaacagcataacatgacatcatcaccagtaatagttgcattgatactgctggcaccagttaattctgggatacagtaagaattcatatggagaaagtccctttgtcttatgcccaaatttcaacaggaataattggcttgtataatctagcagtctgttgatttatccttccacctcataaaaaatgcataggtggcagtataattattttcagggatatgctagaattacttccacatatttatccctttttaaaaaagctaatctataaataccgtttttccaaaggtattttacaatatttcaacagcagaccttctgctcttcgagtagtttgatttggtttagtaaccagattgcattatgaaatgggccttttgtaaatgtaattgtttctgcaaaatacctagaaaagtgatgctgaggtaggatcagcagatatgggccatctgtttttaaagtatgttgtattcagtttataaattgattgttattctacacataattatgaattcagaattttaaaaattgggggaaaagccatttatttagcaagttttttagcttataagttacctgcagtctgagctgttcttaactgatcctggttttgtgattgacaatatttcatgctctgtagtgagaggagatttccgaaactctgttgctagttcattctgcagcaaataattattatgtctgatgttgactcattgcagtttaaacatttcttcttgtttgcatcttagtagaaatggaaaataaccactcctggtcgtcttttcataaattttcatatttttgaagctgtctttggtacttgttctttgaaatcatatccacctgtctctataggtatcattttcaatactttcaacatttggtggttttctattgggtactccccattttcctatatttgtgtgtatatgtatgtgttcatgtaaatttggtatagtaattttttattcattcaacaaatatttattgttcacctgtttgtaccaggaacttttcttagtctttgggtaaaggtgaacaagacaactacagttcctgcctttgctgagacagcagttacactaacccttaattatcttacttgtctatgaaggagataaacagggtactgtactggagaataacagatgggatgcttcaggtaggacatcaaggaaagcctctaaggaaaggatgcatgagctaacacctgacattaaagaagcaagccaagtgaggagccaggggagataagcattcctggcaaagagaatagcatcaaatgcaaaaaggttcacactaaaggaaactcctgattaggtattaatgctttatacagaaacctctatacaaatccaaacttgaagatcagaatggttctacagttcataacattttgaaggtggccttattttgtgatagtctgcttcatgtgattctcactaacatatctccttcctcaacctttgctgtaaaaatttcatttgcaccacatcagtactacttaatttaacaagcttttgttgtgtaagctctcactgttttagtgccctgctgcttgcttccagactttgtgctgtccagtaattatgtcttccactacccatcttgtgagcagagtaaatgtcctaggtaataccactatcaggcctgtaggagatactcagtggagcctctgcccttctttttcttacttgagaacttgtaatggtgttagggaacagttgtaggggcagaaaacaactctgaaagtggtagaaggtcctgatcttggtggttactcttgcattactgtgttaggtcaagcagtgcctactatgctgtttcagtagtggagcgcatctctacagttctgatgcgatttttctgtacagtatgaaattgggactcaactctttgaaaacacctattgagcagttatacctgttgagcagtttacttcctggttgtaattacatttgtgtgaatgtgtttgatgctttttaacgagatgatgttttttgtattttatctactgtggcctgattttttttttgttttctgcccctccccccatttataggtgtggttttcatttttctaagtgatagaatcccctctttgttgaatttttgtctttatttaaattagcaacattacttaggatttattcttcacaatactgttaattttctaggaatgatgacctgagaaccgaatggccatgctttctatcacatttctaagatgagtaatattttttccagtaggttccacagagacaccttgggggctggcttaggggaggctgttggagttctcactgacttagtggcatatttattctgtactgaagaactgcatggggtttcttttggaaagagtttcattgctttaaaaagaagctcagaaagtctttataaccactggtcaacgattagaaaaatataactggatttaggcctaccttctggaataccgctgattgtgctctttttatcctactttaaagaagctttcatgattagatttgagctatatcagttataccgattataccttataatacacattcagttagtaaacatttattgatgcctgttgtttgcccagccactgtgatggatattgaataataaaaagatgactaggacggggccctgacccttgagctgtgcttggtcttgtagaggttgtgttttttttcctcaggacctgtcactttggcagaaggaaatctgcctaatttttcttgaaagctaaattttctttgtaagtttttacaaattgtttaatacctagttgtattttttaccttaagccacattgagttttgcttgatttgtctgtcttttaaacactgtcaaatgctttcccttttgttaaaattattttaatttcactttttttgtgcccttgtcaatttaagactaagactttgaaggtaaaacaaacaaacaaacatcagtcttagtctcttgctagttgaaatcaaataaaagaaaatatatacccagttggtttctctacctcttaaaagcttcccatatatacctttaagatccttctcttttttctttaactactaaataggttcagcatttattcagtgttagataccctcttcgtctgagggtggcgtaggtttatgttgggatataaagtaacacaagacaatcttcactgtacataaaatatgtcttcatgtacagtctttactttaaaagctgaacattccaatttgcgccttccctcccaagcccctgcccaccaagtatctctttagatatctagtctgtggacatgaacaatgaatacttttttcttactctgatcgaaggcattgatacttagacatatcaaacatttcttcctttcatatgctttactttgctaaatctattatattcattgcctgaattttattcttcctttctacctgacaacacacatccaggtggtacttgctggttatcctctttcttgttagccttgttttttgttttttttttttttttttgagagggagtctcgctctgttgcccaacctggagtgcagtggtgcgatcttggttcactgcaagctccgcctcccgggttcacgccatgcttctgcctcagcctcccaagtagctgggactacaggcgcccaccaccacactcggctaattttttgtatttttagtagagacggggtttcaccgtgttggccaggatggtctcgatctcctgacctcgtgatctgtccacctcggcttcccaaagtgctgggattacaggcatgagccaccgcgcccagcctagccatatttttatctgcatatatcagaatgtttctctcctttgaacttattaacaaaaaaggaacatgcttttcatacctagagtcctaatttcttcatcatgaaggttgctattcaaattgatcaatcattttaattttacaaatggctcaaaaattctgttcagtaaatgtctttgtgactggcaaatggcataaattatgtttaagattatgaacttttctgacagttgcagccaatgttttccctacgataccagatttccatcttggggcatattggattgttgtatttaagacagtcagaataatgatagtgtgtggtctccagaggtagtcagaatcctgctattgagttctttttatatcttccttttcaattttttattaccattttgtttgtttagactacactttgtagggattgaggggcaaattatctcttggagtggaattcctgtgttttgagccttacaaccaggaaatatgagctatactagatagcctcatgatagcatttacgataagaacttatctcgtgtgttcatgtaattttttgagtaggaactgttttatcttgaatattgtagctaactatatatagcagaactgcctcagtctttttaagaaggaaataaataatatatgtgtatgaatttatatatacatatacactcatagacaaacttaacagttggggtcattctaacagttaaaacaattgttccattgtttaaatctcagatcctggtaaaatgttcttaatttgtctgtgtacattttcctttcatggacagaccattggagtacattaattttcttaatctgccatttggcagttcatttaatataccattttttggcaacttggtaactaagaatcacagccaaaatttgttaacatcaaagaaagctctgccatataccccgttactaaattattatacatccagcagattctgggatgtactaacttagggttaactttgttgttgttgataatactagattgctccctctttaattcttcttctggtgcaaggttgctgcttaagttaccctgggaaatactactacaaggtcaaattttctagtatcttacagcctgattgaaggtgattcagatctttgctcaatataaatggattttccaagattctctgggccatccttgacccacaggtgatctcgctggagtatattaacttaacttcagtgccagttggtttggtgccatgagatccataatgaatccagaacttcaccattgcttagatataagagtcccttggaagaataatgccactgatgatgggggtcagaaggtgtattaactcaacatagagggcttttagatttttcttcaaaaaaatttcgagaaaagtattcttttaccctccaaacagttaacagctcttagtttctccaaatatgctctttgatttacttatttttaattaaagatggtaatttattgaacaatgaaatccgtaatatattgatttaaggacaaaagtgaagttttagaattataaaagtacttaaatattatatattttccatttcataattgttttcctttctctgtggctttaaagtttttgactattttacaatgttaatcactaggtaacttgccatatttctggttctatattaagttctatcctttataatgctgttattataaagctggtttttagcatttgtctgtagcaatagaaattttactaagtctctgttctcccagtaagttttttcttttctcagtaagtccctaagaaaacatttgtttgccactcttactattcccaatcttggattgttcgagctgaaaaaaaatttgatgagaaacaggaggatccttttctggtgaatataggttcctgctttaagaatgtggaaatccattgctttatataactaatatacacacagattaattaaaattgtgagaaataattcacacatgacaagtaggtaacatgcatgagttttgaatttttttaaaaacccaactgtttgacaaaatatagaacccaaattggtactttcttagaccagtgtaacctcacacctcagttttgcttttccaaccctgacttgaaaggcatatttgtatctttttattagtgatagtgaagctgtgacactaaccttttatacaaaagagtaaagaaagaaaaactacagcgattaagatgagaacagttctgcagttgttgaactagatcacagcattgtaggcagaataaaaaatgttcatatctgagaatattcctttcgccatcttttcccaaggccagacctcctggtggagcacagttaaaagtaacattctgggcctttgtaatcggagggctgtgtctccagctggcagcctttgttttaatatataatgcaggactgtggaaaacagttggcatagaatattttcacctaaaaaagaaagaaaagacatacaaaactggattaattgcaaaaagagaatacagtaaaataccatataactggacaaagctagaagaacctttagaagatttgtctgaaaacagatttcaagagtgagcttttatacactgctcactaatttgcttgattactaccaactcttcttaaagttaacacgtttaaggtatttctggacttcctagccttttagcaagcttagaggaactagccattagctagtgatgtaaaaatattttggggactgatgcccttaaaggttatgcccttgaaagttcttaccttttctctagtgatattaaggaacgagtgggtagtgttctcagggtgaccagctgccctaaagtgcctgggattgagggtttccctggatgcgggactttccctggatacaaaacttttagcagagttttgtatatatgtggatttttctgataagtagcacatcagaggccttaaccactgcccaaaagcgattctccattgagagtacatatcttgaacttaagaaattcatttgctctgatttttaatcttgtaaagtttttgctaaactcaaaacaagtcccaggcacaccagaaggagctgaccaccttaggtgttcttgtgatttatccttacttccctatgttgtcatagttgcttctaaactcagctgcactatggctgtcaacatttctgatacttattgggatatgtgccatccagtcatttagtactttgaatggaacatgagatttataacacaggtaatagctgaaggtaccagtatggtggtgagactcacacttagtgatccagctaaggtaactgatgttataatggaacagagaagaggccaactagatagctaagttcttctgaacctatgtgtatatgtaagtacaaatcatgcgtccttatggggttaaacttaatctgaaatttacatttttcatagtaaaaggaaaccaattgttgcagatttcttttcttgtgaggaaatacatggcctttgatgctctggcgtctactgcatttcccagtctgttctgctcgagaagccagaatgtgttgttaacatttttccgtgaatgttgtgttaaaatgattaaatgcatcagccaatggcaagtgaaggaattgggtgtcctgatgcagactgagcagtttctctcaattgtagcctcatactcataaggtgcttaccagctagaacattgagcacgtgaggtgagattttttttctctgatggcattaactttgtaatgcaatatgatggatgcagaccctgttcttgtttccctctggaagtccttagtggctgcatccttggtgcactgtgatggagatattaaatgtgttctttgtgagctttcgttctatgattgtcaaaagtacgatgtggttccttttttatttttattaaacaatgagctgaggctttattacagctggttttcaagttaaaattgttgaatactgatgtctttctcccacctacaccaaatattttagtctatttaaagtacaaaaaaagttctgcttaagaaaacattgcttacatgtcctgtgatttctggtcaatttttatatatatttgtgtgcatcatctgtatgtgctttcactttttaccttgtttgctcttacctgtgttaacagccctgtcaccgttgaaaggtggacagttttcctagcattaaaagaaagccatttgagttgtttaccatgttaaaaaaaaaaaaaaaa

SEQ ID NO: 106 - DNA, 9148 bp, Homo sapiens
acacagcctgggggcatccgaatgcacgggagatgttttacactcagatgaaacaaactgtttagacctcggggaaaagagactgtgcttgaacaaaatgaaccaggagaaagcgccctcctgagacatgtctctgctttcatgtttgaattgcctgggattctgttctctaatttctgatccttataaactaaaactgcctaggaacattgagcatcctgactttgaaggagtctctgtggtgtttttgtgctaccatacatggggaataatgatgtgaggcagagggagagggaatgaatgggagagccaagagggaagagcgagccggggggaaaggagcgcgcagtgtttcctgctgcggttaggacctcacgccttgccagtacagagctcggtggcaagagccgctgggagctgctcccatcagttagaggatgtggagagggagcaccagaagaggacagcccgcagcctggctcgcagcctgagggacgctgtgggtgctcccagccgggcgagcacgctctgggagcggatctgcaggggagaagcacgcgagcctaacgtgagcgtcccgcctgtcgcgtgtcctgccttggtaagcgccctctccggtccttccacactgaaagcttccagcagagatcaagggaaggagtattgtgtgagacttgcagatttcctcctttctgtctggactggtttgatatttgcctgttgaaaagattactgaacgcagtgtgacaagatgagccgtctagctgcgttctgcttgcctgtgtgtgtgacacgtccaggtgtgaggccaaacctgagaagtgcagactgctcactgatagacgttgctgtaaacagtagtgccctgggtgtacagctggtctcaggatcggagaccccggacttattctctgctcggtgacacggccggcttcctgccgcagagctcctggtttctgttgatggcagttgataattggtagccacagtctgcggtcggagccacagcatttgagtctagcacctggggtgggccctgctgatacagtagagagagagtgaacgaggcagacagaaacacaccccccccccctccacgctcacacactctcccacaccccatgccagctataactgcagctctgagctgcctggagaggagattgccggaagctgaagggatgctttgaacgtgggggggctgcgtcacagttggactcccacttgcagaggacctgattatgtccagtgaccacctgaacaacagcacactgaaggaggctcagttcaaagacctgttcttaaaaaaagcggagctggagttcgcccaaatcatcatcatcgtcgtggtggtcacggtgatggtggtggtcatcgtctgcctgctgaaccactacaaagtctccacgcggtccttcatcaaccgcccgaaccagagccggaggcgggaggacgggctgccgcaggaagggtgcctgtggccttcagacagcgccgcaccgcggctgggcgcctcggagatcatgcatgccccgcggtccagggacaggttcacagcgccgtccttcatccagagggatcgcttcagccgcttccagcccacctacccctatgtgcagcacgagattgatcttcctcccaccatctccctgtccgacggtgaagagccacctccttaccaggggccctgcaccctgcagctccgggaccctgaacagcagatggaactcaaccgagagtccgtgagggccccacccaaccgaaccatatttgacagtgatttaatagacattgctatgtatagcgggggtccatgcccacccagcagcaactcgggcatcagtgcaagcacctgcagcagtaacgggaggatggaggggccaccccccacatacagcgaggtgatgggccaccacccaggcgcctctttcctccatcaccagcgcagcaacgcacacaggggcagcagactgcagtttcagcagaacaatgcagagagcacaatagtacccatcaaaggcaaagataggaagcctgggaacctggtctgattccttccaacgtgcacttcagctggagaaagaaaccaagaagggaagcggccgctgggcccctcctgcgcacagtgttgttcagtttcacatggtacaaataagtaaaaccaaatgagcaaacacggtctttgtttctgattccttttaggggaattgcatgcaaactagactgaaatgatacaaacttccatctggtctgaccgcaaacagtgtttatttggggacaggggttgggatgggggtgtgggcaggggaaaacagagaacgggatgctttgaagataccatgaaataaaacccacagaggtatttgatgtatttaattgtgaaaggagactttgcagataaatgaggccagaatggcatgttttataattaactgaataaagaaggaagcattattatatattattgtggggaagaaccagccagttcgctttttctcctaaggtgtggaacttttattttgttttaaaaatatgaatcaaaattcctgtgttgtgtgccaaggtataaagtggagaagttagatgagtgcaaggagctcctttgtgttgtgatgatgtgttttaaaagttgcactatcttaatgttgaaaatatttacaagggaactgttttacgtgaagttctgtatgttgtcttttcacctgtggattgtaatcaggcccaaggaatatcctggagtggtccccagaagcatccaagaaaagatatttggggacgtagcctaacattttaccaacttacgtaaatcaaaaaagtcattattgttgcaggagtttgcatcaaatagcagtgcatcgctgaagcttttggagacttttggatggaagataagatagggaagattaagttccagcatttctgacttgttattttgagttactctgctactcttaggctgcatagtttatgagaaaatgaacacatgcatttatggatccagtatcatgcagtgctgccctcatcctccagcagtgcaatttcttcagtaatttagatttttttcactatagcatgaaatatattcaaatacataccttattttatgcaataaattgtttaaaatgcaaggtggttattctgcatactgttgaaatatgtgactcctcagtatattcccattgcctctccccctttcctcgacagcttagttcagttctgcagggctgctcagttcacaggaggctcccagcagccaccccacatccagcctacacagaacttcgtgtgggagtggtgtgggtggtggtttcttatgctttggaagcccctagaaataatgacggaagaatgccatgttgctgatcgtggtaataagccattgtgggttattgtatgtcactagtattagcatagcattcttaaaggaatgcagtgctcaaaacctacccaaattcccgcaggattctaccaaacccttccccaggccagcttttgtactgaaggcaagaactggacagtcagagaacagtggagggggcaagtgactgaagagcaccgggtaaaaagcacaacatgcagttaaaatgcaactagaaaactaattttaaatattgttagttttaatattcctgatatttacaaatattcattcttatatacaatgaaaaaaataactttcttctgcagatgtaagcactggcttttataagagcagcagccaacacgtttagcagacactgcgcgtggagaagggcttatctgcagtacactctgccatgtggagggtgggcctctgtggcctcttcacataacaagatgagctggaatgatgattccatgactcccacctatgcagccttaaagccaaatccgcgtgtgtgtgtttgtgtctgtctgtgggtctcgaaggtgatccgtcggtgcggtggctctgtgctgtaactggagagactgttccaaaccccaagagttgtctgatcctagtctgttcccttctgcttcttacctctgtagataggtcactggtttttgtttgtttgttttgaggattggaatttccattacattcatcctttgcacacagtaacatccacagaactagtccaactcttaaaaggagagaggaaaaacacaggcaccagttgtcagctcatgcttacaacctgtgtggaagtatatacagttgagagtcacagtggaggttctgagactggattcagtcttgttccagtgacagttggaaggcctctgctggagagacaccagctctcagggcagagattggcttggggccagaaggaccctccccaaccctggagacaccctgaaggttcactggctctccagattagcctctcttcctctgtcaggcaaagatgaggagcccgtgttcccatcgggccctgctggcagggacttgcagtggattcttggtcaggtgtgcccacagatgcggaggcgaggtgagtgattccatcatttcagttctcacctgcagttttggtgaagcaggagatgcaccccacagctctagctctcaaatggcttcacagtccttacttctctacctgcctcaagaaggggctcagagcagagacttgtgaattccttagtaactgtgagtatatgaatgtgttgcacatgtccacagtattggcgagataattacataattcagatacctttaatcatctttcaagaaagaggctcctcccattcaaccaccctagagaactgcctttgttaaatagttatttaaagactcatacatatcaaaccatgactttgaaaggtcttcgaggctggggctctgtaatgaattagtttaaaagccaaggtcataacatgaattgatggtcaatttcccttcagcagaaggaaaaggtgatttagatcagtagctcttttgaaggttgtggctgacctgttcataccgtgtcgcctcatggctagtgtggcgttgaaagagtagcgactgggaagatacaacttacacagtggggcctattgttctttcaagaaccctttttttagcttatagaacccatgggtccagtttagtaacgagtgatttaggcaatcaatgataggtttataatcttagattattccagcaaagtgtggattgcattgttaggaagaacatttggtgggaatgaacactcctgggcataccgctgacttttgtcccttgttcccggtgtaggagacccaaggcatcttgaatcccatctataagaacacaatcttccagcatacgtttgctttttcagaaactctagcattctctttaaatactgacgcaatccttaatggaaaagagatttcatgaagcaaattatgtatttcaatagttcttctatttttagtgtccaaaatttactaatacagaagcttgacaagcatgtcctcaccctccccaccacataaacacatggacacacacccaagccacaagaaatcccaagagagcagaagcgaatttttaaaagatttatcgtgaggactgcatttccattcactaattttggctcaaacttatgaggcaggaaataggggccaacagtaaatgggggaggcctcctgacaccagcagaggaattttgtacccaggcgaggacttcttgaacttctgcgtatctccgtttgatctctttcacctttatttcatcttcataagaatgagaaaggctcaaaaggaagcacttttagaaatcttctctgacctagaagaatccatccaaatccctgccttcctctctgaaccaacagttcccttctctgacaggggccatcctctatcttccatccagcggctcttctttttaggaaggctctggtgcagagcacttcaaatatgtcctcaggccagatactgattgctagtagagagacacccggcacccagtccgaagccctccctcaaaggaccggctcatggcgttggtcactggcaggctcagagacattctgctgtgggcgcagggagcccggccccccatgcagccatgactggatgcgcccccatctcgggggcttgctgcactgcttgtttattgaattttgctacttagaatggcaacattaactttgtgtaccattcattttttaaaaattttccaaagctcggcagtgtatgaaagaaaaaactgggaaagatacttggtttctgttaacttttgtgttgcttgcttaagtgattaaagccagtgcttggagccaagccttcatgccacgaacatgctccacagcctgccctttgctctcctgctcacactgaccaagaatgccgcgtgcttggcctactgaggtgaaaggacaattgaatgacaggtgggcaaagggagaacttccccttcttggtgcgaggaaagtcacaaatttaaaaatgttgcttccagcccagatcctaaatgctagttctcagcagctgcgtggcttaccgttcgccatttccaccaccgccagctgccagcaccgctacagatcacagagatgtgaacagacaatggaaagcactcttagccttgcagtggtctacattttttaggaaccaatatttcagcattctttattacccggcacgctgtgtcctttgcagagttcaagtttatgttactgccagggtcagacagtcatttgctgctgctgctgctgctgctgcttctcgaactggatgcattaggaagctgctgtctgagtgtaggaatgtcttgctaagaaagcaatgtcttccttcatccttttctttcttccctctgcgtgtccttgtttttgtgtaatgcgggagagggttagagctatagagattatatatacactatccgtgcacattatatatatgtagatatacccctatcatgtcagagatctgcatgtcagtttttcagcaactaaggtgcctcatgttctgagttcagcagatataggaaccaagccgccccctcctgcacttgatgctcccacctttgttgtgcctcacttaaaatggtgcttttttcagttgtctgtcttttcttatgtttttatttgtaaggtgctgtatataagttgaatatattatgcacatatcctacccaatgggtagaacaaaaagttgttaatactgtaatataatgtatagatgataccaattttaacagaaatggcatagaatttgtgaatgcctatgtgctttgtcctcttttgtaaggaaatttgcaaatggatgcatacagattaaagtctatgtagtttattttcctattaaatatcaatattataacacaagagaaagaagtgtgaacaaacaagcaacagtttatgaccagcgtatatatagcaatggaaagttgcatctttgctgtgaaaacactttaaagaaaatactttttaaaaaatcccacagctttttggttgccactagacgcttcttattttaatcattttagtaatgctcagctggaccagtgttagttatatttgagtcagaaaaatgttgtttttcaacttgctttataatctcctgcatctatctcctgctgtagcatcacgaaggtgtcaggcaacagtgaaaagtgcacatttttgttgttgcagaaactgtgtcagaggaataagtaaatcagcctgcagcagaagactttgttcagctccagaggcatctgtgaccgtctgtgtccaagtctctctgtgcctttttcttttacaaactgaagctgtggagccaatgaagtaacagtagagattgtagggaaagaatacctcaggaaaaacaaatacacttacaagaagaccctgttcttagaaaatgtgtttagttatgggttagcactagaagagacttggctgtcagccagccaagtgaaggacctctcatccattcccattcatgtcccatcataatacggacccaaaaagcaaactcggttttgccatcagttagaaattacgttttggattgtatattgttacatctctcttccggcttagtttttagtgtctgattgtgacctctgcatttatcttcaaataccctaattttaaaacaaaagaacaagaaaagtttataacaccatgttcactaaaaccacggttgaatcttgggtgtgggcatcctttcgagtgttgtccataagagcagttcgtggaattttgcccatctgacccatattatcagcttattctgccaccagagtagagtctaataaattccaaagtttttatttgctccatggtgtatgttctgactttgaaaatgtcagattctataatcatacccctaacatccaggaaacaaatgacagattatctttaaactgaaattgactctacaatgcaacccttaatgctgaatggattaaaaaagtcagcccttttagtatctgtttgaaagggccgtaaaaagttgacacttttgttgttgtggatcctgcgtgtctagacccacgtgttgtttccatcgtatactgtagggtgcaccccttgggattcatcattaagaactgaggctcactgttgtcagaaacaaagctcccaccccccaggttcaaccttgtgggagaactgttgagcatgagaatgttctagactcagaggtactaaaatttgttaccacatcattgcttcctttctacaggacgaattgaggcttaaactttactgttaatgatactggttcattttaatgtgcttgttggtatgttgctatttttcatttcatagctttcaaaaatcatgctaattgtatacttgtctagtttaaggctattttaaaatatgtacaatactattcacagcatttagttcgtttaatttttattataaagcaatctactaaaaaagtacaactgtatttgaacttttcaatagttgtttgtgagctatgataatcaaaagtcattaaagtcttttttaacaaacattcgtgcttacttttcaacataattcccagttatatacagaaaaagatttccacctgtcacgtatctgcctcttttacctgagcaatggtgtagttcttagacctaaggtctgtaattgcaatacttttaaagaaagatgttgctctaagtgctgtttgttagttatgaaatcagatttttctgcttgttcttaatgctgtggtcaaaccatagcacaaaatcattaaaaataatcagcggcatac

SEQ ID NO: 107 - DNA, 5743 bp, Homo sapiens
accggattttccttctccctctctctatctccacagatcccttcccaagaggagtctcctgctaaaacttcatcatctcaagttgacctgccacttcacccaaggaggcaagctcttgcctgtaacagtgtatttgccaacatggcacccaaaaagaagattgtcaaaaagaacaaaggagatatcaatgagatgactataatcgtagaagatagccccctaaacaaactgaatgctttgaatgggctcctagagggaggcaatggccttagctgcatttcttctgaactaacagatgcttcttatggccccaacctcttggaaggtttaagtaaaatgcggcaggagaacttcctatgtgacttagtcattggtaccaaaaccaaatcctttgatgttcataagtcagtcatggcttcatgcagtgagtatttttacaacatcctaaaaaaagacccgtcaattcagagggtggatctcaatgatatctcaccactaggcctggccactgtcattgcatatgcctacactggaaagctcactctctccttgtatacaataggaagcattatttctgctgctgtttatcttcagatccatactcttgtaaagatgtgcagtgattttctgatacgggagatgagtgttgagaattgcatgtatgttgttaatattgctgaaacatactccctaaaaaatgcaaaagcagcagcccagaaatttattcgggataacttccttgaatttgcagaatcggatcagtttatgaaacttacatttgaacaaattaatgaacttcttatagatgatgacttacagttgccttctgagatagtagcattccagattgcaatgaaatggttagaatttgaccaaaagagagtaaaatacgctgcagatcttttgagcaatattcgctttggtaccatctctgcacaagacctggtcaattatgttcaatccgtaccaagaatgatgcaagatgctgattgtcacagacttctcgtagatgctatgaactaccacttgcttccatatcatcaaaacacattgcaatctaggcgaacaagaatccgaggtggctgccgagtcctcgtcactgttgggggacgcccaggccttactgagaagtcccttagcagagacatcttgtatagagaccctgaaaatggatggagcaagcttacggaaatgccagccaaaagttttaatcagtgtgtggctgtgatggatggatttctttatgtagccggtggtgaagaccagaatgatgcaagaaatcaagccaagcatgcagtcagcaatttctgcagatacgatccccgcttcaacacctggatacacctggccagcatgaaccagaagcgcacgcacttcagcctgagcgtgttcaacgggctcgtgtacgccgcgggcggccgcaacgcagaaggaagcctggcctcgctggagtgctacgtgccctccaccaatcagtggcagccgaagacgcccctggaggtggcgcgctgctgccacgctagcgcggtcgccgacggccgcgtgctggtgaccggaggctacatagccaacgcctactcgcgctctgtgtgcgcctacgacccggccagcgactcgtggcaggagctgccgaacctcagcacaccccggggctggcactgcgcggtcacgctgagcgacagagtgtacgtgatgggcggcagccagctggggccgcgcggggagcgcgtggacgtgctcaccgtggagtgctacagccccgcgaccggccagtggagctacgcggcgccgctgcaggtgggagtgagcactgcgggcgtctcggcgctgcatggccgcgcctacctggtggggggctggaacgagggcgagaagaagtacaagaagtgcatccagtgcttcagccccgagctcaacgagtggacggaggacgacgagctacccgaggccactgtcggcgtgtcctgctgcaccctctcgatgcccaacaacgtgactcgggaatcccgggccagttcggtatcttctgtgccagtcagtatctgagcccaggtagatgcagggacgcaggaagaacacgttatttattcgtagagccacgtggttaacctctgagttcgcgaaaaggaaaatatttaacatttactacactgattgtattgtaaaatatgtcgaggcacatgtcctgatggctttaaattcctggtatggcataatctacctcttttttttttttttttttttagcaaaatacagggcaatggccaacaaaagaaacaatttatttcagcggccactgggtggcagacggaattcgttataggcactctcccaaggcggcatgtttcctaaatgtatagcggttacacccacatttgagattttttcctctacacgttagtacacttgaggtttatgtaagtgatttcatgttcaaaagtttattttcctctctctcttttttctttaggaagttgaagatattcatatagattttatttatttaaaaatggaaattgtcgatctccataaagacttaagatttaattctgtatttcaacgcaattttccccccatatgtgattgagtaaaggattttgaaagatatcccatgacaacgtaataaagcttaaaacaagatctgaccgaaaaggaatagggattccacccagggaccctaaatttgataacctttgtgttagcggacattcctcttcctccatgcctcaggccccagtttattttctaccataaaatcatgctctcaatgaagtaattgatatgaatcatttaatttatagcataaatttaagtcatttggttgtttcaactagaaggatttgcattttatcccttgtcctctattaaagaagaatttcacataccctgggagccttaccctcaccctaaaaactacaccaacctggttaaaggcaaccttggccctaatgtacaccccgcgaagatcaccaaataaaactatgtccctaaggaccattagccttaagcttagagagcttgaagtttacacaaccaataacaataattttatttgccccaatcttttatatgataagaatgatagaaacatttggaatttgtagatttggtagtaactggatgaatgggttctcctgttgataaatgccattgtttcccatttaatatggatcctcctgatttcttaagtaaaaatcaagcactcatctcacgtatataaaaatatatactcattctgtcctatttttattaatctcatctgctccaaatgagctttggatttataatcaaagtgtacccacttgatagcacttttcctatatgtttgccaagttttggggaaagggaatgactgtagtaaatgatacatattttccttttttataatttatcactttattctttgacagtttatttgttttggagaggaagtggcctatcaattatgggttatgtgcaattggattttgaaaaataaaacaagctatttaggaattgaacatgagatatatggaaatataatttggtttttgttaatctcatcctctccaccttgtgtagataggttattgctagttatgatatttatttctaaaatatgttatttgaactgtgaaaagtggttcatatagtacactttgtggaacaattttatatcattaccccgatgaaaagttcaatctctggatatttaatgataacactcaggtaagggctacaaacgctgtaaattaagaacaagatattattaatgtaaaagcgctgggctgtttccttatcccacacaaagaatcttttaccttggtatatgtggatatggtatattaccttggtgtatgtatatgtgtgtatacgcacacactcatacaactgagaagcctatagtatatggttaatttttggagaaaagggtgttttattgtgggttacagatcataagtgagtgaatagatgtaattccttgatgcacaccaatagatgtgttcccattgacatcttagaagtattgtatgaagaggaggacctagggcttgaaatgaaatgagaatcaatcaattgcaacattacatgatggaataatgagaagagatactgaaactagaggatttttcatctatcaaagcttgataaattaggttgtgcaaaaacttggcagtggctttctagagatgaaactggagacatgttagtgctggataaatcatttaaaattaccatttaatttattttctacattgtttatctgaagactcagaaaatccacatatttgagcttaccagactcttgggtgcattgctgttctatcttctgcttcaacagttaggaaaataaagaccaatatgaatttggaatgtcagaatttctgacataacacattggcgaggagtatggaatgtaagggtcggtgaaagtttcatatcctggaacatcttgcattgccaattgaaagacataaaagtatgcagaatcaaaataatatgtgtccactttcatgtgtaagtgaaacatattctttacaccaactattgaagcagttgctcctagaaacctagtttctccagatttcccaagtggaaaatatttagtatgttttaagcttacattcaattactccagagtcttaggacccaaccatatacttccttttattttttattaaagaaaatgacttgttatttttgtaacggctgagtcctgtgatcaaataaaagcatcagttcaatatatcagggaaattgcatgttacccagcaactgaaataataaaattcaagctctctttttctaaatgggccagagacctgatgagaaagtctccaggaagccaaactttaacatactttgtccatttttagttaggttcttggtgccaagttgtcatccctgatgcattagttgctttcagtgcattgaatgaattttatttttacttcctatgttgtaagaatggttttgaatagaaggtcagtgatggtacagattcgtataattttaaaacatgattagatggtagtgaagtgttatgagtgaggaggtataattgatgtcatgaggaagtgagtactgaatggttctatgatttaaggtaaagcagcagttgtagtaagtgtattttacaaatacacatgtaaatagaggtttacctggaaatatgtacgttctaaaaggtcaattttttaattttatttttttgctggttatcctggccaagtgtcttcagaactcatccaagttacgagacgaaataaactaaaatcacctcattaatttttttcccttagttacaaccaaatgaatttatgtaatctctgaatgaactacatccctattccagccgctgatgaatatgttctccagcacaaggcagcattaaaaggaaatacttttcagtatttcttttcatgccaaaaaacctacagaataattttccaaacagtcctttattcgtaattataagaattaaacaatctaaaatattaaagatttaccctccagcacattcactgggtaaagaccatttaatttgccctctcagggaatttgaaataaattatttgtcctggatattctttaaaaactttttatttattcagcaaattttggcaaaaaaatttctttctttgcttaaaacattctggtactatataaggaacaacaaactaaaatgtatgtagtgttattttgtaatctcatcactatcaataaagctgcattcaataagaccttagtcaatgactaaata

SEQ ID NO: 108 - DNA, 4246 bp, Homo sapiens
acctcgggccgcccccgccgccgagccggcccagggataaagtggcggcgcagacgccgcaccctgtcgccgcgaagccggtcgcgcgcagctcgtcccggccctggcccgccgcaaacgaggatccgctgcgctcggggaacgcgacagcggcgctcgtggccccggacctgaagacccttccagcatgccagaggaaagttcccccaggcggaccccgcagagcattccctaccaggacctccctcacctggtcaatgcagacggacagtacctcttctgcaggtactggaaacccacaggcacacccaaggccctcatctttgtgtcccatggagccggagagcacagtggccgctatgaagagctggctcggatgctgatggggctggacctgctggtgttcgcccacgaccatgttggccacggacagagcgaaggggagaggatggtagtgtctgacttccacgttttcgtcagggatgtgttgcagcatgtggattccatgcagaaagactaccctgggcttcctgtcttccttctgggccactccatgggaggcgccatcgccatcctcacggccgcagagaggccgggccacttcgccggcatggtactcatttcgcctctggttcttgccaatcctgaatctgcaacaactttcaaggtccttgctgcgaaagtgctcaaccttgtgctgccaaacttgtccctcgggcccatcgactccagcgtgctctctcggaataagacagaggtcgacatttataactcagaccccctgatctgccgggcagggctgaaggtgtgcttcggcatccaactgctgaatgccgtctcacgggtggagcgcgccctccccaagctgactgtgcccttcctgctgctccagggctctgccgatcgcctatgtgacagcaaaggggcctacctgctcatggagttagccaagagccaggacaagactctcaagatttatgaaggtgcctaccatgttctccacaaggagcttcctgaagtcaccaactccgtcttccatgaaataaacatgtgggtctctcaaaggacagccacggcaggaactgcgtccccaccctgaatgcattggccggtgcccggctcatggtctgggggatgcaggcaggggaagggcagagatggcttctcagatatggcttgccaaaaaaaaaaaaaaaaaaaaatcagaaattggagaaatccttagcacaattttctaaaaaataacagacatttttgttatacattagactatcagacactggacctaccttaatggttagacactttatgcaaaaaaagagaaaggtcccaggtgattttccacaaagaatgtgctaaaatgtccactgaaaacaaagccaagcctctgccctgcctctcccagctcccacaagggttccaggaattcctggtgttcccaggacaccagactgcaataactggaggcgcctccttcctgcccacccttcgctcacgccccagcgccctctctgaccagcctccgcttggtggccttcctctggccgtgtgatgaggtggttgctgtctccataggggccagctccccagggcagactcacgtgcccctctgaggctcagaaaatgcccagcccttcctcaaaatgagcagccacccatgactttgtgggctccttgttagcctgagaccaggctttgcagaggggcggggggtgaggcttagcccagaaggagaactgagcaggaaaccaaggctcttctctgtcccctgcccttcccctcctgccagggggaggctcaggttggtccccgagtgccgcctgtactcacaaaggctgcctttcctctagagtcactaattttacctgatgctatgagagaatcatattgaagatgaaatgtctaatatataatgtatattttaaagcagagactattttggtggataggtgggagggagcaaggggagtttgagggaatcagagcttgatgctactgtacagaactggacaggttgggccggcagtggtggggccagagggctctgtgctctaggagctaagccagcagcccccgagaggggacttggctgggcctttcctatgggcaaggcccagtgctcttcctgcccaccagggaccatggagcagtggcaccctatggggctatgatccctaggcctgggcctgggcctgcctatggcccagagctaccctgggagtgtcagtgctagcagcacagctacctctggtggcaggagaagagaggcccagcacagcagcaggccaggccttcctgtccaggtctgcatggagcactcggtgacccagagcagggactggaggcacccccagccctgccccaggccacagcaggacaggccgggacaggcctcacccaaggccaaggctggcatcagccaatcattcagagctgaggccctgggcctagcctgcccttctcaggtgccaataccaccccagccctgcccttggcctcactttttcccagcaataagtggggttcaccacccgcctcgggaatactttccccttctaaatgggacttgctgttacctcaggaggctccttagtgcaaatatgaccctggtcagggctttgccaccgttgaagccctgcagaaggtgcaatgtaggggttctggggccacagaggagaggccacttcccaccaggacccccaacatgaagtctaggcctcaggggctcccgcccttcttcctccagcagcgggaactgccactgctctcccaggccctgttctggaggctaaccttggttcctggagagtgtgcccctccaccctccctccagcagccctgatcacaccatgagagccaggaacgggtcaccctgctgaagatcactctgtgccctgggggaggagccaagccctcaccccacaaggggcaggtgggggcttggttgctgacccggcccaagtccccacagagcaccttctgtagctccagcttgtctccctggcttctctttgaaggagaaaaatgtaaaatatgcactgagaaagccagccccgcctgcttagtcagccccggcagcagggcagccatgggaactcaggaaaagcaggaaccctttccaaaagcccagagatgccctgggctcagatctgtaattctcccaggagctgtgatagagcaggccacacaaagtccctacgcctccctgctgcctcccccagatgcatgtggtggcatcaccattccccaaattgaatatcagcatgcggcctgaccagggactctttagatgcatgaatttatttatatgaaggctctcacagagacacacacagcacttcagtagcatttgcattcctggttaaagaatcaccaatatttaaaataaaaactttcctgaaattgggactgtcatgttatccagaagggctggtacatccgcccaccatgtccccctgctgggtcaggagccaacacaggaccctgcgtgtgagcgtgcctgacatctcacgcacggccactccagagccggtccctgtccttggaaagctgtgaagccttgcgttgagttccttctcgatactgacggctccgtgctgacattctgagctctggagtcacaccagcgcaggggcgtggaggaactgaggtttggaaggaatgccaggtctcgcacagcttggcctcgagaaggtgagaggaaggcaaaggccagggaggggacccagagaggcctggcacacaaggcccaagcaccaccgtcaacacagcccagtccatacagaaatgggtttcatgcctgaaaagctttttacagaaagatgccgcctgtagccagtgacagccgcaaccctacaggcctcagttccttgcagaggtgaggggtagagagtcagcctccctcccttccagcagcgacccagcttccctccacttccaggtggtgctgggctcaccgagggagcactggtgggtgctctgaaaacccacaggatcccacctccaggcccacctgggtcccatctcactctcttcttctttcaccaattgctaacatagaccttgttgggatcacgatggcttcacaagccagctgttgggtttgctatgtcactgtggctcagtcacatccctgcgtgtatactgtctgcggggcacatatgtatccatttagagctaaaggaatcagtgtacactacagctaatcctaataaatccgatgttttcggaatggcaaaaaaaaaaa

SEQ ID NO: 109 - DNA, 5271 bp, Homo sapiens
acttagaatcggcaaatcatagagagaagctaaatgctctcagctgcactataccaaatcaaagctgagatgaataatgaacttaattttccataaagacattctgtttggcattccagctaataaggttccacaagatgaatggacagggtacaccccacgaggtaaagatgatgaaattccatgccgaagaatgcggagtggcagttatatcaaggccatgggggatgaagacagtggagactcagacacgagtcctaagccttctccaaaagttgctgcgcggagagaaagctatctcaaggctactcagccatcccttacagaactcaccacactcaaaatctccaatgaacactcacccaaactccagatccggagtcatagttacctgagggcagtgagtgaagtctccatcaaccggagcctggacagcctggaccctgcaggcttgctcacatcaccaaagttccgctccaggaatgagagctacatgcgagccatgagcaccatcagccaggtgagcgagatggaagtgaacgggcagttcgagtccgtgtgcgagtccgtgttcagcgagctggagtcgcaggccgtggaagcgctggacctgcccatgcccggctgcttccgcatgcggagccacagctatgtgcgggccattgagaaaggctgctcccaggacgacgagtgcgtgtccctgaggtcgtcctcgccgccgcgcaccaccaccaccgttaggaccatccagagcagcacggtgtcatcttgcattacaacatataagaagacaccacctccagtcccacccagaactaccacgaaacctttcatttctatcacagcccagagtagcacagagtcagcccaggatgcctacatggacggacagggccagcgaggagatattatcagccagtctggactcagcaactccaccgagagcctggacagtatgaaggctctgacagccgccatcgaagctgcaaacgcccagatccatggccctgccagtcaacacatgggcaataacactgccaccgtcaccaccacgactaccatagccaccgtcaccacggaggacaggaagaaggaccactttaagaaaaatcgatgcctgtctatcgggatacaggtggatgatgctgaagaacctgacaaaacaggggagaataaagcacccagtaagttccagtccgtgggagtgcaagtagaagaagagaagtgcttccgcaggttcactcgatccaacagtgtgacgacagcagtacaggccgacctggacttccatgataatctggaaaattctctggaatctatagaggacaattcgtgtcctggccccatggccagacagttctcccgcgatgccagcacctccacagtcagcattcagggctcaggaaaccattaccatgcctgtgccgccgatgatgactttgacacggattttgacccctctattctgcctcctccggacccctggattgactctatcactgaagaccctctggaggccgtgcaaaggtcagtgtgccaccgggatggccactggttcctgaagcttctccaggcagagcgagaccgcatggaggggtggtgtcaacagatggagcgggaagaacgggaaaacaacctgcccgaagacattctaggaaaaatccgaaccgcagtgggcagtgcccaacttctcatggcccagaaattctaccagttcagagaactgtgtgaagaaaacctgaatcctaatgctcatccaagacccacctcccaggatttggcggggttttgggacatgctgcagttgtccatagaaaatattagtatgaaatttgatgaacttcatcagttaaaggccaataattggaaacagatggatcctcttgacaagaaggagagaagggcccctcctccagtgccaaagaagccggcgaagggccccgcgccgctgatccgggagcgctcgctggagagctcgcagcgccaggaggcccgcaagcgcctgatggccgccaagcgcgccgcgtccgtccgccagaactcggccaccgagagcgccgagagcatcgagatctacatccccgaggcgcagacccggctctgagcgccccgcagcccggccgccgccgccaagcatctgtcccctcctcccccggccgctcctctgccggctgcctctccccctccgagcccgtccgctcccgagctcggtgacttccactgtcgcggtgtagttgtccacctcgcaggagccgccccccgggcccccctcagccccccacttcccgtacccgtttgcccatctccttcttcaccgagcttcgccccctgtcctgatgccgtcgccctgcctcatactgagatccaaccctttattttctgggcaaagccaaacccacctgtgtagaagtgatgcctttaggtcacccgccgtcctcagttctctcgagctagtctgttcagcaatataaaaccatagggtatttcagaaatccagtatcacagggtgatcctttgggacttaccgtcttccacgtgaaagaaactaggcctccgattccctttatttcccctaaatggttattcttttaaaaaagcagatggagcactttattcccaacctcagaaatcacaccatctcactggaatccatgagggacacagagagaggggaccaagcctggcctgggggtgggggacctggatgtgtagcaaggatgggagaagcgaaatctgcaggtgctgggggcacctgcacactcacagctgcacaaactgcctcactgttacttcatcaatcacagcttcaaatgtctcaatcagcagaagattgtaaattcgatctttcagggaaattaatctattctgaaaggcaataacatgaagcaaggcaaaggaggcactgatggtttagtatactacataagggatttttttgttctattattaagaaaatctagacctgaaatgttttctcaactcttattgtactgtgtatatttatattgttgtcgtggcggctgtttttaaagggaaagtgttggttctattaatttgttaagtgtccatccaggtgggcctacctgattccacatatataagtacatatctgcttataaagcgctgtaaatggcagcaaggctgtttttggagaagagtttgggttttcctaccatccctttgaatgctacacatccgtctattttaacccaagtagttcgtatttcagatatattttctcctttcatctcctctcactactgcagagtccagtaatacctagcataggattctgtcctgtgtcaaatggctaaaataaatttttgccccaatagacatgctgcctcattcaaaagagctgccgctgtcatcttgaggttccaggtagtgagagaagaaactcgacctgccagggtcaacagccatgaagaggtggggggagtcatgattcataaacactgaaagaagtcaaggcttttggcagagagtgttgatttagatttttagtcttgattgatgggcagtatgcatcggtgtctagctgaagttgtctttaaatgcccttactcgtcacagtttaaacacttaggatgtggcaatcttaagtatcaatggcattttatgtccagctaacatcctaaagcattagaaattaaaaacgaaagacttttaaaaacatacatcaaacatgcttgcaccagagaagctttttaaaataatacactctcatagccaggtgctaatttaattttacttatgaaattaagagaggtgatgggttctagcaacagatattttcacggacatattctaaaaccactagagaattcgctacctctcagagccatcgatgctttgagctacctttataaacagggcacaaatgtttactgctgtggtttacaagaaaagggctactcacttattttgaaaccaacgaaccaacttttaactagggtgaacaaagcactcaaagtgctttgtgaaattggagcatacagagattttgagcttcaagtatttgctagttttaaaaagaatacaccttttctttaccttgtagcagcaattaaaagtcacacaaagcttgcatcgagtagggccaactgccacttgggtagcctatggtcacattcaatactgagaatgacttggaactcacagattaatatgaaagaagcagcgttcatcccaagacccatgctcacaattacagctccgtgccctgaggtagagttgagatttggattaagaaatagatttctaatacgactcaagatcatcctacaatattttctttggaaactaatttagcccatgatattttaaagagagacaagagaaggcctatttatcttgtctaagtgaacggcatttgtatattcataagctatttttggtaagaattttaaatcttttagctcaaggcctacagggcatcatgatctttgccttccttgaaaatacaatttaaattgtacaaacactttataaaaagctaattattggtgttagaacatgaccccacacaatgctgcttgacccctgaaactgacattcatgagcataacctttgttacattgttctttttgatgtaatttgtagaaatgttttttagttcgtaatggaaaatgtatgtaccctgaaaaattacttattttgtttaactttggtataaaggtgttgggcattttcttggggagggggggattacaaaagaagtttgtctcccacatcaaaaaacgttcaaagaaattaagtatttattatattttttgcagatgtttccatacaattcacataacctttttgtaaagagagatgaagaaatggattaaagatttttaatatttgaaatggtaaatagaactaatttattgtaatatatttctgttatttatagatgtttccttaatgttttactgtgcattaccactttcatttaagccttatccttgtgaatttaccatttcttttttaaaacatgtctagatgcatattttaaataactggaatgtaaatcactagcatatctgaattcccaaatgtaatttttaaaaattattttggtttggaaaaaaaagattcatttgaaagccttcagatggaggggtgggaacatttttatggctttatgaattggaatttcataggcttatttacctagattgtgtgtgaacaaaaaaatattgtaaatagatgaatgtttcccataatgtaaaaagaagaaattaataaaataattaatgcactgctaaaaaaaaaaaaaa

SEQ ID NO: 110 - DNA, 2301 bp, Homo sapiens
aaacggagtgggagaagggggctagcgaggaggaagaggcgggaggtgcggcaggggcacaggtgacgctcctcccgcctgcctagcagagctccaggcgcacatccgcagtcagccacctcgcgcgcgcctccaggagcaaggatggagaggctgactctgaccaggacaattgggggccctctccttacagctacactcctaggaaagaccaccatcaatgattaccaggtgatcaggatgcccttctctcatctgtctacctacagcctggtttgggtcatggcagcagtggtgctgtgcacagcacaagtgcaagtggtgacccaggatgaaagagagcagctgtacacacctgcttccttaaaatgctctctgcaaaatgcccaggaagccctcattgtgacatggcagaaaaagaaagctgtaagcccagaaaacatggtcaccttcagcgagaaccatggggtggtgatccagcctgcctataaggacaagataaacattacccagctgggactccaaaactcaaccatcaccttctggaatatcaccctggaggatgaagggtgttacatgtgtctcttcaatacctttggttttgggaagatctcaggaacggcctgcctcaccgtctatgtacagcccatagtatcccttcactacaaattctctgaagaccacctaaatatcacttgctctgccactgcccgcccagcccccatggtcttctggaaggtccctcggtcagggattgaaaatagtacagtgactctgtctcacccaaatgggaccacgtctgttaccagcatcctccatatcaaagaccctaagaatcaggtggggaaggaggtgatctgccaggtgctgcacctggggactgtgaccgactttaagcaaaccgtcaacaaaggctattggttttcagttccgctattgctaagcattgtttccctggtaattcttctcgtcctaatctcaatcttactgtactggaaacgtcaccggaatcaggaccgagagccctaaataagtcacacagcaccctgaaagtgattccctggtctacttgaatttgacacaagagaaaagcaggaggaaaaggggccattctccaaaggacctgaaagagcaaaagaggtgggagcgaaagccttaaggatcccacgactttttactgccatctgagctactcagtgtttgaatcccaagaggaagtcagtttacctctcaggtctgttgtaggacttgattttgtaaagcaatgccatgttatgtggttgaaagggcactggacttagttagtatcaggagcactgagctcacagactgacttgggctcctactggtggggacctctgttagtcactttacctcatccaaagtataaaggaattggaccaaataatttaccacatagctctaaaacttaatttaaaatgtaattccagaaaaaaaaagggaataagcaaagggggaagaattgaaagagagagagaagaaagaatacagagagcttaccttttgcctttctgttgatgttacatctcttcttcctatgttcttaggtctatgagtctgtttccccatcatttggtatctagtccagttcctgcttactgctttgctaatagctggccttgctagaatccttggtttcactgctgttcttcatgtgcttctatgagatttactccaacacaaataggactgaatttattgtgaagtaacattggcaatcttaacttattcatttaacttatttttatagctagataaatattgttagtcttagacaatagctcacattttttgagaagcatgccctccctgtccatttgtcttataacatgacccagccctattttacgtcattctaaattcagcctcatataatgaaaatacattatgaaaacagatgtttaggagatttcctgtatagcagtcagccaattcatatgctttgtctctgctggcttctttttccatgcgttaacttttcccaatagcagaggaggcaaatatgagcatacaatccctttgttctaaagatattgttccagctagtggaatgatgttgaatctttaataaccataattagttgctttttcagtatcttctgctttgtctgtgtctatccagtggcctaggaattaaagtgtaagttgttttcgctgttaaattggatatttatatatatatatagcaagattttcatgtgttatttaattctgtattgtttcttatatttgtagtaaaatattgaacaattaaaagtgttgactccaaaaaaaaaaaaa

SEQ ID NO: 111 - DNA, 4256 bp, Homo sapiens
gccgcggcggtggggttggcagggtgtgctggggcctggaggaggcgccgcgcggccagggagccagcgggaggccgcgcctggcaggtttctgaaacagatcgtgagcttcatcaagagaattcaactggaaaaccaagactggtagactctctttttcttcagacaataggcaggagccaggcagagtccagggattcttggaacacctatcttttcttcggaggacactaagttctatttgaagacaaagttcaatatggcaacaggactgatgggacacgaaggagtcgctaccgtgatttggtgacagttcttcaaaacgacagtgtctcaaggaaaggtggacctaggaactcctgaacttttgggttgccttaagtgagaaatcagcatggctcaggcaagtctcctggcttgtgaaggcctagcaggtgtgagtttggttcccactgcagccagcaagaagatgatgctgagccagattgccagcaagcaggccgagaatggcgagcgggcaggtagccctgatgtgctgaggtgctcgagtcagggtcaccgaaaagacagtgataagtcccggagccgcaaagatgatgacagcttgtctgaggcctctcattcaaaaaagactgttaaaaaggtggtggtagtggaacaaaatggttcttttcaagtaaagattcccaaaaattttgtttgtgaacactgctttggagcctttcggagcagttaccacctaaagaggcacatccttattcacactggtgagaagccatttgaatgcgatatatgtgatatgcgtttcatccagaagtaccacctggaacgccacaagcgtgtgcacagtggtgaaaagccttaccagtgtgaacggtgtcatcagtgtttttctcggacagatcgattactcagacacaaacggatgtgccaagggtgccagtccaagacttccgacgggcagttttctctataggcgcaaggggccccgggtggtgggagtgatcagaagaacctgccgaagagcacaccccctctggtctgatggtcccaccaccgccccatgtgaacctgtcccactcctggaggagtggacccaggagaccagaagagtgcatcaggggacagtggccccagaacctcagctctgtaaataatctgagactatgagtatctcggggaagttcttacagcattcctgggtaggggagctagtccctggacccttggctgaggtcataggtggggactcaaggtacaggaccaagactgaagtgtggctcccacaaccttggactccagctggcagctgaaatggaaaagattggggaaggggatttgtttgttctgttcttgtttttgtttatccaaaagcaacttcagcgggtaaactgtggatacaggtaatccagaggcataagagtcctggtccaaagtagggactatagctggtccagctctccccaaaaattgggtttttagttgcagtagctcctcagtgtttcacaatcctgcacttcgcctcctttttgaggaagaataaggtcaggaatggcagctgagcttactttggcttccttatacactgtagggacaaaaggaaaaacggggtggagcagacaagggctggatccaaaaagtggatggcacctcttccttcctcaagggaaaaggaagagttgtgccagtgggtgttgtcatggcccatgtcacattggcacctgatggcatcagctcaaatgcctttaggaggaaacttgggtgagagtggcccatgaagcccttttcttctttttttggggagtcggtcttggagatggtatgtggctacctcgctgccattgactcctaaagtgagacagatgtgttgagcaaggagtcatggaagtcaaagtgggttctctctccttgtgccctcttaggaacaacccaagactggtcccaagttggctaacagctgctcaagaaacaaaggaatctggggtcttctgacatgcctgttgagcagtaggagctgttctccctccccaagtcctatcactgtattcaggtagaggaggtagggaggggtctgtcctttggtcccaaaaaacaagatctcggcttgcttcctgatggccatccctacccaacagagtgtgggggatgggggtgggggtgctgcagagaaaagactaaagaagaaacctaatgtaggttccattcttaaccatattctttgctcctctctgctccaataccaccaccttgtccactcccaaaaaagtaatcgggtgtgtgtgtgtgtgtgagagagagtgtgtgtgagatatgaatgcatgtatttgtatgcttgcaggagatggcatattattgagccaaacccttctctggccctcaccttcagggaggatgagtggaaaatagcctcctcttgcccaaacatgaagggtgcttgaggtctcagcaggagctgaagaacacaatttggggaacagaagggcttttgttttggagggtttttttttttaagatgaattcaacagcctggtggttaggatgtttctaacccaagccagggcttgtgaacatgaattttctaaggtgaaataaaccttttctttctgctaaagaaagaatccttatgggaagttttggggtttggttgacccccactgtaacctgacctgacctgtggcgggtacgggaactgtcttagtaatcatggagactggctgaacctgagtgccaagctgtcagtagggtctgagatgggaaactcctgaaagtatgatttcatttcccagaaaatgtaaagaatggataccagcaatgattcctggctgttacctattctggaggggtggggttggggagggggttgtccatacctctgtggtatgagtatttcagggaaaaagaaagcaggcatggcacccattcgattttccctgacagcatctgagatccttttggggagacgctgaggagtgtttgctgccatgtactcttacagctctatgctgacactcccatttgatgtggtccagaacttagacctcagtccttggatcagccctgtggtccctgcaagcaggggcatctttctgcatgtgagccagcccccttcctgttcaagggttctgctggatctgggcttttcctgtccttcacttctgggatgattcaccccacatcttccagtaccctgtaaaccattttaaaatatttagaaaactatcctcccaaaaatgcttttgaaaatgagagccctctgtccctgccacttacagctagtctctttgggataggggtgtatgtggagagattcatgtaagtctcacatgagtgacctgtgcccctatgtgtactaatgtgtgtactgggtcagaaggtgccctgggttcccacagaccttggtttcctgcctgggtgggtgggagggagggaacttcagagagtatgtgcgaacagccatagcagagccacccctgccaaggacccagtgagggaaactcaggagcaggtggttggttcagttcccgcgctgatgtctggggcagtgcatgtgtgagaagagaggcgcaaagcagtgaaaggagtgatttggcatccagagggcccgggagccccacggataccccagggaagccactgactcacaccgctgcagaggctcctgggcccaatgcccgacccctgctggccagcatggggcctagcactggaagatgcctcaggtgtgtttggagtgggggaaacggaagtagggcacgctctcagagaccaggatagagagtcagggaacctgggaaagagtagtgccagttccgggtaggctgctgcaccaggccctaccagctcaggctataaacagtctgctttgccccaagtcttttccgtccacccccaacagccttgtcatcacttagctactgatcacgcccatggcttgacattggagggttacattagtggagtccgccacagcttcgaaccctctccccagatgccctttgcctctgctgtggccctggggttttatcaactgtccccttcctatcctcctctccaccctgttttttgttttttttttttttaaataatattttgctatgggggaggggaatatcaaatggacaagatcacttttaaatggtagtttttataagatgttataaacttgtatctttttaccattaaagtgcagtgtatgttccttcgtgatatatttaggatatttaaataaaaggaaaatggggcttttctacatacta

SEQ ID NO: 112 - DNA, 5517 bp, Homo sapiens
aattgacaaagtcacgtgtgctcagggggccagaaactggagagaggagagaaaaaaatcaaaagaaggaaagcacattagaccatgcgagctaaatttgtgatcgcacaaaatcaagatgttagattgatgcagaagatcactccgttccaaagggaaagttttcatctcacgagtttggagctgagggcccgtggggcaacatggccgaaggcggggctagcaaaggtggtggagaagagcccgggaagctgccggagccggcagaggaggaatcccaggttttgcgcggaactggccactgtaagtggttcaatgtgcgcatgggatttggattcatctccatgataaaccgagagggaagccccttggatattccagtcgatgtatttgtacaccaaagcaaactattcatggaaggatttagaagcctaaaagaaggagaaccagtggaattcacatttaaaaaatcttccaaaggccttgagtcaatacgggtaacaggacctggtgggagcccctgtttaggaagtgaaagaagacccaaagggaagacactacagaaaagaaaaccaaagggagatagatgctacaactgtggtggccttgatcatcatgctaaggaatgtagtctacctcctcagccaaagaagtgccattactgtcagagcatcatgcacatggtggcaaactgcccacataaaaatgttgcacagccacccgcgagttctcagggaagacaggaagcagaatcccagccatgcacttcaactctccctcgagaagtgggaggcgggcatggctgtacatcaccaccgtttcctcaggaggctagggcagagatctcagaacggtcaggcaggtcacctcaagaagcttcctccacgaagtcatctatagcaccagaagagcaaagcaaaaaggggccttcagttcaaaaaaggaaaaagacataacaggtcttcttcatatgttctttcctttacccggttgcaaagtctacctcatgcaagtataggggaacagtatttcacaagcagtagctgacctgggattttaactactattggggaactgtgaattttttaaacagacaaatcactctaagcaaattacatttgagcagggtgtcatgttttatgttaattcagagaataagatactatgtctgtcaatatgtgcatgtgtgagagggagagagcctgagtctgtgtgtgtacatgaggatttttatataggaatgtagacacatatataaagaggctttgtctttatatatttgtgtatagatcaaagcacacaccctctctcatataattggatatttccaagaattgaaaacccatgtgaagcattatagatagttttaaatttaacccactggagttttcttgaaataccacttcttttatattatataaaactaaaaacacgactgttaccttttgtgtgaaccaaaggatacttcagatctcagagctgccaattatggggtactaaaggtttttaagacatccagttctcccgaatttgggattgcctctttttcttgaaatctctggagtagtaatttttttcccccttttttgaaggcagtaccttaacttcatatgcctctgactgccataagcttttttgattctgggataacataactccagaaaagacaatgaatgtgtaatttgggccgatatttcactgttttaaattctgtgtttaattgtaaaattagatgcctattaagagaaatgaaggggaggatcatcttagtggcttgttttcagtagtattttaatatcagcttcttgtaaccttttccatgttgtgagggttgtaagggattgtgtggcaacagcagcttcccttggctaactcaatcttctacccattgcttagagcagggagccctccttatttactactgaagaccttagagaactccaattgtttggcatatatttttggtggtggtttttattcctcctggagagttatctaatttgtttctaaaacaaacaagcagcaaagaaatgaattaaatactggggttgagaattaaaattaagtggatgttcacagttgcccaatatatatgacctgcaaatgatacgaaaaagtgcagcatttagtggcagttaacaagagtgacaagcctggggcagaggtaccaaacctctcccaccagagagctagaagtattttatacagtaactttgatcttatggaagtgaccttcaatgcttattctgaagtaacctatatggtggatacaggatgaacattcagtgccagggagaatcttctcaggttggttctcgttagagtgataaactggctaggggccatagtattggtcctgttaggtttcggtcatggaaaaaaaaattattttggggtcatcctggctctagatgttatgggcaaatttctgaaacatctgcaagaaggtaccagttaattatagtgcttaatattgggaataagattaagcattataattataatgtatgggcctgttggtgtaagctcagataattaaataaaaatagcatgactcaaatgagacatattctgctgaacagtttctacttcctctcccgcctgtcctgtcatgggagacgtgtatagttgctgctgtttcagcaaaccaccataagacgaaaatgcctcaggttgggttgccagtcctttacaactcagcttgaatttcacaacagtgattgtgagaatctgcgtggtatacactgaaatatcggtgtgctgtgatgcaaagcttacctttgacgatattgaatgtgatatagctgtagagaagtacttccttgccttatgtgaggatttcaaacttatttaaattatgtagacaaatcaaagtggcattgcttaatttttagcaggcataataagcaagttaacagtaaaatgcaaaacatgataagcgttgctcaatttttagcaggtataataagcaggttaacagtaaaaatgcaaaacatgatagataagtcactttgaaaattcaaaccaaagttccttcaccttatggaaataggaaattatggacttcaaaattggacacttcctgtttacaaaaagaaattcagagctaaaatcatggtaaaaaaaaatagaaacacttgagaactatggtctttatgggtgcaatttgaaatccttttcatcatcttaccagactaaactaagagcacataccaaacctatcttatggttgaaagttggggtttattttttatatgagaatattatcactattacataacatactcaggacaaagaactttgctcagggaacataccatgtaatatttttgttgtttctttacagactagtctacagtcctgcttactcaaaacaaaccaaataacttatacctttatataagtattatgtactgatgatagtaactacctctgagtttgacacagatcaaaatttttgaatatcagatatcagttatcctatttttatttcatgtgaaaactcctctaaagcagattccctcaactctgtgcatatgtgaatatcactgatgtgaacacattgttcatttacataggtaaaatattactctgtttacagcaaaaggctacctcatagttgatacatagcacacctgtatgtatgctgttccagccttacaggtggctgataattctctggtacagaacctttttatctgtattataaatagcaattcacaactgcatgtttctgacaaacacttgtgaataatgaagcatctcgttttagttagcaaagtctccaaacatttccttaaaataatcatgtatttagtttaaagaattatgggcactgttcaacttaagcaaaacagaacacggaagcagtcttagaagcaccactttgcccagaggtggaggttggaaggggtagcagggagaggggttggtgtatgcaggtattcatgctaggcaaagagtttaaaagacgccaatgtccttcatttactgtctgtgctgccctgaagccaagcgtattgcagcattatagccccaggcacataactaactagcactggcttgccaaggaatgaacatgcaatgccattactagctattgagggaaaagggtctgtgtgaagcatcactttgcagggattactaatggtggggcagcaggtctgtgaattaagttatctcttgacctcaccctcatgtcaacacaaatgtaattcctaaacaagatgcattgccagtctcttagccctgtaagctgatcttttgctacatggcagactataatgaaaacatttttatacttgggtttctagtcttcactagaaggccttggatgtatttttgcagttgaaagatttagaaagatttttacctgcttataacttggaagtttagagtgcaatgtaagaaaaaagatcaagaaatgtcatgttattagcatcagtccacctccaatattgccgatactttttttattctggctcagttttattttgcaccagtgcggccccaagttactgctggttgtatttagtttgtgaataggagcccataagtgttaatagactttgtaacattcactataagatgaattatacaggacatgggaaatctcattaagtcttaaagttaatttaaattaatttatctgttttctctaagaaatgtttatcataaaatatatatgtgtatttcccctttggttataaaatttgggaaagtatgtacaagtgcagctgcactgactttaattttctagatgtcttaatgagatttatttgttttagagaagaacatcttgttaaaagcatcaaactctgtcttacatagctgtcaacagcctctttaagatgtggtggttgtatgatctgtgtcttaattgttcagttagagtgagaagttgacctatgattcatttttaaattttatatttggaacaaagctgcaagttatggtaaagtactgtactgtgagaagtattatgatatttaatgcatctgtggcttaacacttgtgagagttaccagcttgaaaatgatggtgttgactacctcttgaatcacatctatcaaccactggcacctaccaccaagctggcttcaattagtatgtgttgctttttggtattaacaactaaccgtactagagaccaaagtgaaccctgatttttatatgtctttaataatggtgttttatctagtgtttttaaattatcctgtgtagtatttagattacctcattgtccattttgactcatgttgtttacaagtgaaaataaaaacacttgaactgtatgtttttaaaagacaaaaaaggggtagatgtttggaatgcgtttcactcgcatgcagtcatctggagggactgaagcactgtttgcctttctgtacactctgggttttatattctcatttcatgcctaatgtcttattctgtcaattatggatatgttgaggtttaaaaaaattacttgattaaaaataaaacatataacgttggcatttaaaaaaaaaaaaa

SEQ ID NO: 113 - DNA, 3267 bp, Homo sapiens
acaaacacaagcacatatctgatctggaaaactgcctgtcctctgtgaaaattaccagcttcaggggctatgacttctacggtcttaaggataagacctgggatgaagtcttggaaacacatcacaaactcccgaccgatcaattagacctgaaaaagcagcaagaggccgtgtgggaacttttcacaagtgaatgcacctattttttggaccatttattagttcttaagatgatctttatgaatacactaagatatctgcaaactcatgaatatctcctagatgtggatttatggagactttttgcaaacctggaggagttaactcagacaagccttggttttgtgaacagtctctttggcatcatcaaggactatgtagacgcttctgagatttcctcatcactggattttatttccgtgctcacaaagtatttccgagggagtctctgtcagagccaccagacctactgcctgaactattcagctgctatcttttatcttgagagcctgaggcagagagatgactttggaatttatttaaaatggtgtgagcagaatgaacaatgcagacggctccacgtgccagagctgctagtggccccactacagaggctcactcgatatccgttgttgctgaagaatatctggaaaaggagcatggactctgctgagaaaatcatgatctactccatcaaggaaaaggtggaaaagtccatccgggaccttgaaggaaaagtgaagtggctggacaatttccaaaaatttagatatctacaggagattatagtgtggccaccgctttgggatagagataaaaggtttttcattccagagtgtttgaaacacatttttaaagaacacatggcagaaaacatcttgtcaccaaccagcagacaccttctctatgaaggaaaattaactcttgcagaaagcacgagattcctagatgtttatctgtttctcttcaatgatttcctcttagttacgaaaactaagtgcaacaaaaagaaacttggaggctcagaccctggtttaatgtgtccttctcttactcctgagttgcaagcagtaataaaagagggtggttcgtgtacagtactcgatcagcctattccactagatagattggtagtcaaaagtattgaaccactccatgtgtcagtctttgggctgagaaatgcttttcttatacaacacgaaaacagatatcgacagtgtatagcagcattcttattacaagcccaaacggaaaacatcaaaaaaacatggatggcacaaataacaactgcaatttcttgctttaccaagagtcaggaaaccaagaaaatatctttattcacattgcccgcagaatcctctgaaatttagggacctaaaacaagtggcatgtctttttagaagattatggtttaaggtataatttcattcaaagttttgtaacacttagctagtgataagctagaaggaaatttgcattttaaagaagtttcagaatttgaaattttgagctaggaaaatcctcagtatagaggaataatgactgcaacaaatttgaactctgaggaatttcttgacaaatatatactgacatccagattaccttctaatgcttccgtcaggtttgtaagaggtgtgagtgaagaaaggtgctaatttgtaaagggtgaatgatcagataaatggagtatcagaaggaaaacaatgtccactgcttatgtccaatatgaactccagcatcttactctgtatccataaaataatgaaaccaattttccttcatggcctgtcaatcagtcttaaccgctttatagtcctacctcaaacataatgataaatctttagatacaaagcttgattgttcttttaatatacaaagcaataaatagggactacatttaagtagcagttttaaaattcctattctcaaactcatctcaggtatatagtactctaacgtggaagtagaaaatcccaaagactaaattccattactttaagataggaagaaaaaaaaaatctggctttcaccagttaacacttttgcatggcttttcttggcctgttgtgaagtgtacagattttcatagacatagtaaggtatctgtctcttaactttattttttgaagaatgatggtgtttgccataaaaatactttctggttttgattggtgtgtgtgtgtgtgtgtgtgtgtgttagcacagtacagtcacttaattttatttggcaggacttcaaatttcttcagaatttttatcatgaaaggcagtttgaataattattatcatggcaggatatatactattaactacattcaaggaactagttcttagggtcagattattgcatcaaagggaagtccacaaacttccatttcagaatcgtaccttttgcaatttgcaaagtgaaagtagtaaatttatcaaatttggctgcaagacaactgaagccttagctgattttgttaagctgaagaatggggtagagaggataatgtttgggcaagtcatgtgcccagtaattccttgaggaaggtgaaatttcactatgcaaacaaagcagtaaagacaagtgcagcagaaaggcttttgtacaaggcaagcactattagaatggagactaataacctctttataataatgtcagaaatttaatagaagaaaaaaaggaaaatctggaggacagtaactattgttaatagctaagaataaatgaggtggaggggagaaaaaggggagaatagacttcaagcttcaagtgaattcctagagatggcatctggatgggactgaaagcagttatgtccaggagaatacaatatagattatgcaagagaagattttataaagaaatttctggttaaaaaaaatttttacattaacaatcatcttgcaaatgtttagatataaactaacctcggaggtgagcagtggactaggatgaggtggcctctcaaattcctttagtcccatgaatccagcaaccacagacttacatgtataaaggtagttttctccctctgaatctcattaaagggagagacagactgactaaattaacaaaatatataaaacagctcaagaatatgctgtacataaactggaattctataaagctcacaaagtaacatgtctaatatacaatatattagatgtttgaggatatgcacattaaactctttggagggtttagaatgaagcacattcgaatgaagggatcacgggggtcagaacaaaaaccattctagaaccgtggctcccaggaag

SEQ ID NO: 114 - DNA, 8522 bp, Homo sapiens
attcatccccagcgcagagcagcgctggcagccggcgccgcgatggaggaagagctgaagtgtcccgtgtgcggctctctgtttcgggagcctatcatcctgccctgttcccacaatgtctgcctgccttgcgctcgcaccatcgcggtgcagaccccggacggtgagcagcacctgccccagccgctcctgctttcccggggatcggggctgcaggcgggcgccgccgccgctgcctctctggagcacgacgctgcggctggcccggcctgcggcggtgcaggcgggagtgcagctggcggcctcggcggcggtgcgggaggtggcggagaccacgcggacaagctcagcttgtacagcgagacagacagcggctacgggtcctacaccccgagcctcaagtcccccaacggggttcgcgtgctgcccatggtgcccgcaccacccggctcctcggctgcggcggctcggggtgccgcctgctcctcgctgtcctcgtcttcgagctccatcacgtgcccgcagtgccaccgcagcgcatccctggaccaccgcggcctgcgcggcttccagcgcaaccggctgctcgaggccatcgtgcagcggtaccagcagggccgcggggccgtgccggggacgtctgcagccgcggcggtggccatctgccagctgtgcgaccgcaccccgccagagccagcagccacgctctgcgagcagtgcgacgtcctctactgctctgcctgccagctcaagtgccatccatcccggggacccttcgccaagcatcgcctggtgcagccgccgccgccgccgccgccgcccgccgaggcagcctccgggcccactggcaccgcccagggcgcccccagcggaggcggcggctgcaagagcccgggaggcgcgggggcgggggcgactgggggcagcacggcccgcaagttccccacgtgtcccgagcatgaaatggagaactacagcatgtactgcgtgagctgtcgaaccccggtgtgttatctgtgcctggaggagggccggcacgccaagcacgaggtgaagccgctgggggccatgtggaagcagcacaaggcacaactatctcaggccttaaatggagtttcagataaggcaaaggaagcaaaggagtttctggttcagctaaagaacatattgcagcagatccaggaaaacggactggactacgaagcctgcctcgttgctcagtgtgatgcccttgtggatgctttaactcgtcagaaagccaagctgctcaccaaggtgactaaagagagggaacacaagttgaagatggtttgggaccagatcaatcactgcacattgaagctgcgtcagtccaccggactgatggagtactgcctggaggtgatcaaggagaacgacccctccgggttcttacagatctcagatgctctgatcaagcgcgtccaggtgtctcaggagcagtgggtcaaaggcgccctggagccgaaagtgtctgcggagtttgatctgactttggacagcgagccgctgctgcaggccatccaccagctggacttcattcagatgaaatgtagggtgccacccgtccccctactgcagctggagaaatgctgcacccgtaacaacagcgtcacgctggcctggaggatgccacccttcacccacagccccgtggacggctacatcctggagctggacgacggtgccgggggacagttccgggaagtgtacgtcggtaaggagactttgtgtaccatcgacggtcttcacttcaacagcacctacaacgcccgagtcaaagctttcaactcttctggtgtcgggccttacagtaaaactgtcgtcctgcagacatccgatgtggcctggttcacatttgaccccaactctgggcatcgggacatcattttatccaatgacaaccagacagccacctgcagcagctatgacgaccgggtggtgctgggcacagctgcgttctccaagggcgtgcactactgggagctgcacgtggaccggtacgacaaccacccagaccccgccttcggggtggccagggccagcgtggtcaaggacatgatgctgggcaaggatgacaaggcctgggccatgtatgtggacaacaaccgcagctggttcatgcactgcaactcccacaccaacaggacggaaggtggcgtgtgcaagggggccaccgtgggcgtgctgctggacctgaataagcacactctcaccttcttcatcaacgggcagcagcagggccccacagccttcagccacgtggacggggtcttcatgccagccctcagcctcaaccgcaacgtgcaggtcaccctgcacacaggattggaagtgccgactaacctggggcggccaaagctgtcaggcaattagccccgctccagctcggcactgtgcctgtgacagtgacattcacaggcaaaacgcccaccattctcactaagctcaaataacccacaaaagcaggatatgcaaatcatgggtgcaacctggcagcgtggagtgtcatagaaacacattttcttggggacgcagggaatgggtccacgggccatgctcacagctgccactgtcagtggcaaaggaaggtacgtgtgtcacccttattccacccagacattacgaacactccccaagaaggacctttctcaagggagtcagcattcgggcttcatgtctatgtttcctgccatctgttttcaaagcttgtctttttttggagggagaggaaggtagactttgagactggcctcctgagagcggcagtcaggagctgcgctgtaatcccacgccccgggtgttggccctccgtggggaccttgcctcctcagagtcccgagattgcagattctcatcatgctgagaaagttatcttttagcttcttggtcctagagtctttagtagcacctgccacttgcagacccaatgcaggattgatagaaagggacattaatcattcatgcttgacttttgcctctctcactgaagtgttagaaccttttaaaatggcttcctttattaatcagccaattgtgttctctctctctcttcctccatccttcatttcttctccctccctccttctctttctctcttcttctctctctccttccttccctcctttgctctctctttcttcctttcctccttctctcttactttcctccatccctgcctctttcttccctctttcgctctctttccctccctccttctctctctctctcacacacacacaggcatgacagtctcctaaaattaattcactcagttcttagttcttaaatccacgtgaaaacacaagaattttaacaactatgtcataggtcttcgcctggtgatggctcctttctgaaactggcagcccaagaagttaactgaaaatgcatccagattgctcttctgagctgaaccactctcagactcataagcatttaaaatgggagaccctgggaaagcctgttctagtcagtccaccctattgtcattatgaaagcatcatgaacacaagtggcccctgtggcaggccgggacggctctgccctgatgcagtgggcgggatctctggggaaggcaggaaatagaagggcagtatcaggtaccttgtctcccagcttcccactgtgagactgggtgtgccgagtctgacctgccagggcaggactctggaaacaccaggcttctcccttgagatccacattgattcatccacacctctcagagacagctcatggcaggggttttgagcctgccaggctcttgttcccagggaacccttcctctcctccctcctctcatcttcccagtcacctgccacctccagctccacctggtagtaacatttctctctccttttaaaaagaatatattttgtcaagcattttatttctgaggctgagaagtgacttgtcaatttgctggactggatttttataaaattcgcccattcaccagcaccaactgtgcgtccttggttctgccttcctgttcagacaccgcgcctgctttctgagtaactgcctgccggagccatgcaggtaccccccctccactcagcaggcccgacaatcctacctcaaagctcatgctcttggtctgcaaggctgcttggtccgctgtctctgcagatgtggccggcaaggccagctgccccgtctccaggagctgctcggtgctgtgttgcagtctctgctgcggagcctgggagctatctgcttcatggaagtctaggtcttgcctcttccttgtcatctcaccaagcggtttctgggtctcctcctcccatcccagagccctgtccagagctcttggtggtgacacacaagacctgggaccctgtgtccttgcccgcacctctgcctctgtctcccatatccctgcagcttcatccttagccatagctctgggtggcctttgcttggagcatggagacgatccctaaagattgaggatgaagaggagccaccactttcctggggccaaggaagccatcagctttgggaagtgtctagctctcttctgaaaaaaaaacaggcctacaccctgcccccagaatgagagtgggctaggcagggctgcctggtgacagcagcttctcacaggggagccctggggaaggctgtggagcctccaccatcaccacagcccaggtcaccaggtggccccagctctgcagaagaatcgcccatcattggagcacaagttgcctggggctaccctgaacctaacccctttgagggagcagcatccaggtcaggagagaagtggaaagtgcaggagggtaatgccctcaaatccggtggcctctttcagaaaaaagttccctgaagtccagagaggtgcagccaggactccctcctccccactgccaccctgagcttgggggctgggattctcccttttctgactcctccaggagcccagaagcaatacggccgatgccagggacagcatccagctctccttcacagacacctctcctgtcttcagcacaaaacaccttcaatgttctgacttcaaagagaacgacaggtccgtgccacacacttgtgtttttgagggatcagaaaagtgaagaaggaacttatcaattcctcatggccaggaaggtcccgggtttcagagtagaaatgacagacaggtcatggaattctcatccaccatcgaattccataacacgttacatcatggtggcacatttgtacatacatataaatgatatcaagatgaggcttttgttgggctggctgaggagtaacttggtgtaaatctatcaagcagtttcagtgaaaaaggaattcaaagtagtttaaaaatgtcgagttccattgcattgtaaatagtgcctctgtaatgtggttctgcagttgttctttgctagtgagcaagcttggtcaaagtgtatgccttttccttttaaaattaatctcttccgaaaatatccactagcacctcactgcatacatagcatcccagctcctaattcaaagcaggggaaggtatttccccaaagcctgcttttcctctctctgttctccttgggaaaataatgattccaattaaagaggacaccagtaatactgacccacaaggtaactgacctaaacactataaaactgtatatatttccaggctgcatcttcagcctgatatgtactttgtagttgcaacagcgccctaggtgccctatggcccaccaagtttgaggagggtggtgctttccggattgagcctgggcaggctctgtggagctcaccaagagagctgggggcaggcccaccctcctctttgcgccctttctctccctcttggtgcccctgccctccgccccaccacagcactctcaggaaaggatcagaatgcaggatctttgtgtatttcttccagggatatttgcatttaagccttaattctcattgcaagcgaaaggcttggtccccctgggaaggcgggtttcggcaccggtgggcaggtggttcagtgtcaaggaggctgctgctggtcccatggccacctgctggctttgaggtagtgagggagggtcaatccttagggggagtcaacatgtgaatgctaaagaacactgctgcacagcccgtggggtggcgccagggtttctcaacctctactgacattttgcgataggttctgtatgccgtaggatgtttagcaacatccctggtctctacccatcatctgccagtagcaacccccaagttaggtgtgacaaccaaaagtatctgtcgacattgctaggtatctcctgggggcctccacaagttgagaaccaccaggttatgccagtggtttgtcatgcatggatctgtagagggactgtggcgctccggctgctttgttccatagaaagcctgtatgtgacaaagctgccagcctttatcttgatacccaagcccaggattttccatgtgtcttcagggggcaggtaggggaaaatggggtgagccacctccaacagatgccaacctgttgggtcttgaattttcactcactgaagatgccccctgcccgctccccacttcctagaaagcaaaactcgttacctttgttttccttggccacattttactggaagcaacaggaacttcttaatgggtttgtggccctcaattggtttttaaaaaaatctaacagatcttattggcaaatattcaagatggtgatgctggaaaatttcaggacttttcttttgcaagtgagccggtagctgtgtttgttgaccacattctttggcagttcctcccagaagatcaaaggatcctgcagctttaacctaatatctaggctgtaaaaatatgagggcaggtttcgggcaggatgtattgatcagacaccaagttcagccctcggttacttccctcttttaacctggctttaatagtgattcatggtatgagtgggggccaatctcttatcctttctgtgcctcagtatccccacctgaaatgagactagtcatactaacctacctcctctgatgtattgtgaggattatacaataacatttttaaagaaaaaaagtgcagtctttcatctctggcatctaagctaatgattcccattcagtgactcaaacctgtggggggcgttccagtgttctctgaccagtgtcttccatccaagcctccttgtgaccagggcaaggagctgcctggcctccagtgggtaaaatagacctttaagacaggtttcctatgaccatagaaagtaacaccccatatgtttccattcccggcgaggcctgtttgaatggcgctctgtgtgagtgctatgaacaggctacctgtcagcagtctcactgcgaggcctcaaggcctctgtgagcagaagcccctttaaaccaaggaaggacactaacccaggcctctgccttctttgttacctaagttctggtatctaaggggtctctcatctcacagcttgcctcctttgtttcgaggggtctctgcagtgtgaatgggtttgaaatccagtgtggatagcacgaagagatgcaactgagccgaagttttgaaggctggttgggctagtgggtcatcatgtcactttcagatgactgataaccgctgggactgctggggcttcaccagcacgagctatgcaggttgggggaggccctggctttttcaatgattgacgttgacatcagtcaggagctgggagttgagacctccagggaagtctcgtccggatccatcgctcttctctcaaggagcacagtcctgggaaaggcctagggacctgtgggccggtgatgcgggcactgcagaccaggccaggccctcgggtaaagctctgaggagaggccaaaaccaggcttcaggttcgggaaggtgactgcttgcaactgcagtagcaggaacatgtcaggtgcttactgggtgagacccagccggggaagcctctccaactcctcctagccctggaaaccagacacccagagccccaggctttctcggcacccagaagaagtggggagcgggcaaagcagaaaacattcaatgcatgatgtaggattgctgcgttggcactaagctgttgtattaagcatgagaggtgtttgtttaacgttggcaaagggatttaacaagaaacaaaaagcttcgcgtccttgttttgaccgtcgacagaagtccaattttcttgcctttctttatccccatttctcctccctccccttcccccatcacatccactttcggtcactcgttgttggtatttggtggcagctcttggtcctattgctgtggatgttccactgaaaacacggggggtagcggggagtggtaaggaaagcaacttttttctaatttttgtattggtatccacaagcgtttgtattttttgaattgcaaacactgtgttttctggtctttgggggttagttgaactttctgtattaccttttggaaaacctgagttttaccacagtcttaagcagatttgaaataaattcttttgacactgccaacaacagaaagac

SEQ ID NO: 115 - DNA, 2639 bp, Homo sapiens
ggcgccttgggaccgcgtgggagccgcagccgaaccgagtagggaccgggaccgcgcggcgccgccgtccccggccgggcccggcccccgcgagccgagcgcgcgcccccgtcgcccacccgggcgcggctggatgcggcggggtccccgcggcggcgacccccggccccgagcgcccggagcgcccagaggcggcgtgcggggcccggggacgccgcgccctccatgcgccgaggcgcgccccgagacagccgggggcccgcgccgcagccgccgcccgcgctgagccccggcccggcccgcggcccgcgcccggcggcagcatgagccaggccgagctgtccacctgctccgcgccgcagacgcagcgcatcttccaggaggctgtgcgcaagggcaacacgcaggagctgcagtcgctgctgcagaacatgaccaactgcgagttcaacgtgaactcgttcgggcccgagggccagacggcgctgcaccagtcggtcatcgacggcaacctggagctcgtgaagctgctggtcaagttcggcgccgacatccgcctggccaaccgcgacggctggagcgcgctgcacatcgccgcgttcggtggccaccaggacatcgtgctctatctcatcaccaaggcgaagtacgcggccagcggccggtgatgcccgccgggaccccggaccccggccctgcgcccgcgtcgtctctgctgtaccttcccgccaactacctcggtgcgcgcccggctcgcaggccccgccagaaggcccgtggccacggcgaatacggcgcgtgcgtcccggccccagggtccggcagccccgccggccgagcgcctccctgcggcctagccgggcccggccgggccggagcagcttcccacggcccccacccgctcgcctgcccgccgcctcgcgggtgggggcggggcgcgggctccagccccttttgaaatttgagtctcgcaaccagcaagttcggaatcccgagataccggatcctctgcgcaaaatgttttctcccgaaggtgaaaggcgggcggcgggagccgaaggcggactcggagcgctccgccgccgccttcaggacccgcccgcaggcccgggacgcgccgatgccggctgcagccgaggagcagccccgaggtccgaggtccgcgccgctggcgcgcggccgaggagacgctcggctgttcgctgttgctggtgttctaaactatttatcttgtgtgtgtacatttgtgggtggagtttgtgcgcctggtttttttgtttggaaaacactgcgtggtcaatgtggttatgggggggagtgatgcatttttttctagtcttaaaactaaaaacttgagtctaccatttcttggttgcactgaaaataccgcccagcctgatggtgttcccgtgctgtccctcccccttcccttctccccgcgtctacctccccaccccgttctgttccccctccctccttctccctctccctcaaatccgtgagttttggaagccccagggcctctctcccccgcccctcctggatgaggccaccatcccccaaaccggcttgttttgcagtttccccaggatcctggaagctcgctggcgctcgagggtggcggggacacgggggggtgggtgaaggttcgttaccttttctagtgcgttctatcatagttaacggttgcacacttttttaaaaaaagtaaatggatttgccacaattaaatgtcataacatttatgacagaatataaaatattaacatattttaagccaagttttaggtgtattttttgaatcttggttataaacccaattttaaagggcgatgtatccagcgttgtgaaggcaacagagtgtacccatatttatatttttataaaatacctataagactgtgaatctcttgtgctaatggctgagttaattgaaggatcgttttgcccctttttagcctcccagagcttcgaggactcaattcgaacccgaaatcctgccgtgggggaggggttgcgtcgagacctgggcccggggaggttctcctgcgtcactttctgtcctgaaaggcgcccttcctggtttctgtggctccaattttctatgcagccccacaccccttgttgttttgatcctgagaaataaaagggaggctgaattattcaaatttaaatgaggtttccccttcatggaagtgctgctgacccttcgtgcagaaatggggagcacttgaggacacaggtgggtggaggccctttgtgcgtggctggtcgtattcgggcagccctccgtcgctttttataaaactttgtgtgagaagaatatattgataatgtcagtgaaacaagcagacattgaaatggaggcacagattactccacaaggagttcttctgtatattttttctagatgcaaatacctttttaattatgttaattaatgttaagactttctaggcttatatcgaagctgtgtgtgggtcacggggtgatcactgctaactggataaagtttgtgcagcacattcctgagtgtacgatattgacctgtagcccagcgtgaaaaatttataaataaatttttcattgatctttttatattaaaaaaaagtttcttggtcaaaaaaaaaaaaaaaaaa

SEQ ID NO: 116 - DNA, 5035 bp, Homo sapiens
gcaggcgccgcgccgaggaggctgccgctctggcttgccgccccccgccgccgctgcacaccggacccagccgccgtgccgcgggccatggacctgcccaggggcctggtggtggcctgggcgctcagcctgtggccagggttcacggacaccttcaacatggacaccaggaagccccgggtcatccctggctccaggaccgccttctttggctacacagtgcagcagcacgacatcagtggcaataagtggctggtcgtgggcgccccactggaaaccaatggctaccagaagacgggagacgtgtacaagtgtccagtgatccacgggaactgcaccaaactcaacctgggaagggtcaccctgtccaacgtgtccgagcggaaagacaacatgcgcctcggccttagtctcgccaccaaccccaaggacaacagcttcctggcctgcagccccctctggtctcatgagtgtgggagctcctactacaccacagggatgtgttcaagagtcaactccaacttcaggttctccaagaccgtggccccagctctccaaaggtgccagacctacatggacatcgtcattgtcctggatggctccaacagcatctacccctgggtggaggttcagcacttcctcatcaacatcctgaaaaagttttacattggcccagggcagatccaggttggagttgtgcagtatggcgaagatgtggtgcatgagtttcacctcaacgactacaggtctgtaaaagatgtggtggaagctgccagccacattgagcagagaggaggaacagagacccggacggcatttggcattgaatttgcacgctcagaggctttccagaagggtggaaggaaaggagccaagaaggtgatgattgtcatcacagatggggagtcccacgacagcccagacctggagaaggtgatccagcaaagcgaaagagacaacgtaacaagatatgcggtggccgtcctgggctactacaaccgcagggggatcaatccagaaacttttctaaatgaaatcaaatacatcgccagtgaccctgatgacaagcacttcttcaatgtcactgatgaggctgccttgaaggacattgtcgatgccctgggggacagaatcttcagcctggaaggcaccaacaagaacgagacctcctttgggctggagatgtcacagacgggcttttcctcgcacgtggtggaggatggggttctgctgggagccgtcggtgcctatgactggaatggagctgtgctaaaggagacgagtgccgggaaggtcattcctctccgcgagtcctacctgaaagagttccccgaggagctcaagaaccatggtgcatacctggggtacacagtcacatcggtcgtgtcctccaggcaggggcgggtgtacgtggccggagccccccggttcaaccacacgggcaaggtcatcctgttcaccatgcacaacaaccggagcctcaccatccaccaggctatgcggggccagcagataggctcttactttgggagtgaaatcacctcggtggacatcgacggcgacggcgtgactgatgtcctgctggtgggcgcacccatgtacttcaacgagggccgtgagcgaggcaaggtgtacgtctatgagctgagacagaacctgtttgtttataacggaacgctaaaggattcacacagttaccagaatgcccgatttgggtcctccattgcctcagttcgagacctcaaccaggattcctacaatgacgtggtggtgggagcccccctggaggacaaccacgcaggagccatctacatcttccacggcttccgaggcagcatcctgaagacacctaagcagagaatcacagcctcagagctggctaccggcctccagtattttggctgcagcatccacgggcaattggacctcaatgaggatgggctcatcgacctggcagtgggagcccttggcaacgctgtgattctgtggtcccgcccagtggttcagatcaatgccagcctccactttgagccatccaagatcaacatcttccacagagactgcaagcgcagtggcagggatgccacctgcctggccgccttcctctgcttcacgcccatcttcctggcaccccatttccaaacaacaactgttggcatcagatacaacgccaccatggatgagaggcggtatacaccgagggcccacctggacgagggcggggaccgattcaccaacagagccgtactgctctcctccggccaggagctctgtgagcggatcaacttccatgtcctggacactgctgactacgtgaagccagtgaccttctcagtcgagtattccctggaggaccctgaccatggccccatgctggacgacggctggcccaccactctcagagtctcggtgcccttctggaacggctgcaatgaggatgagcactgtgtccctgaccttgtgttggatgcccggagtgacctgcccacggccatggagtactgccagagggtgctgaggaagcctgcgcaggactgctccgcatacacgctgtccttcgacaccacagtcttcatcatagagagcacacgccagcgagtggcggtggaggccacactggagaacaggggcgagaacgcctacagcacggtcctaaatatctcgcagtcagcaaacctgcagtttgccagcttgatccagaaggaggactcagacggtagcattgagtgtgtgaacgaggagaggaggctccagaagcaagtctgcaacgtcagctatcccttcttccgggccaaggccaaggtggctttccgtcttgattttgagttcagcaaatccatcttcctacaccacctggagatcgagctcgctgcaggcagtgacagtaatgagcgggacagcaccaaggaagacaacgtggcccccttacgcttccacctcaaatacgaggctgacgtcctcttcaccaggagcagcagcctgagccactacgaggtcaagcccaacagctcgctggagagatacgatggtatcgggcctcccttcagctgcatcttcaggatccagaacttgggcttgttccccatccacgggatgatgatgaagatcaccattcccatcgccaccaggagcggcaaccgcctactgaagctgagggacttcctcacggacgaggcgaacacgtcctgtaacatctggggcaatagcactgagtaccggcccaccccagtggaggaagacttgcgtcgtgctccacagctgaatcacagcaactctgatgtcgtctccatcaactgcaatatacggctggtccccaaccaggaaatcaatttccatctactggggaacctgtggttgaggtccctaaaagcactcaagtacaaatccatgaaaatcatggtcaacgcagccttgcagaggcagttccacagccccttcatcttccgtgaggaggatcccagccgccagatcgtgtttgagatctccaagcaagaggactggcaggtccccatctggatcattgtaggcagcaccctggggggcctcctactgctggccctgctggtcctggcactgtggaagctcggcttctttagaagtgccaggcgcaggagggagcctggtctggaccccacccccaaagtgctggagtgaggctccagaggagactttgagttgatgggggccaggacaccagtccaggtagtgttgagacccaggcctgtggccccaccgagctggagcggagaggaagccagctggctttgcacttgacctcatctcccgagcaatggcgcctgctccctccagaatggaactcaagctggttttaagtggaactgccctactgggagactgggacacctttaacacagacccctagggatttaaagggacacccctacacacacccaggcccatgccaaggcctccctcaggctctgtggagggcatttgctgccccagctactaaggtgctaggaattcgtaatcatccccatcctccagagaaacccagggaggaagactgtaaatacgaacccaatctgcacactccaggcctctagttccagaaggatccaagacaaaacagatctgaattctgcccttttctctcacccatcccacccctccattggctcccaagtcacacccactcccttccccatagataggcccctggggctcccgaagaatgaacccaagagcaagggcttgatggtgacagctgcaagccagggatgaagaaagactctgagatgtggagactgatggccaggcaagtgggaccaggatactggacgctgtcctgagatgagaggtagccgggctctgcacccacgtgcattcacattgaccgcaactcacacattcccccaccagctgcagccccttgctctcagctgccaaccctcccgggtcacttttgttcccaggtacctcatgggaagcatgtggatgacacaatccctggggctgtgcattcccacgtcttcttgctgcagcctgcccctagacatggacgcaccggcctggctgcagctgggcagcaggggtaggggtagggagcctcccctccctgtatcaccccctccctacacacacacacacacacacacacacacacacacacacacacacacacacacacacacactgcctcccatccttccctcatgcccgccagtgcacagggaagggcttggccagcgctgttgaggggtcccctctggaatgcactgaataaagcacgtgcaaggactcccggagcctgtgcagccttggtggcaaatatctcatctgccggcccccaggacaagtggtatgaccagtgataatgccccaaggacaaggggcgtgcctggcgcccagtggagtaatttatgccttagtcttgttttgaggtagaaatgcaagggggacacatgaaaggcatcagtccccctgtgcatagtacgacctttactgtcgtatttttgaaaaattaaaaatacagtgtttaaaaacaaaaaaaaaaaaaaaaaaaaaaaaaaaa

SEQ ID NO: 117 - DNA, 5242 bp, Homo sapiens
gccgcggcggtggcggagactgtggctttaagagcgtgccgggagcccgagccccagccgggccgcgcttcgccgctgcgcaccccagcggagccaagccccacgctggccggacagggccgcctgtcgccgggctgctgagaactagccctagacctctgcgtgagggttcttctgccgaagacatcaccagtgtgtggagcctgccacacccacccgctgccaaaccacggcctttacctgtgtcttccggtgtttcccgtgcgacccatcctgtgggagtgcctcgtgggctgccccagagttcaccccacactcagcagcaccaatggtgaagatgacaagatcgaagactttccaggcatatctgccctcctgccaccggacctacagctgcattcactgcagagctcacttggccaatcatgatgaactaatttccaagtcattccaaggaagtcaaggacgagcatacctctttaactcagtagttaatgtgggctgtgggcctgcagaagagcgagtgttgctaacaggactgcatgcagtcgcagacatttactgtgaaaactgcaaaaccactctgggctggaaatacgaacatgcttttgaaagcagccagaaatataaagaaggcaaatacatcattgaactagcacacatgatcaaggacaatggctgggactgattggacagcatctacccaacccagtgtccacgtgaacgccattcaaccgaacattcttcccaagcgtgagagagtgactgacacttggttccatccatttaggggccttgccatccggggcatcctcccaccctgacgccatctttctggtgaccggcctctaaatcgctgtctctctgtctctttgctttgtatctgtttgtgagttgatcctggcttctctctctgttctagttttggctgaaaacaaaacaacaaaaggaacagatccttgaccgcatggcggcagcccaccttggtaagggccccagggcccatgcgagagctgcctgatggcctcttgtcaggagagcagtggcacgggggcgtgaggaagagggaaaggggaaactctaagggtcctggcgcggggaaggggtggaagggtggaggtaggaacaaaattgcgccgctcctggagacctgataacttaggcttgaaataattgacttgtctaaaaggacaaagagaaaaaaaaaatacctcatgactgcattctctctgactagaagcttctgttcctgacaccaaatgtgccaggttagcaaatgagcacaagatgtggccctgattctagttggtggggcaagggcctggttctcctgggctgagtgggggagtgtcctggcagcagcgagtgacctgggcagtggccaggtgggtgcgatgactctgatgcctcactcagtctctgggcaatcatcatctttgcctctagccaccgtagataaggtgtgaagggactgctgtttgcaatgggcttaccatccaaatatcccaaaggctttgaccagcaaccaagtaaaatcagtaattgaggagagcagggcacaaaggggctgcagtttgggagctcctgaagaaatggctcagatattgagtcagagaaataaaaagtaggatcagttagcaattctaactgcccttccttctgacccctcataagaggagtgtggtgagggaggggactgggtaggggtcatcccaggaggaggggtttacattggaaccagttcaggttcggtgcatctttcctcttcggttttacagtggcttccgtgggatcgtcaatttcttgttcttagagtttcgggtgtttttctccagtcttgttactgtagactgtagaaagcacgggccccaggctctgagcttagtaataacctggctggtagattcctcatgcccctaattgtcccacttaggcctgaatgtcttgcatggagagaaatctcctgtcagtgtggtccagcagcagggaggagttctgcccaaattccgatatcaccccttcccccatccaagcatccttcgattagggaagtggagagcacatccctgtaaggcccataagagaaagaggagtttgttacatttaatcaacactgtgaagtctgttctacagcaattcagccattacacagtatatgactgaaactcatttaactgggttaatttcatttcttagactgaatatattattgttaagatacgtgtgcgtgttaggtaattctcagcatctcctccaagtaggccgaccttctcggaaaattcaccctaaaagtctcacaaaagaatgagttcatggggagattctgtaaagtgatgaactgagatgaaagcagccaacagcccaggagcttttcagaatagcgtctgcagcagaaccagtttccattcagagcgcgtccttggtggaaatgcttttttgtgtgtctccacgcgctgatggtggaatgggagccccaagacgtgtgggcttagaaatcaacttttgttccccaaggcttcttgtccagatctttccagtgctttcatagccctgggagatcaagttgttctccccactttactgcaaggtagactgaagttcagaagaaatactgaatttctgctcccagaagaatagtttctctggctcacaggcccaagttctcaatgaaatcgttttttaactttcacattcctaagctggcttcccggcacagaagccatggatttcccctctctcccttccccctcctcaaggaaatagtcttcctttatggattttcattggactctttcctcagcgattgtcctggctgtttattgatagtccttcccataagaaaatggggttaaacatggggtaggtattttgtctttcaaactacaaatggaatgtggtgacataaactagacatggggtgccctcaagtttccaaggggaccaatgtgccactgttcttccttggggatgaggcctttgactgttggatggatcagagcaggctccagtcagaccctggttctgaatgttttttttttcggtgactatccagtgagccttcagtgggtgcaaggcgccatacttgctgtgagagagctgagtagagtgttggtttttccataactacagggggaaaaaaagtcattaggctttccctttgtgtcagtgaaaccaaaagtgcttcttacaacgttcgctctgttcatgggttgtctatctaacattgagcagcattggagaggccacagctgagctatggagatgctaaattaactcatggcctcagtcagttcattctttaatttcctcaccaaattattgacttagagcataaccaaagacctcattcattcaccccaggtgggttggggtaattggagtttgttggtgaagtttgggggcggggtgttgggagtagagacagggtaaggggacgtgagaaaggaaaaggcatgaagttctatacctcagccagcagctgccttcgtttggaactgaagtccagccagcagactctctagctccatctcccctgtgccaccctaggtcatatgaccttggccaccttggagtagacccagacccctcgggacccgggacattagtctcaggctgctgatggattgatttgacatgaaccaaacacagccaaactcgatacccacaagctgtcagctgaacctgactgagtgttcttcctgagttcacgaggataggctagagtgcatttttactggtggatcagtgtgtgcgaaagagatgaccctttataaagagattttcaagtggatatatataaaagaaacagttgcttgtaaaatatacttttgtaaataatatttaattttttaaataatatatttggtgctgttttctcagatcccctgagagcactttttattttccttttaaattctatggtttcctttgcatttcttgaagtatattttaagggaaacagtgatcaccaatacatgttttcagttttttttttttttaaggtctctatcactttaatctggatcaaggctttgaagcaatgcctctctgcattttttccccagtggaacagactctgcagtacattaatcaggttgagaattgaaatattttcttgcatcagtattggctagaaaagaaaataaataaaaccaagttaatttagtagtaacaacttacagtgattcttcctgttggaagaatttccaacaaatcagaatcacgtttttagttgtgcgtgtgcgcgcacacgtgtgtaaaaagcactttcgattgtgcctcctgttttctcgagtggggacactttaactacagtttacacctcgggcgcataaagtttttcttctctttctctctggttgtttctgtttctgagtggaccaacagcagaacccacgaggatttgttttgagtatggagctgttgcgggtttgctcctttttcttgctttgcgtgctcagtttttacagactgtaaaggagatgtgttgtttgtgaagatggagcagagtcaaatctgtgcttctaactgagatgagagtgtattaatcacgtatcgcagggctccagctgttttagaagccacatcatgttaaacattaactggtttggattaaaagaacattaatattataatacacatatcttagtggtaaacagctttttttttttaaggtcagattgcctcaggtttagaaagaggctgagaaatcaaatcttgaacacaatcaacttacatattttaaaggaatctgcctcaaatgagaaaatatgctagttatctagatagaggaaagagatatttacttttttaaaaattaaaatagttatgaaatctggcagaaaaggtaaagcctagaagaaactatgaaagctattctcatgttaccaaattctatctgcgcatatgtttttgtataacatttcggtgacagtgggagtcggttccctttcccaacctgcagagactatcttccaatacagaatctgtctatttatgcttgtgtttacaaactgtatttgttgggtttgggtttttgttttctttggtggcatttttcaggtcactttgcttctataacaaaggtaattgttttcaaataatttgtcttcaccttttcctgtatttgtacatagtgattcagtattagagaaaagtgcattgtttctgtcatatttccaatctgtgttggtgctcatttgagaaaataaaagttttcaaatattaactcttaaaaaaaaaa

SEQ ID NO: 118 - DNA, 7739 bp, Homo sapiens
gtaaactctagcggggctagagcaaacattggattagcggcagcagcctgccagcctgcccgaggagtgctgggaccagcgcgctgcacgccgactggcacgatggcctcgtctcaggggaaaaacgagctgaaattagccgactggatggcaactctgccggagagcatgcacagcatccccctcaccaatttagccattccagggtctcatgattccttcagcttctacattgatgaagcctctccagtaggtcctgagcagccagaaactgtccagaattttgtctctgtgtttggaactgtggccaaaaagctcatgcggaaatggttagccactcagacaatgaattttactggccagctaggagctggaattcgttattttgatcttcgaatttccaccaagcccagagaccccgacaatgaactctattttgctcatggtttgttcagtgccaaagtcaatgaaggccttgaggagatcaatgcattcctcacagatcaccataaggaggtagtgttcttggacttcaaccacttttatgggatgcagaaatatcaccatgaaaaactggtccaaatgctgaaagacatctatggaaataaaatgtgcccagcgatttttgcccaggaagttagtttaaagtacctgtgggagaaggactatcaagtgctggtcttctaccatagtccagtggctctggaagtgccctttctctggcctgggcagatgatgccagcaccctgggccaacaccacagaccccgagaaactgatccagtttcttcaagcatccatcactgagagaagaaagaagggatcgttttttatatctcaggtggtgctgacccccaaagctagcactgtggtcaaaggggtggcaagtggcctcagagaaacaatcacagaaagagctcttcctgccatgatgcagtgggtccgcacgcagaagccaggagagagtggcatcaatattgtcactgccgattttgtagaacttggtgactttatcagcactgtcataaagctcaactatgtctttgatgaaggagaagccaacacttgatagcactacttggagtttccatgaataagatggagaaagctcattgtattagggcatactatctgtaaacactctgatcttcctattccactgagtctctgaagggaatagggctggtagtgggtgggaaaaggggaaaaactgtttcttcagtgattacaatcatactcttcattactataaatatttcatttcccatttgatgagcaaaatctacttctagtgttaggaataaaaaaaaaagaccagtaactttgtttttcaaaattagtctttgtaacatagaattcatgagtgtttacttgattaggttctctatttccagcctatgactcctacgctgtctataccctgcaacctttctgctccctctcttgctcgctctttttaatcagatgctgtatgggaatcaaaacaattgaatgcccaacattttgtgtattacattgttgtcttaaaacttactagttttgtgggacttgttataatgctctatagtcatccacagttgggcaatcatagctaatttttggtcatagaaaatctgcatcaaatcagtttccatgcatcagtaatattgaaggtcataatcagtgatttttgttatatgaaaataatagtgtttcacagtatttctatttaaggcagctataaatataggagaaaaatgtttttggagagctgtgaatgccaatttcagagggaaaaatggttgaggggtgaaagagatgtatggcattttaatttggcaatctcttaaataatattgccctgcaagtacccagtaaatggtaaggtacaagtgtgttaaaattgaaaactctgaaaataactctttaaaaagccctcttaatgatgctcttgatgaaagaaaaagacagaaggaaggaaggaaggaaggaaggaaggaaggaaggaaggaaggaaggaaaggaagaaaggaagggagggaggaagggagggaagaagggagggaaggacagaaggaaggacgggaggaaggaaggaagggaggaaggaaggaaggaagagagggagggagggaggaagagagggagggagggaggaagagaggaaggaagaagaaaaagactgcaagctttcctgccaatttgggattttcaaatatttaattctaaattccagattttaaggaagatttttcaagaaactgcaagtttttgacttgaaggaaagaaagaggaaggctggtagaagcagttagagcaatgtgtttgaaattatgtccatgaaatcacagggatctctgaaatatctttaggaaacttgaaatttatgaggtctgaatggacttgtttaaaattggctctgactcctcacttctgagtttcatcctatccgagggatgagattaaggcagaggcaaaagtttcacacaaagtttctgcaacctaacgtttaatagtccgggtctacagggaagaacaatgacacagcttgagcgttacttcctccttcgtgtcattgtgatatttgacaactctaaaaaataaaaaaaaaaaacttagagcacaataatccttgcctatgtacttcacaggaatattgtgaggtgtttataaaattataaaatttgatgaaattcttacaattattaattattttattttcatgtttagaaataatcacaccccaatagtttcctaggataatacagtccatgcaaagtagggtcatagagaaataaaagcatgccctcagcttttaatgaacttaaatgtagcacatatggcttaatctcttagacttagataagggagttcaattcaaaaccatatatgtcaagaccacaaataatcaagagttgatttcaagattataaatactcatgatcagaaaatagtacttattagcaattaaagggaggaaaagaaattgtttatactgaagagaatgtttatgaggagtgtgtatgtacctgtggtataccaaatagcatacatgtacacacaaaaatgtgtgtatacatttgggttgtgtgtatacatcttgccatatacaatatacaaacatatgcccattcctgtgatagcatacaaattcaaacatacagaaacacacacagatatggacacagtacaattcttcttttcaaatgaagacattgataatattaaataatttaattttaagactgaaacccttaatattgtgtgaaaaagagtaataaaacctttgaaagtagagtagatgatcacatcaaagtatttttgtaaaagaattctagtgtaggacttaattatttttaaaatatatttcttctcttctttccattttcccttcccttgtagttttattatctttctgtcttttacacctgctctttatgtgaaaatgtatatgaatccttttaaaatgattaggattattgaaatgtatgtcccgtaaatttggtttttgggcagactttctctctaactggctattcattcatccttcaggaggatcttagccaagaatatttgcaatgacacatgaatttaattttataaatataatggaaaacagatttttcatcatatcatgaataaaatatagaggtaactatgttgtattttcttgaacctagatactttctcatagtgtttgcttagaattaactttgtcctatttgtcaactgggttctggaaaaaaacaaacatgatgaagcttttgaataattgtgcagttttttaactagggaaagctttgtactgctgctaatgatatgcacccagaaaccttgttagacaaaaggcagtttcaagccaatgctatggtttccatgtggacatacagtgcctatgtagcaggcacttagagtaaatggacttgccttaatttataaaggagggaagaggtagaagggaaccatgggtcctccagctagagggggagtttactaaaagggagtccttggaaaggggaatggagagaaggtgcctttgactgtcttctatccattagttctgccctggagcacactggggaagcaggctgcgggccttccaaaagtaaaaaatggtgatatgcaatcgaagcttatccttagcctatgcacatttgtctcagctgggcattgtcttttcagagagcttgtagcacaagggctacacatgggcgccaagatggtggtagatacaccttggtgcactttttgttttacttgtttcttaagactatttcacaagtcctgtgaggcaaaaaaacaaaacaaaacaaaacaaccaaacaaatacaatctaacttttacccaatctacagcaggaaatcaaaggagtgggtggaatgagagaaaatatgcaaagagatcatttttaagtttgatttcctgtctgtaattttcaaggactaatatagcaaatttttcttctgccattatcatttatgtctccctatttaccacacaataatgtaaatgcagagaatgaggaggcatcttttaaaagccttaggatattctatatgatgacctcaatattgactttcagccatactgggaaaacttacttttcatggagtgccacctaacagtgaatgtattagagtataaaatgtttgccatgtatacacctgtatgtgcacatacacacattacacacacacacagaatgcacatttcacacacatatacttattattcaagttgaaactgcactctaatcaatctgagtctattgctgtttcaactcttaaaatcaatatctcctacattagtagatataaacataattcaaatatttaaatatttaagaggagaaaagtaactagaaaaccaatgaaaagtgaggccatcagaaatagaaaatgcctggcacgaacagtctatctaaattctcaatttcacttcaaattagagaatccataatggactagaatataaattacaaacacatacacacatcttcacttaaagttgttttaagttctttgaagttctgacatgtttttagccagggttatttgttcaggttcttccttgttaggattccagactggaaagttggaagtctcaggaaatgcatgtttccatgagttttttagtttcacagttttacagatccaacgacacaatcttttaatctttggtcactcaaccaaacaggagttccgtaggcagagtgctcactttgaattgctaatagaaaataatgcacagtgtcctcaggatatgctaaacaaggtttttaagagcattttattttacagcactttagtcttttcagctagatttcagtgacactatggtgtaaatgctatatctgccataacttattggtggctcctgtgttacatacagttttaaataatgctctaaattgtttgttttcccaatgataatgataaagtgttctgtagaatttgtaaaacatgtcaattgaatctgttgaaaattgtgtaattgttatttcaattgtgatactattttgtaggtaatagttttaaacgtatatttgtatgagtcaaaagtatgtgcttgtatgtggtatgtgtgtgtaagtatataatatcttatcaaaaatcaaacttatcctaaagaaaaagggcacattgtgaccagccttaatttattaacacttttttgttgtttttgcaatttggatttaaaattgaaacagaaattaagtttttgttaaaaatggtgtcttttaattttgtgaggaatgggctttagaacctatctgagttcccacaagcaaactgtccaccttgtgaggtaccccattgcttttcgtaataatcaaacatcaattcatatattaacttcattttcatacagactaatttgttttcatcaacaatagaaccagtacacctttaaagttgaccttcccaacatggcacccatttttctttaatgataaattttccatgaaaaattgtttctccaaaccattactttttaaaattcaatcttcccaagtaagatgaactgccttggtgttaggagagcttttaaaggcccatccatactaggtggttccaacatggttctcttctcgagaaaacaagcatgcaacccacacacttttctggtctgccccacgtgtagaattagtctagcaatagaaaactcatgactgacaaggatctacacatgtggtcatgcttgaagcaaaaattctgtgaccttctttgggcttggatctgattacagaatattaattaactttcttatttcctttctttctccatccttagttattccttttcaatatttagagttgccaggtaaaatacaggatatccagtgaaatttaaatttcagataaacagtatttctttagcatatttctcatatatttaatcagacatactttcactttaaaaaaagtttatctgaaattcaaatgtaactgggtatgtcctatatattttttcctaaatctcacaattctatccacactgcctttctatctttttcagctgggctatctataaggggcgagatctacctccctccatacccttgtgttcagacaccttatgaatatctgcagtcataatgtccttcaagaaagaaaacattggtcagctctaggtcctgcaaatgctttttgaaggacgaactcaaatacagatgggataatcaagtaaatatcttcataggatcaatgccaccatgttcaacacttccctttgccagcctgttgtgaggtccaagtttccccattaatcccttatatagcatttcccagtaactgggacaaccaaaaacacaccgacatattagaaatgctcctgaaaagtggcaacaccgcctaactcagtaccaggacctcttttaaattcaatttcttttttctttcagagagataacaaacgaattcattatttcccccattcacatcttaccacaaattatttttatcaggttaaaactggtcatctacggaattgtagaaaggtgacataggaactgtcttcactgctggaagaataaaagagtctgaggtatagacactgccctggtgacaccttctcagaacattgttgggggacaggggaggcaggcgcaagtaggggatagaatctgaccctgacatgcagctatcacctggcagagagactcgtcaaagcaaattataacgaccagtactatttttttttggaattgaaaacccaagaagccctaaaataagaacagtgagatcaaaggctggtttctaaaacaatgcagaaaatagaaccatgttggaattcctaaattctagctttcaaatactactgtttccaacagtgaatccttgacagagactgaatgcagatggaattttgaaacattttcagtagctacctcctctcctgaaattcctataagtggcagaggaaaatccaaatcctttaatataacatgtccatctcatgactcctgcttacacacatttgtgttgatttgcttcatttctggaggatgggaatttgcagagctggtgacatttccttcattagacaccagaaattcaccagagagagacagatctgtgccttctctttttaggatctggttattgatactttaataaatgtggtgtaaagaaaatccatggctacagtctgtatagaaaatgtgaattttttaaataagattgtgttcttaatgtaaaaaataaaagtttatttgtattcagtgaaatgcctaataaagtcctggtaccaattatcttta

SEQ ID NO: 119 - DNA, 6651 bp, Homo sapiens
ataacacccggccccgccgggcggccgcgggtgggtagagaacatggacttcccgtgcctctggctagggctgttgctgcctttggtagctgcgctggatttcaactaccaccgccaggaagggatggaagcgtttttgaagactgttgcccaaaactacagttctgtcactcacttacacagtattgggaaatctgtgaaaggtagaaacctgtgggttcttgttgtggggcggtttccaaaggaacacagaattgggattccagagttcaaatacgtggcaaatatgcatggagatgagactgttgggcgggagctgctgctccatctgattgactatctcgtaaccagtgatggcaaagaccctgaaatcacaaatctgatcaatagtacccggatacacatcatgccttccatgaacccagatggatttgaagccgtcaaaaagcctgactgttattacagcatcggaagggaaaattataaccagtatgacttgaatcgaaatttccccgatgcttttgaatataataatgtctcaaggcagcctgaaactgtggcagtcatgaagtggctgaaaacagagacgtttgtcctctctgcaaacctccatggtggtgccctcgtggccagttacccatttgataatggtgttcaagcaactggggcattatactcccgaagcttaacgcctgatgatgatgtttttcaatatcttgcacatacctatgcttcaagaaatcccaacatgaagaaaggagacgagtgtaaaaacaaaatgaactttcctaatggtgttacaaatggatactcttggtatccactccaaggtggaatgcaagattacaactacatctgggcccagtgttttgaaattacgttggagctgtcatgctgtaaatatcctcgtgaggagaagcttccatccttttggaataataacaaagcctcattaattgaatatataaagcaggtgcacctaggtgtaaagggtcaagtttttgatcagaatggaaatccattacccaatgtaattgtggaagtccaagacagaaaacatatctgcccctatagaaccaacaaatatggagagtattatctccttctcttgcctgggtcttatataataaatgttacagtccctggacatgatccacacatcacaaaggtgattattccggagaaatcccagaacttcagtgctcttaaaaaggatattctacttccattccaagggcaattggattctatcccagtatcaaatccttcatgcccaatgattcctctatacagaaatttgccagaccactcagctgcaacaaagcctagtttgttcttatttttagtgagtcttttgcacatattcttcaaataaagtaaaatgtgaaactcaacccacatcaccacctggaatcagggattgctcactccaggttactgcaaccctaactcactctagtgggaccttgactggagaaactccacgatcttcctgaagaagagaaatggatgtttccaaattccacaataagcaatatgtggtgataatgaaaagaatgattcagtcttgacggtgaatggaagacacttacctaacaagtactgctcatttacactcaaattaatcttgaagtagtcttaaaatgtgtaagaagttaaaacttgagaagcaaaaaaatgcctgcaaaaagaagatcattttgtatacagagaaccggatgaatataagcaatgaagatgaacatttattgatcttctacatacaagacttcaccataaggccaggagcagtggctcacaccttgtaatcccagcactttgggaggccaaggtgggcggatcaccctgaggtcaggagttcaaaaccagcctgaccaacatggtgaaaccctgtctctactaaatattagcggggtgtggtggcgggcacctgtaatcgcagcctttcaggaggctgagacaggagaatcgcttgaaccctagaggcggagtttgcagtgagccgagatagtgccattgtactccagcttgggcaacagagtaagactctgtctcaaaaaaaaaaaaacaaaaacaaacaaacaaaaaaaacacctcaccatgagtgctacatgtgaatagatattaagtgccatatataattagttctcagaagaagggagaaatgatcataggactgggaattgttttgcaaacgttctaggagatgtgagagaaaatatgtaaccacatcttagtggcccaagaaaatacaggcctgaagggataagattgtgtctctatagagcttcaaagcatacaggtcaattaagaaagcccctctctctccagagccgtttccctagcttttggcacctggatgccacagtcctccattaggctgatgactccaaagatgtaactctagcctcttgcctgagcttcagactcgcgtcccactgcccacaggacacatccacctggatgtgactcacaggtacctccaacccatcatgtggagatactcatcctgttccccctagagctgctcttcctgctgcattctctctctcaattactgggaccaccaagctaggaacctgggagtcatccttgatactttctcttcctccttaatcctgtgtattcagcaagtaactaaaggttggtgttggccaggcatggtggctcatgcctgtaatcccagcattttgggaggccaaggcgggcggatcacttgaggtcaggagctcaagaccagcctggccaacatggtgaaaccccatctctactaaaaaaaaaaaaaaaattagtcgggcgtggtggtgcatgcctgtaatcccagctactggggaggctgaggcaggagaatcgcttgaacctgggaggcagaggttgcagtgagccgggattgcgccattgtactccagcctgggtgaagaagtgagactctgtcttaaaaaaaaaaattggtgctgataaatattgatgaattctgctctctgctctctatggttgtcaacactgcagagttgaggcctcatatctcacctgcactgctgcaacagcttactggtcccttgctcccagccttctcctcttcagtccatcgtccacacagcactggggaaggggagccacttgaaacaaaagtcaacaactggttgtagttcataaacacagagctgtttgtgtcccctgtatctggaatgccattatgacccactacattttttctttcctacccctcttaaaactcagttcaggtagcagctccactaggaagccttggctgaccataatcccattcaattccatttcacctcttcgcaggcagtctggggttagggaccctttctctttgctccccaaaataaactggttatctctactattggatttacaacattgtattataatcttctccatgtgtgccttctctagtagaatgtgagctctttgaggccaaggtctatttaatttgtttgaaaaattcattgttatatcctcaaagcctagcacatagtaggtactgaatgaatgaatgaacaaggggtgccaggagactgctactcccagtccttcccagaaactgcctagggctttgagtcattttatgaagctaggtcttaatgcgtaggcaacctcccagctcactatgaacgctgacagaagagtgttttcatgtctataatcaagaattccagatacattccttttactgaaccttgaattgatcctaagattggtagtaaaggtattatgttacctcctaacagcactacaaagtacctttttttatcagaaaaaaattttaccattaggactcaatttgaagtactaatgcttctcaagttctccactatgagagttaccctgtattagaccgttacctataagaattaaggggtaaagcactaaacagaaaagaaaaaaaaaatagcaactctggtgagcagatttctttcctttcttccttccttctcctcttcctaccttcctccctcctttccctctcctccccttctctccctttccctccccttcccttccttttcttctttcctccgctcccctccccttccctccccttcccatccttctttctcttttttttacttaatccccagtgtgacagtaatataggctgatttctagaagtgtggtgtattactcatggaaagtgagttgccttggttattactttcaattgaaagttctatgggatctagaaatgagacatactggcatggagagtgagaacgacaaaggaatgaagagctacaggagcatttaggccatttctatgccaagcttattctacatgcacaaaatcatacatgttaataaatataaacaaattggaggcttatttaaaccaattatgaaatctggtaatttgtgcagcagcaatagatgataaccaaaaaaaactcataataatctgaatatcttgatcatttgtatttaaagaagcagtaattatatacttgaaagtacataatatagtattgcaaaaatgactttggtatattacaaattaaaagtatataagatgaaacttgatttgctatcaagccccaagcaatttttcaactgggcattgaattctaacttttctaagatagcaatttttgaagagacacgaacaaaaatctgaattagttcatgagccttaatgtaaatctcttgctgaaatagtttttaaaatcagaatttagttatctatcagactcaaaatcatttaaagactaacaaaacacaatcatgatattctaactgtggtcaaaccaggtacccaagccacctccctgcccaacgcctttccggcttttcccctccctcttgggctggtggttatgctcctccagctctagttcagctataattccttttatagagaaaccaacctgatacacactttcatgatgggagaaaaatgtgggagtgaaatggtatttagaaagcagcagtcaggcacggtggctcatgcctgtaatcccagcactttgggaggctgaggcaggcggatcacttgaggtcaggagctcgagaccagcctggccaacacggtgaaaccccatctctactaaaaaaaaatacaaaaattagccgggcgtggtggcaggcacctgtaatcccagctacttgggaggctgaggcaggagaaatcgcctgaacccagaaggcagaggttgcagtgagccaagatcacatcactgcactgcactccagccggggtgacagagcgaacctctgtctcaaaaaaaaaaaaagaaaaaagaaagaaagaaaaaaggcagaagccctggattcaaatccgccacacattcagtttctttatctgtaaaatggagaccaccccccgccacgctgaacggtgattctgtgactggtaagagatgctacatttttggtgcttgttcaggtggaggaaagatgatagttaacactcaggtaataagtattttgaaggcagtataatataccttcttaaagagtatacctactcaaatgttggtaaatgttgacatgattgaatctaaatggcaaagagtattttagaaaaacattaagtccctgcagataaatgacagtgttgatttggatgcttaattacattcagacatgaactgttggatgtatctgaaatgttaaaagctttttctcaacatttccaaaagtctttccaagaaatcaatgttatgttttgttccagaagcaaatttgcatttgtgatctgtttctaaaaatggtacaagttagctctgtttagaaagtaaaaatatctgatgttagattggaagtatctcttcctggggaatccagaaagataagcatagcatattgtcttactgcaatagataagttgcttattgagaagtctggttgttattctatatggtaacaatacagttgatgtatattttatgatagatcctttatattttcctcatgactttagaagggggaagggggagaaaattatgatgaccagactagttaaagagcattgaaagtccacagtactgtagctaaagtagaagtttgggtttgttatagactttacattatatcaactaataagcagatactgtacagtattgctcaccattttatcatacttttgcatatgaactactccattgccttttatagatgttttatagctgatcttaccagttttcctggtaactttttttatttcttttttttttttttgagacggagtctcgccctaacacccaggttggagtgcagtgccgtgatctcggctcactgcaacctctgcctcccgggttcaagcaattctcctgtctcagcctcccgagtacctgggactaccggtgcctgtctccacgcccggctaattttttgtatttgtagtagagacggggtttcaccgtgttagccaggatggtctcgatctcctgacctcatgatctgcctgcctctgcctggacctcccaaagtgctgggattacaggcgtgagcccccgcgcccagccactttctttaatactataactaagaatttattaaaatgcacaaattgtctaagactgtaaagtttattggggagaggccatgactacctctgaatttagtaaatttaaaatatttctgattctcaataaagaactaatatccatataaaaaaaaaaaaaaaaa

SEQ ID NO: 120 - DNA, 5290 bp, Homo sapiens
attccctcggcgggccgagcctcccctctctcccgcccctcctcctccctttcccacccctcggagtagagctgcacatgcggctgctccctgctccgtcccgcccagccactgtcgcgcaggaacgggtccctgcagcccccagccgatggcaggacagtagccgcctgtcagaggtcgtgaacggctgaggcagacgcagcggctcccgggcctcaagagagtgggtgtctccggaggccatgggctacccggaggtggagcgcagggaactcctgcctgcagcagcgccgcgggagcgagggagccagggctgcgggtgtggcggggcccctgcccgggcgggcgaagggaacagctgcctgctcttcctgggtttctttggcctctcgctggccctccacctgctgacgttgtgctgctacctagagttgcgctcggagttgcggcgggaacgtggagccgagtcccgccttggcggctcgggcacccctggcacctctggcaccctaagcagcctcggtggcctcgaccctgacagccccatcaccagtcaccttgggcagccgtcacctaagcagcagccattggaaccgggagaagccgcactccactctgactcccaggacgggcaccagatggccctattgaatttcttcttccctgatgaaaagccatactctgaagaagaaagtaggcgtgttcgccgcaataaaagaagcaaaagcaatgaaggagcagatggcccagttaaaaacaagaaaaagggaaagaaagcaggacctcctggacccaatggccctccaggacccccaggacctccaggaccccagggacccccaggaattccagggattcctggaattccaggaacaactgttatgggaccacctggtcctccaggtcctcctggtcctcaaggaccccctggcctccagggaccttctggtgctgctgataaagctggaactcgagaaaaccagccagctgtggtgcatctacagggccaagggtcagcaattcaagtcaagaatgatctttcaggtggagtgctcaatgactggtctcgcatcactatgaaccccaaggtgtttaagctacatccccgcagcggggagctggaggtactggtggacggcacctacttcatctatagtcaggtatactacatcaacttcactgactttgccagctatgaggtggtggtggatgagaagcccttcctgcagtgcacacgcagcatcgagacgggcaagaccaactacaacacttgctataccgcaggcgtctgcctcctcaaggcccggcagaagatcgccgtcaagatggtgcacgctgacatctccatcaacatgagcaagcacaccacgttctttggggccatcaggctgggtgaagcccctgcatcctagattccccccattttgcctctgtccgtgccccttccctgggtttgggagccaggactcccagaacctctaagtgctgctgtggagtgaggtgtattggtgttgcagccgcagagaaatgccccagtgttatttattccccagtgactccagggtgacaaggcctgcttgactttccagaatgaccttgagttaacaggacagttgatggagccccagggtttacatgaagcagaaccttctttggttccatgttgactgacttatggcatgactcttcaaccccgaggtccctgttgtcagatctattgtttgttgcactaaaatgaggatccagggcagcaggccagagaaagcaaaggtgcactccagactctgggggtggacatctgaccccaagggggctgctgctcctctcttgggtagggtagtggctggggtggagtgggaagggagcattgcagcctaagaagaaggccagagagggaaaaggcaggtgcttttggcagagaccataagagaaacctgccaaggagcatccttggcagtgggaatgttctttctgctctatactgtggcctgcaggagggttggagtgctcttcccactccagctgacagccacaccgtggcagcttgctgggctttgggaagtttgctgtgctttggaacaatcacagggaatggccacaaacctgcccgcctaagaccctgaatccgtacttgggtcacatgactctcattttatttacagctgtgctccacactcagaaaattccctggggtcaccttctagttgcccccattcccagcctgactagaactcctgtcttctttctccatggagcctacctctgtctgagacaggtgcctaacctgggacctgtggtcatgtgagtctgggatattctttagcttacctgggcacaaacagaattttccatttattaagcagtacaaatgtttttcatccattcctaatcaaattctgtctggggacgaagggttggacgggatgacctccagaagtcccttcaatttctagtacctgtgactcttagccctcaccacagccttctaaattcccaaatcctagactgctcctgggcattagcaaggcagagcctttttacctggcctagaaagggcaaggggtgaggataggacagagggattttgttcaagtttgctgcaacccaagtggacgttaggccaggccttatctgaaaggccagcagctgatgctgtactaacccagtctttcttcactctggcttcaaaaagccacagcagagcattgtcaccgcaggtgctcatgctgctcccctaaagccaggctcaggagaagccagtgtctaggcactgagcagggatctgccccctagttcaggtccaaattcaccttcccctaaaccccaagcttcccaacagatcatatggtaggaccctcgagagccttacttcaaagtgcctgggctcagcctggtttctgggtgctagatccagcccaaacctgggaaggccagccttgtacagtctgctcctcttgttcctgaaatgtgtttccttttcaggagatggggaataatttccttcaggcagctgaaattcaccaagaacagcgggtacttatttctcagctgtgccttccctttctaagcaaccacactgcttggcccttcaagggtcagggtgagacgtgatgggctaggcctccgttgtctggttgctaatgacagccttgcaacccaaggtgaggtgaactccaggcatgtgtctggccctaactcctataaagtgcctcggacagtccgcagttgtagcagaaaccaacaagaaccactccttcatgtttggaaaataatttctcttgtattatctcctttgaagaaggcaaggctgataatatgacaaacatcattgtttagatgaggctcagagaggtagcactctcagagtgttttgaccagtttaagccgcagacctggagcttcagccaggtctgactccaaagctgttccattacaccacagcattgtgtggaatttgaggtctagagagaaccaataaaagtggtaattgggaactgaaatccttgagagttccggggagaaacccagagatgcctgatttcattcctcgatggtaatacccgtcctctcggctgccaggggctctgtggcaaaaagagtcagacatttctttggaaaacagcgaacagccttagagctcttgtgttcagaagaatcttcctggcacaatgttggagcagcaggcctctgggacccacagaacttgtggcctttatgttctttcacccatcctaggaaccagccaaccatcatgtgtagagcccctactgtgggcaaagtcctcctttcattaccctacagacagcttacaggagccagcctgcttcccacaactactagtgtgactccttatctctttccaccataccttagagactttgatactaccagggtctctcagggatggagggaagacctgaaagagaggactggttctgaggccagaaaggtgtgaggagagaggaggaaaagtcttcctaattgtgcccctaaagagcatcctgataccattctattctccagacatggaggggatgataaaggaaataggatctccactggacccttgattcattctgaaccctccaaaggaactctagagggcgagggatgatgagggaagcaataggtagctggggagccctattgctgctaagtcattggcaaagtgacaaagcaatttactgatgagagaatgtggaaatagatgtgcagtttggaattatgttggtgtgaatttgccagaggaccaatgcttgcatggagaatgggacgaggacatttgtgggcaagcagatgacagaggtttgaaggagaatggcatggcaggagtctctgccagttacttgggcttcaacagccaagctggcacaaaagacagctggcggaggctgctcggctactggttacctggagaagtagtatttgcctatttcccccttcatccatcctgagccaaatttcttttgctgaacaggaaagagctaggaaccctggaggtaaacaaagactttgatccatgtatgagtgtatgtgtttatgtaacttcctgtggatgcaaatagattcagagaaatttagagctaaaaaggcccttagagggaatctagcccaacctacattccaccctgttacttatgtagaaactgaggcccagagagggaagatgacctgccccaagtggtgagcaagcaccaacctccagactcagcagagtgagggggtaaagcagttcctgtcccacatggccatcttctttcttccacccacaaactccaggctggaagtacttggcccccttcaggagcctggccaggcagggagagagtagctgcagccttcatcagaactcttcctcctcccaaggcattctcccagctctagcctctggactggaaagcacaagactggcccagtgccagcaagtccttaggctactgtaatgctgcctcaggacccatccctgcctggaggctcctctaggccctgtgagcacaaagaagaaagctgatttttgtcttttaatccatttcaggactctctccaggagggctcggggtgtgtcatttctatattcctccagctgggattggggggtgggctttgttgtgagaatggcctggagcaggcccaatgctgcttttgggggtcagcatccagtgtgagatactgtgtatataaactatatataatgtatataaactgggatgtaagtttgtgtaaattaatggtttattctttgcaaataaaacgctttccccgtctgttcttgaaaaaaaaaaaaaaaaaa

SEQ ID NO: 121 - DNA, 4589 bp, Homo sapiens
gggaaatagagtcctggcgctgccgcggaggatcctgggtgcagccgctcagagaagcttctcgcgcacaggaagtcgctgcgaggaggcgcgtgtgcggggagttgaatctcccgctcccttgaggctggggttgcgtctgttgacgcggccgactacaatcccgagccctgccagccgggaacacggaggggaaggaggaggagcttaaaagaggctactgaaccccagttggccatggctgaggaatttgtgaccctcaaggatgtcggcatggacttcaccttgggagactgggagcagctcgggctggaacagggggacacgttctgggacacagcgttggacaattgccaggacctcttcctgctggaccccccaagacccaacctgacctcccacccagatggcagtgaagatctggagcctctggcaggaggaagcccagaagcaacaagccctgatgtgactgagaccaagaactctcctctgatggaggatttcttcgaagaaggattctcccaggagattatagagatgttatccaaggatggcttctggaactccaatttcggagaagcctgtatagaggacacctggttagatagtttgctaggcgatccagaaagtcttctgaggtctgatattgccaccaacggggaaagtcccacggaatgcaagagtcatgaattaaagagaggactcagtcctgtgtccaccgtttccacgggagaagattccatggtgcataatgtttctgaaaagaccctcacaccagctaagtctaaggaatataggggtgagtttttctcctactccgaccacagccagcaggattctgttcaggaaggggagaaaccatatcaatgtagtgaatgtgggaaaagcttcagtgggagttaccgtcttacccagcactggatcactcatactagggagaaacccactgtccatcaagagtgtgagcaaggttttgaccggaatgcttccctttctgtgtatccgaaaactcacacgggctacaaattctatgtgtgtaatgaatatgggacaacttttagtcagagtacatacctgtggcatcagaaaactcacactggagaaaaaccatgtaagagtcaagatagtgaccacccacccagtcatgacacacagcctggtgagcatcagaaaactcacacagatagtaagtcctacaactgtaacgaatgcggcaaggcttttacccggatcttccaccttactcggcaccagaagatccacactcggaaacgctatgagtgttccaagtgccaggcgaccttcaacttgagaaaacacctcatccaacatcagaaaactcacgctgcaaaaactacctctgagtgtcaggagtgtgggaagatttttaggcacagttcgctgctcattgaacaccaggctcttcatgctggagaggagccttataagtgtaacgaacgtgggaaatccttcaggcataactctaccctaaagatccatcagagggttcacagtggagagaagccttacaaatgcagtgagtgtgggaaggccttccaccggcacactcaccttaatgaacatcggcgaattcatacaggctacagaccccacaaatgtcaggaatgcgtcaggagtttcagccggccctcacatctgatgcgacatcaggccattcacaccgcagaaaagccctatagctgtgctgaatgcaaggagactttcagcgataacaatcgccttgtgcaacaccagaaaatgcacactgtcaaaaccccatatgaatgtcaggagtgcggagaacgcttcatttgcggctcaaccctgaagtgccacgagagtgttcacgccagagaaaaacaaggattttttgtgagtgggaagatcttggatcagaacccagaacagaaagagaagtgctttaagtgtaacaaatgtgagaaaacctttagctgcagcaaatacctaactcagcacgagaggattcacaccaggggagtgaagccctttgaatgtgaccagtgtgggaaagcctttggccaaagtactcggctcattcaccatcaaagaatccactctagagtgaggctgtataaatggggtgagcaagggaaagccatcagcagtgcctcccttatcaaacttcagtccttccacacaaaggagcacccttttaaatgtaacgaatgcggaaagaccttcagccacagtgcacacctctcaaaacatcagttaattcacgctggagagaatccctttaaatgtagtaagtgtgacagagtcttcacccagagaaactaccttgttcagcatgagcgaactcatgccagaaagaagccgttggtgtgtaacgaatgcgggaaaacgttccgtcagagctcatgcctttctaagcatcagagaattcactcaggtgagaagccctatgtatgtgattactgcgggaaggccttcggcctgagtgctgagcttgtccgccaccagagaattcacactggagaaaagccttatgtttgtcaggaatgcgggaaagccttcacccagagctcatgcctttctattcaccggagagttcacactggggagaagccctacagatgtggtgaatgtgggaaagcctttgcccagaaagcaaatctaacacagcaccagagaattcacacaggggagaagccttactcctgtaatgtgtgtggcaaagcttttgtcctcagtgcccatctcaaccagcacctgagagttcacacccaggagacactttatcagtgtcaacgttgccagaaagcctttcggtgccactcgagcctcagccgccatcagcgtgtacacaacaagcagcaatactgcctgtagccattgggtggcagcagagtcccagaatatgagaccgttactcggatgttgaaagttggaaactatcccattgcaagtttctctccaaataaatgcatctaaagattgattagaaagtttgtgcgcatgtttttcattataacaatgaaaacacaaaagtggagaagctgtacaacgtcaggattcagaggtaggctctggagccagtctaccttgagttaaatcccacctctgccatctactacctaagtgaccttgggaaggtcagaaaaatctctcagggcctcggtgtccttatctgtaaaatgggcatcacctacctcagagggcttttctgaggattaaataaataaatgtgaagcacttagaactgatggccagcacatgagggctcaccaagtgtaagccacaaatacacatcagctatagcacaaatatacttgtgttacaagaaaggaattagtaatctgtgtttactgtagttaatgttcttacaatgtatcgcttttaatttaagttttccttttttacagtttttctccagcactttactcttcttaagtgcctggccttttttgtccctttatctctcctggtttttttcttaagccccagaaagccaaaaagaacatgtaaactcttcacctcaactagctacaaccttccactcctaacctcccaagcttctcacttaaagaggactccctatcccacaaacacatgctccctcttcctatgaccttcctccatttaacagtgttggttatgcaataagacacccaatttttcatgggagttgacaccaaaacacagctggattccatcaggaaagctgcattgatcagggtgttaaccgcatatgaaacaacccatatggaagacatacttaggggtcaaacctgtggtgtgtggaagtgaccactgggatgtcatcattcaccatttatccaggatggccgctcaccaggcaatttgctaggctcgggggcgggtagtatccatacactatgcactactgctctgaagcttctggaatcagaaatgaacccattttcatcgacgattgctgttagttgacaagtgacatcttgaaaatgccacattccctcatgtcacaggaagttctgggatcaccaaggattgttggagagtccagtgagatggaaccacacaaccagttccctaccagtgtcttgtcagctctgggtgtttgttccctgccactaagtggctcagtcacacctttgctgaaacacagtagtcttatgaaaagcactggacacatactttgaatacctttcatattttaggtgctgaaaatggtgagggagtgagtgctctgcacccttgggcttttcaactcttgcacctggagttctgctggttaagtttgttaaacttagttgaaactgggaacctgttggctaaccattggggccttacactgtttttcaaatggttgcaacatttaacttctcgcacatggttcccgtcctctggagctctgtcttgtcggggagatgggcatgttgtataccaaaagagtgtacaaagtgttgcagggctgtgacacaatagggactctatggaaaactggcagccattgggtgtgggggcagtctgtaaatcagtcacctgtgttgctgcaggccaaggtagaaacgccctccgtgtgtgcatatttgttggttctctgattaaagttttgagtctaaaaaaaaaaaaaaaaaaaaaaa

SEQ ID NO: 122 - DNA, 4141 bp, Homo sapiens
acatttctgcagccgcgcggcgagccattcgcggcggctgctgcagctcctactgcatcttccttctcttcctttcctcgggctccggtctcggagtcggagagcgcgcctcgcttccagagcccccggacccggcgagtcagcgatcgccgagccggccaccatgcccggcagaccgcgccactaggcgctcctcgcggctcccacccggcggcggcggcggcggcggcggcgtccgcgatggtttcagacgctgaaggattttgcatctgatcgctcggcgtttcaaagaagcagcgatcggagatggatgtctctctttgcccagccaagtgtagtttctggcggattttcttgctgggaagcgtctggctggactatgtgggctccgtgctggcttgccctgcaaattgtgtctgcagcaagactgagatcaattgccggcggccggacgatgggaacctcttccccctcctggaagggcaggattcagggaacagcaatgggaacgccagtatcaacatcacggacatctcaaggaatatcacttccatacacatagagaactggcgcagtcttcacacgctcaacgccgtggacatggagctctacaccggacttcaaaagctgaccatcaagaactcaggacttcggagcattcagcccagagcctttgccaagaacccccatttgcgttatataaacctgtcaagtaaccggctcaccacactctcgtggcagctcttccagacgctgagtcttcgggaattgcagttggagcagaactttttcaactgcagctgtgacatccgctggatgcagctctggcaggagcagggggaggccaagctcaacagccagaacctctactgcatcaacgctgatggctcccagcttcctctcttccgcatgaacatcagtcagtgtgaccttcctgagatcagcgtgagccacgtcaacctgaccgtacgagagggtgacaatgctgttatcacttgcaatggctctggatcaccccttcctgatgtggactggatagtcactgggctgcagtccatcaacactcaccagaccaatctgaactggaccaatgttcatgccatcaacttgacgctggtgaatgtgacgagtgaggacaatggcttcaccctgacgtgcattgcagagaacgtggtgggcatgagcaatgccagtgttgccctcactgtctactatcccccacgtgtggtgagcctggaggagcctgagctgcgcctggagcactgcatcgagtttgtggtgcgtggcaaccccccaccaacgctgcactggctgcacaatgggcagcctctgcgggagtccaagatcatccatgtggaatactaccaagagggagagatttccgagggctgcctgctcttcaacaagcccacccactacaacaatggcaactataccctcattgccaaaaacccactgggcacagccaaccagaccatcaatggccacttcctcaaggagccctttccagagagcacggataactttatcttgtttgacgaagtgagtcccacacctcctatcactgtgacccacaaaccagaagaagacacttttggggtatccatagcagttggacttgctgcttttgcctgtgtcctgttggtggttctcttcgtcatgatcaacaaatatggtcgacggtccaaatttggaatgaagggtcccgtggctgtcatcagtggtgaggaggactcagccagcccactgcaccacatcaaccacggcatcaccacgccctcgtcactggatgccgggcccgacactgtggtcattggcatgactcgcatccctgtcattgagaacccccagtacttccgtcagggacacaactgccacaagccggacacgtgggtcttttcaaacatagacaatcatgggatattaaacttgaaggacaatagagatcatctagtcccatcaactcactatatatatgaggaacctgaggtccagagtggggaagtgtcttacccaaggtcacatggtttcagagaaattatgttgaatccaataagccttcccggacattccaagcctcttaaccatggcatctatgttgaggatgtcaatgtttatttcagcaaaggacgtcatggcttttaaaaactccttttaagcctccttgttttgatgtcaccttggtaggctgggccctctgagaggttggaagctctaggcattgttctctttggatccagggatgctaagtagaaactgcatgagccaccagtgccccggcaccctttaacaccaccagatgggtgttttcccccatccaccactggcagggttgccccttccctccaatcatcactgtgctccttttttcccggcctacgaggcagctcctgccactatctttagagccaataaagagaattaaaaacctgtgcaccaggagcatcttttaaatacactagccattctcttgctttacaaaaacaacctaaccatcacaagaaagcctgatgaagtccagccgtgctccagcctcactttccctgcttggaagcgtggggtctccctggctctcccaggataccatgctgtcctcttagtgacctcgtcgccctgcaacctccagtggggaagagtcacagagagcacctaagcagaggtggagacggcgcggtaagaggagggggagccaggctcaagtattggcaccaagttaggtctcagaggaaagaatggaaaccaatcactttacatttttatttttattttcggtggaaaaatcatccttttttgggacatacttgccccctacttcctcttctctctggaacggctcacaatgagtgtgacattagaaaactccttgcagaggagagtttctccaggctcttcctgggcccttagatctgcagttccgacaagctttggctgcaggaggttttacccatgaactggccatcctactaggaccacaagggaccaagggaatcagggacaaaggcccttcctgccagcccatgatcccgggattggctctcttcccctacttccacttattcttgactctgagaacttttggaacccaatggaatcagcatttcaaggtcaagatgaactgaaggggaagagaagtaaaacttggcctcctccagcccctctcatggcaccaatggaagtgtcctcctgttctctggtcaatatgtgtgtttactttgcttgctttgactcatgccttactccatggccaccctctcccaaagagggggctcgcttcccccattttcaacttgatccactgaggagagggaagggggtgactttcccttcttcagtaggaaaggcacatttgtagggcctgaaactctcccgtatttgctgactcattggtggagtagacttctggctcccagctccactggcccatggggcctccattgtatgaagtcagcataggctgcccacctaatggtggagagcatgaaactgggagcatcctgtggggggcttgtgggggaaaaaggtggttgttttaacccaccgttgttttggggtggtgttgcacactagtagagaatagagtctatgcctttggcaaatttaactgggagtttggattcccacttaagggttttacttcttgggtcctgtggatggtggttcttcgtgtcaggatcccagcccgattctgcaaatgcctccatggggtttaaaaacatgaggctttccaagttcttgcccagtatctggggcagcctccagagtatcacctgggagttcaggttctctccagggctccaggtgtgtgtttatctcgccccctccagctctcctcatcctgctccccattgctccatgtcaggctgttccccattgtgccctgctgatgctttgggtccagggcctcctcccaagtgtggctttaaggagtaagcttgaggatgatgttttttaattattgtaaatcattacctcatttccagcctcccaggctccatccatcccagcatcttttattctgccattttcctcaccttgtgctatgacaatggggcgttgtgtttccacagagacttataggagtgttcagtgtatagtttcttaataaacactttattttctaatgaaaaaaaaaaaaaaaaaa

SEQ ID NO: 123 - DNA, 3547 bp, Homo sapiens
gagagacgagggcagcggaggaggcgaggagcgccgggtaccgggccgggggagccgcgggctctcggggaagagacggatgatgaacaagctttacatcgggaacctgagccccgccgtcaccgccgacgacctccggcagctctttggggacaggaagctgcccctggcgggacaggtcctgctgaagtccggctacgccttcgtggactaccccgaccagaactgggccatccgcgccatcgagaccctctcgggtaaagtggaattgcatgggaaaatcatggaagttgattactcagtctctaaaaagctaaggagcaggaaaattcagattcgaaacatccctcctcacctgcagtgggaggtgttggatggacttttggctcaatatgggacagtggagaatgtggaacaagtcaacacagacacagaaaccgccgttgtcaacgtcacatatgcaacaagagaagaagcaaaaatagccatggagaagctaagcgggcatcagtttgagaactactccttcaagatttcctacatcccggatgaagaggtgagctccccttcgccccctcagcgagcccagcgtggggaccactcttcccgggagcaaggccacgcccctgggggcacttctcaggccagacagattgatttcccgctgcggatcctggtccccacccagtttgttggtgccatcatcggaaaggagggcttgaccataaagaacatcactaagcagacccagtcccgggtagatatccatagaaaagagaactctggagctgcagagaagcctgtcaccatccatgccaccccagaggggacttctgaagcatgccgcatgattcttgaaatcatgcagaaagaggcagatgagaccaaactagccgaagagattcctctgaaaatcttggcacacaatggcttggttggaagactgattggaaaagaaggcagaaatttgaagaaaattgaacatgaaacagggaccaagataacaatctcatctttgcaggatttgagcatatacaacccggaaagaaccatcactgtgaagggcacagttgaggcctgtgccagtgctgagatagagattatgaagaagctgcgtgaggcctttgaaaatgatatgctggctgttaacacccactccggatacttctccagcctgtacccccatcaccagtttggcccgttcccgcatcatcactcttatccagagcaggagattgtgaatctcttcatcccaacccaggctgtgggcgccatcatcgggaagaagggggcacacatcaaacagctggcgagattcgccggagcctctatcaagattgcccctgcggaaggcccagacgtcagcgaaaggatggtcatcatcaccgggccaccggaagcccagttcaaggcccagggacggatctttgggaaactgaaagaggaaaacttctttaaccccaaagaagaagtgaagctggaagcgcatatcagagtgccctcttccacagctggccgggtgattggcaaaggtggcaagaccgtgaacgaactgcagaacttaaccagtgcagaagtcatcgtgcctcgtgaccaaacgccagatgaaaatgaggaagtgatcgtcagaattatcgggcacttctttgctagccagactgcacagcgcaagatcagggaaattgtacaacaggtgaagcagcaggagcagaaataccctcagggagtcgcctcacagcgcagcaagtgaggctcccacaggcaccagcaaaacaacggatgaatgtagcccttccaacacctgacagaatgagaccaaacgcagccagccagatcgggagcaaaccaaagaccatctgaggaatgagaagtctgcggaggcggccagggactctgccgaggccctgagaaccccaggggccgaggaggggcggggaaggtcagccaggtttgccagaaccaccgagccccgcctcccgccccccagggcttctgcaggcttcagccatccacttcaccatccactcggatctctcctgaactcccacgacgctatcccttttagttgaactaacataggtgaacgtgttcaaagccaagcaaaatgcacaccctttttctgtggcaaatcgtctctgtacatgtgtgtacatattagaaagggaagatgttaagatatgtggcctgtgggttacacagggtgcctgcagcggtaatatattttagaaataatatatcaaataactcaactaactccaatttttaatcaattattaatttttttttctttttaaagagaaagcaggcttttctagactttaaagaataaagtctttgggaggtctcacggtgtagagaggagctttgaggccacccgcacaaaattcacccagagggaaatctcgtcggaaggacactcacggcagttctggatcacctgtgtatgtcaacagaagggataccgtctccttgaagaggaaactctgtcactcctcatgcctgtctagctcatacacccatttctctttgcttcacaggttttaaactggttttttgcatactgctatataattctctgtctctctctgtttatctctcccctccctcccctccccttcttctccatctccattcttttgaatttcctcatccctccatctcaatcccgtatctacgcacccccccccccccaggcaaagcagtgctctgagtatcacatcacacaaaaggaacaaaagcgaaacacacaaaccagcctcaacttacacttggttactcaaaagaacaagagtcaatggtacttgtcctagcgttttggaagaggaaaacaggaacccaccaaaccaaccaatcaaccaaacaaagaaaaaattccacaatgaaagaatgtattttgtctttttgcattttggtgtataagccatcaatattcagcaaaatgattcctttctttaaaaaaaaaaaatgtggaggaaagtagaaatttaccaaggttgttggcccagggcgttaaattcacagatttttttaacgagaaaaacacacagaagaagctacctcaggtgtttttacctcagcaccttgctcttgtgtttcccttagagattttgtaaagctgatagttggagcatttttttatttttttaataaaaatgagttggaaaaaaaataagatatcaactgccagcctggagaaggtgacagtccaagtgtgcaacagctgttctgaattgtcttccgctagccaagaacctatatggccttcttttggacaaaccttgaaaatgtttatttaaaaaaaaaaaagatgacaaagaaaaacagagagagagaatattggagatgtcctgaattttaatagggtacgcgccattagggctttttgcgctaaaggatgaacatgtactggtttatgtggacaagccattataccaccagactgcaatgccagtttcctctactgcaaacagtgttctgtgacaaaaaaaaaaaaaaaaaaaagaaaaaaaaagaaaaaacagaaatatatccagctaacaagaaaaaa

SEQ ID NO: 124 - DNA, 2653 bp, Homo sapiens
gagtccccggaggcagagagctgagcgaggttcgcctccccgggcgggacacgagctccggtcctctcttggcgcaaacccccgccccccgcggagggactacttttcgtctcccgcggaggaactacttcctcccccgcggaggcgtcggtccaggcggcgcgcacggtatggcggcggcggcggcggcggcggcgcgcgcctgagaagaggggacgccagcccggtcaggcctcggcgcggcctacacgctccgctcgctcgctcgctcccgcctcccgccccgcgcccggccatggcggagccgtcgtccgcccgacgcccggtgcctctcatcgagtcggagctgtacttccttatcgcccggtacctatcggcgggcccgtgtcggagagcggcccaggtgctggtgcaggagctggagcagtaccagttgttgccgaagagattggactgggagggcaacgagcacaacaggagctacgaggagttggtcttgtccaataagcatgtggctcctgatcatcttttgcaaatctgccagcgcatcggtcctatgttggataaagaaattccacccagtatttcaagagtcacttctttacttggtgcaggaaggcagtctttgctacgtacagcaaaaggtaccttaatttgaagaagtgttctgctttgtattaatagcctaataattattataattgtgaagtaatgtaagcattgtggaagaaaggtgataatgtaactataaatcatgctgtggactataaaattctctgcatttagcatagaacattgaattttattacataagtgtttaatgggtccttctgcattaaaaagttgataaagatatagatgttaagctaaaaagcttgaatttattctgagatgttgtttgaggttttatcaatgtgagttcttaattttccattttgtagctcactcataacttcattgaatgtaattgtatgtgtctaataaactctttaaatgctagaggtatttcatttgatatttagcttctgaaagccctttgttataaagggaagtgattttctaaatttggtagcagcttgaaaacaagcaccacaaatgtaaaattgcatggttctttttttactaatttaatttttttgccaagttatgtgctagcaaaatgtttgaaattgctattctttttctgttagcttggtatatatgacttagactaagtatatgtatgtgatataatatatgtgtacatgtggctaaactgctaatgggcaaagattgttggttcttctgatgctgagtatacatcaagttcatcccatgattattttttattacgagctattgctgatgtgatgctactcttagctgcaccaccagtataaagcttaactgagaaagaacacccctccctcttagttccgtgccagactggtttgttagctttagttgtttcttagtgctctagccatgtcaccctgtggcactaatcaggacactgtttatattcttcctcttctgtgtccctattcactttgtaattattctattttagctggttatatggtagttaattggtagcctgttttcctttgttttctttacttgtgtcaagctccatgtcgttgttttgtgatgagcagtgatttagaactggccagaccttagaagagtcttcagcaagctgccctagggtaggggcgtattctctgtttgttttgtactggtaccccaggaggatgccttgtaactgctctttggtcatgatagtggtaatgaatccattcatgtaaaatgcaatatgtctgttagtttggggcacccgaggctcagtagaggtttagtatgatgccttccctttcttctttgagttatgaagaaactaatttctggcacagtgtgactgcttcaaacctatgttctgctgctatctcctatagaggagggcagacttttttttcttagtgcatttgctggtaggtcaaggagggatggactttgaattagtgttcagagtcacagatcctacgtatgtgctcttcagtagaggattttctgtgatcctacaatgaagggaaagctatataatttattggtacttcctaaagatagagactaaagtcatggtagtattggccaaattaattttaaaactgaacaagtcatgaattttcatataaatcaaagaactttttccttataaaagcttccatttttgaaaagttggatcagttgtaagacctttcatctttagtattgtatgatataattctacattgaaaaataaacacttggcattaaatgggacttggagtcaaaagatctggttttatggtccatcttttaccaatcatttgctgtggatctctttaaaggtcctggaacctttgagcctcagttacctcacttgtaaattggcaaaaatacctacctcacagggttgttgtgaggattcaatgagctaatgtatgttgaaagcactttgtgaattgtaaagtgctacacaaatgttagttgttgttgctgctgtatctgagatgtcttaattttctttttcttcagaaatagtctaataaacctccagggcttttctgttaaagtatactagttggtaaaatgttgaataaacagtttattacaatataaaaaaaaaaaaaaa

SEQ ID NO: 125 - DNA, 6206 bp, Homo sapiens
gctcctggtctggtacaatggggaagacaaccctgagatagcagctgcgattgaggaagagcgagccagcgcccggagcaagcggagctcccccaagagccggaaagggaagaaaaaatcccaggaaaataaaaacaaaggaaacaaaatccaagacatacaactgaagacaagtgagccagatttcacctctgcaaatatgagagattctgcagaaggtcctaaagaagacgaagagaagccttcagcctcagcacttgagcagccggccaccctccaggaggtggccagtcaggaggtgcctccagaactagcaacccctgcccctgcctgggagccacagccagaaccagacgagcgattagaagcggcagcttgtgaggtgaatgatttgggggaagaggaggaggaggaagaggaggaggatgaagaagaagaagaagatgatgatgatgatgagttggaagacgagggggaagaagaagccagcatgccaaatgaaaattctgtgaaagagccagaaatacggtgtgatgagaagccagaagatttattagaggaaccaaaaacaacttcagaagaaactcttgaagactgctcagaggtaacacctgccatgcaaatccccagaactaaagaagaggccaatggtgatgtatttgaaacgtttatgtttccgtgtcaacattgtgaaaggaagtttacaaccaaacaggggcttgagcgtcacatgcatatccatatatccaccgtcaatcatgctttcaaatgcaagtactgtgggaaagcctttggcacacagattaaccggcggcgacatgagcggcgccatgaagcagggttaaagcggaaacccagccaaacactacagccgtcagaggatctggctgatggcaaagcatctggagaaaacgttgcttcaaaagatgattcgagtcctcccagtcttgggccagactgtctgatcatgaattcagagaaggcttcccaagacacaataaattcttctgtcgtagaagagaatggggaagttaaagaacttcatccgtgcaaatattgtaaaaaggtttttggaactcatactaatatgagacggcatcagcgtagagttcacgaacgtcatctgattcccaaaggtgtacggcgaaaaggaggccttgaagagccccagcctccagcagaacaggcccaggccacccagaacgtgtatgtaccaagcacagagccggaggaggaaggggaagcagatgatgtgtacatcatggacatttctagcaatatctctgaaaacttaaattactatattgatggtaaaattcaaactaataacaacactagtaactgtgatgtgattgagatggagtctgcttcggcagatttgtatggtataaattgtctgctcactccagttacagtggaaattactcaaaatataaagaccacacaggtccctgtaacagaagatcttcctaaagagcctttgggcagcacaaatagtgaggccaagaagcggagaactgcgagcccacctgcactgcccaaaattaaggccgaaacagactctgaccccatggtcccctcttgctctttaagtcttcctcttagcatatcaacaacagaggcagtgtctttccacaaagagaaaagtgtttatttgtcatcaaagctcaaacaacttcttcaaacccaagataaactaactcctgcagggatttcagcaactgaaatagctaaattaggtcctgtttgtgtgtctgctcctgcatcaatgttgcctgtgacctcaagtaggtttaagaggcggaccagctctcctcccagttctccacagcacagtcctgcccttcgagactttggaaagccaagtgatgggaaagcagcatggaccgatgccgggctgacttccaaaaaatccaaattagaaagtcacagcgactcaccagcatggagtttgtctgggagagatgagagagaaactgtgagccctccatgctttgatgaatataaaatgtctaaagagtggacagctagttctgcttttagcagtgtgtgcaaccagcagccactggatttatccagcggtgtcaaacagaaggctgagggtacaggcaagactccagtccagtgggaatctgtcttagatctcagtgtgcataaaaagcattgtagtgactctgaaggcaaggaattcaaagaaagtcattcagtgcagcctacgtgtagtgctgtaaagaaaaggaaaccaaccacctgcatgctgcagaaggttcttctcaatgaatataatggcatcgatttacctgtagaaaaccctgcagatgggaccaggagcccaagtccttgtaaatccctagaagctcagccagatcctgacctcggtccgggctctggtttccctgcccctactgttgagtccacacctgatgtttgtccttcatcacctgccctgcagacaccctccctttcatccggtcagctgcctcctctcttgatccccacagatccctcttcccctccaccctgtcccccggtattaactgttgccactccgccccctcccctccttcctaccgtacctcttccagccccctcttccagtgcatctccacacccatgcccctctccactctcaaatgccaccgcacagtccccacttccaattctgtccccaacagtgtccccctctccctctcccattcctcccgtggagcccctgatgtctgccgcctcacccgggcctccaacactttcttcttcctcctcttcatcttcctcctcctcttcgttttcttcttcatcttcctcctcttctccttctccacctcctctctccgcaatatcatctgttgtttcctctggtgataatctggaggcttctctccccatgatatctttcaaacaggaggaattagagaatgaaggtctgaaacccagggaagagccccagtctgctgctgaacaggatgttgttgttcaggaaacattcaacaaaaactttgtttgcaacgtctgtgaatcaccttttctttccattaaagatctaaccaaacatttatctattcatgctgaagaatggcccttcaaatgtgaattttgtgtgcagctttttaaggataaaacggacttgtcagaacatcgctttttgcttcatggagttgggaatatctttgtgtgttctgtttgtaaaaaagaatttgcttttttgtgcaatttgcagcagcaccagcgagatctccacccagataaggtgtgcacacatcacgagtttgaaagcgggactctgaggccccagaactttacagatcccagcaaggcccatgtagagcatatgcagagcttgccagaagatcctttagaaacttctaaagaagaagaggagttaaatgattcctctgaagagctttacacgactataaaaataatggcttctggaataaagacaaaagatccagatgttcgattgggcctcaatcagcattacccaagctttaaaccacctccatttcagtaccatcaccgtaaccccatggggattggtgtgacagccacaaatttcactacacacaatattccacagactttcactaccgccattcgctgcacaaagtgtggaaaaggtgtcgacaatatgccggagttgcacaaacatatcctggcttgtgcttctgcaagtgacaagaagaggtacacgcctaagaaaaacccagtaccattaaaacaaactgtgcaacccaaaaatggcgtggtggttttagataactctgggaaaaatgccttccgacgaatgggacagcccaaaaggcttaactttagtgttgagctcagcaaaatgtcgtcgaataagctcaaattaaatgcattgaagaaaaaaaatcagctagtacagaaagcaattcttcagaaaaacaaatctgcaaagcagaaggccgacttgaaaaatgcttgtgagtcatcctctcacatctgcccttactgtaatcgagagttcacttacattggaagcctgaataaacacgccgccttcagctgtcccaaaaaacccctttctcctcccaaaaaaaaagtttctcattcatctaagaaaggtggacactcatcacctgcaagtagtgacaaaaacagtaacagcaaccaccgcagacggacagcggatgcggagattaaaatgcaaagcatgcagactccgttgggcaagaccagagcccgcagctcaggccccacccaagtcccacttccctcctcatccttcaggtccaagcagaacgtcaagtttgcagcttcggtgaaatccaaaaaaccaagctcctcctctttaaggaactccagcccgataagaatggccaaaataactcatgttgaggggaaaaaacctaaagctgtggccaagaatcattctgctcagctttccagcaaaacatcacggagcctgcacgtgagggtacagaaaagcaaagctgttttacaaagcaaatccaccttggcgagtaagaaaagaacagaccggttcaatataaaatctagagagcggagtggggggccagtcacccggagccttcagctggcagctgctgctgacttgagtgagaacaagagagaggacggcagcgccaagcaggagctgaaggacttcaggaacttcctgtagaaaagcccccaaaacaaaacaaaccttaattgactaaaaagtattgcatgctcaacttaggataagcactacggcaaaggatacgaaatctaccaagcttgcaagaccagttgaagctgactcaaaaatcctaacattcagctgattgccggcaggcttagagtcaggcatctgctgcttcggtgggggcccaacgcgcatgctgggcgcccgggtgattgagatccaaagagaagggcactgtaagacaggccagatgaactggctcctcgtcatgggactggtacctcagatctgagcatggcccttgtttttggcacgtagcagagaaaggattgatttgaacttaaccttgcaaagcaagttgcctgttttagcagtagtttgttgtaggtttcagggatgacagatttggatgcactcatttaaaacgttttggtcacatatcagctcttgatgcctttcttttaaattaattatagacagagagaggcatttagctgatctcttacccctggtatttcttttttttgttgttttcgtttttttaaatcacaagtagattgccagcgtaatggagaggaaaccagattggatatggactcttttttatgcctattctggtgttgcgtttgtatatccaaatggacgttatcctctcagattcttatctggcactaatttataactattatattatcagagactatgtagcaatatatcagtgcacaggcgcatcccaggcctgtacagatgtatgtctacacgtaagtataaatgaatttgcataccaggttttacacttgcatctctaatagagattaaaaacaacaaattggcctcttcctaagtatattaatatcatttatccttacattttatgcctccccctaaattaatgactgagttggtggaaagcggctaggttttattcatactgttttttgttctcaacttcaaaagtaatctacctctgaaaaatttgtagtttaatatttgtttggtgaatttgtgccactttaatccttccactatcattcccattttgttacatttctgttatggggactttatgttgaaatattgtataaagcatttgtagcaatttaaaaataaaatatttaaaattatttaaattgttttggacgcttcaattgtattatatgtgatttacatttcactttttttgttggcgttgttaacccggagagtgctcctgtattgaactttgctgttagttattttattgcttctttttggagagtgctataaaagactattctaatgaaaacattaaaatttacaatttgacatacaaaaaggggttgtccattgattttaaccaatgtagcactgagagagagagaggttaattatagatagacaagagtggtgtttgttgtttttcccctcccagcattgaaatcattggggcttgtcagatgtattaaaaaaagatttgttgtgctattgctgcaaacacttaataactagaggagaatttaaacaatgcattttatattattgtaaccaataaaaaactttctaaacaaaaaaaaaa

SEQ ID NO: 126 - DNA, 1524 bp, Homo sapiens
ggacctcggtgagtacaaggtggtggggggtcgccagcaggttccctctccccggccccagctctggacgctcaccccagtgcaacgccctgagtgacggaaagagccaagacaatgcaaactccagtgaacattcccgtgcctgtgctccggctgccccggggccctgatggcttcagccgtggctttgcccctgatggacgcagagcccccttgaggccagaggttcctgaaatccaggagtgtcccatagctcaagaatccctggaatcccaggagcagcgggcacgagccgcccttcgggagcgttacctccgcagcctgctggccatggtgggtcatcaggtgagcttcacgttgcacgagggtgtgcgtgtggccgcccactttggagccaccgacctggatgtggccaacttctacgtgtcacagctgcagactcccataggtgtgcaagcagaggcgctgctccgatgtagtgacattatttcatataccttcaagccataaagatattgtgttcacttttctgcttgaggctaaggcactgtatcccaggcctcccaatgttcccgagccaggaactctgggccccatggagttatgagctcccttggaattttgagccaagctttaagcaagtctggactcctgagacctcctgggtctagtcagtaaaattctgcaactctaggaattctaagatcccattggaaggaatgctctacctcacagaactctgaaccctacagaaatatgggcctgctgccatttcctgaagaccggggcatcggggtggggtgataaaggatacaacctgcacagggggaagttattaaagaggctgcaaagtccagccaccctgaagatactccccagtgctcccctcctgctaaagaaccagttaccccaggaaaattcgactcctgtttttctttaattaactataccgacggggatggagtcatctttaggggctggtagggtggttatccaagggctgaatccagtggagctgggccaagtacgacaggagtccagataaaggtgtaggggctgcacggccgcaagtctcctggaaaggctggagtgaccggcatgccgggattgggagattaggatttgatttcattttggggcgggcggtggctcgtgctgggtcacgtggtcgtgcccaagcgctcctcctgttgccccacctgtggttgctgtggactgcacacgacagcagattcgctgtcccctcgttggaggcgaatggtcggaccccgagtggcggcgcccctgataaaaggccgaggattcgcgatcagggtgcaacttcactccctcctcttttctctccagccttgcagcgtggccgttcacatcacgcgcttcactaagcctcctatcactagtaacctttcagcgcattgtttaaaaagaaagcagtttctgtccctttctgtagttcctttaagttcaggatgtaagcgaagccttccattaagtaaaggtgagtgtcgtttcgtctcagtcgcg

SEQ ID NO: 127 - DNA, 9703 bp, Homo sapiens
caggttaaagctaccgggacgggtcccggcatctctaaatcaccgctccctggcctcttcggcctccgtccgccgcggcccaggggccgggcttctcagctgctgacctactgccaccgactgcgctctctcccgtgggtcggctttttgctcgccatgcctccgccgcagggtgacgtgaccgccttgttcctggggcctccgggcttggggaagtccgcgctgatcgcagcgctgtgcgacaaggatgtggagacgctcgaggcccccgagggacggccggactccggggttcccagcctaagagctgcgggcccaggcctttttctgggcgagctgagctgcccacccgcagcgccggggccctgggcggcggaagccaacgtgctggtactggtgctgcccggacccgaggggaacggggaaccgttggctccagccctgggagaggcagcgctggccgccctggcccgagggaccccgctactggctgtgcggaacctccgtcctggggattcacagactgccgcccaggcccgtgatcagacagcagctctgctgaacagcgcggggttaggagctgcggatctgtttgtgctaccggcgaactgcggcagcagcgacggctgcgaggagctagagcgcctccgggcggcgctgcagagccaggcagaagcgctgcggaggctcctgccaccggcgcaggatggcttcgaggtgttgggtgcagcagagctagaggctgtgcgtgaggcctttgagaccggcggccttgaggctgcgctgtcgtgggtgcgctcaggcctggagcgcctgggcagcgcacggctagacctggccgtggctggcaaggctgacgtgggccttgtggtggacatgctgcttggattggatcctggcgacccaggcgctgcgcctgcttcggtccccacagcacccactcccttcccagccccagagcgcccgaatgtggtgctctggaccgtgcctctgggccacacgggcactgccaccaccgcggccgccgcctctcacccaacgcactacgacgccctcatcctcgtcacccctggggcccccactgagaaggactgggcccaggtccaggccttgctgctaccagatgcgcctcttgtctgcgtgcgcacagacggcgagggcgaggatccggagtgtctgggagaaggcaagatggagaatcccaagggcgagagcttaaagaacgcaggtggagggggattggagaatgcactcagtaagggaagggagaaatgtagcgctggatcgcagaaagcaggcagcggggaaggtcctgggaaagctggcagcgagggtttgcagcaggttgtcggcatgaagaaatcaggtggtggcgactcagagcgggccgctgcgttaagcccggaggacgagacgtgggaggtgctggaggaggcgccgccgccagtgttccccctacggcctggcggactcccagggctatgcgaatggctgcggcgagcgctccccccagcccaggcaggggcactgctgctggcgttgccaccagcatctcccagcgctgcccgaaccaaggctgcggcgttgcgagccggggcgtggaggccagctctgctggctagtctggcggcggcggcggcaccactcccagggctgggctgggcatgcgacgtggcacttctgcggggtcagctggcggagtggcgacggggcctggggctggaacccacggcactggctcgacgtgagcgtgccctgggcctggcttctggagagctggcagcgcgcgctcatttcccaggcccggtgacgcgcgccgaggtggaagcaagactgggcgcctgggcgggcgagggcactgctgggggcgcagcactgggggctctctccttcctgtggcctgcgggtggtgcagcggcgacaggtggcctgggctaccgagcggctcacggcgtcctgctgcaggctctcgatgagatgcgggctgatgctgaggctgtgctggcaccccctgagcctgcccagtgaggagtgggagggggcttgggagtccagactctgacaggggatgcctgggcttaatcctgggtgcttgaaggggatgtggactcttgacttccagctgggatgtgtgacttcttatcacctggattcagagagtctgggggacaggaatcctgatttttttttttttttttcttttttttgtgagacgaagtctcttgttgcccaggctggagtgcaatggcgcgacctcggctcactgcaacctccgcctcccgggttcaagcgattctcctgcctcagcgtccggagtagctgggattacaggtgcctgccaccacacctggctaatttttgtatttttagtagagacggggtttcaccatgttggccaggctggcctcgaactcctgacctcaggcgatcgacccgctccggcctcccaaagtgctaggattacaggcgtgagccaccgcccctggccaggaatcctgatacctttgggaaccatggtgaatgacatctagacccttctgtcctgaagggagttggtggcccagactctagcagggactatgtctttgtctcctagggagtagaaactggagttactggatgtttagtcctccagggaggctggtagaagtcctgtttcctaattggtggggaggtgtccatgactgggacctgaactccagtataggggagggagacctgagcgccccagggagctggaactcttgggcttcagagcctcagagggaaacagggtctacatttctctgggagaaaaagcctgcacacaggtccccaaggagcagtgggctttgaatcttgatggggtggcggaggcccctggggtctgagacttccggggttctaagatggctgtggaccttggttcctaaatattgggtaaggggaggtctgcatctggaggagggatcgggggcttgtgcgagaaagctggagacttcttgatctctcctggggagtggatgggtttctataattgccctccaaaagcatgtagggagggtggtcccacaaaaatgaggtgaggtgggtaagaggtctgggcatggtgggctctgggagtagccagggaccaggaatgaggtcttttgggtgtggaagggcagtaaagcatacctcagagacagctcctccaaaccttgtattgggatcccggcaactgcctctgtgagtgtgactgggaagggatatgactgccttcatcttctaggtgctgagcaattcaggtgatctctggggagtctgtttctctgtctcttttctttaggagtttctatctttttttggcctttttctcctggtatttaaccataaccctttatggccttggtgttttgtgcaccttccttttcagaagagcagctgtactgctgcactggtccaaacacttctgtatggacacctcgggtatccccaagaggctctgctttctgatgtacatagagggtgctgcattgagccaggggcccaccaaatgggtggtcaggcacttgagaccatgggaatatgccaggagtgaatgaagcaaaggcagaaaccacagtgcctggaatgttctaggctgctagccacatgtgggggaaaagttgcaggttacagaattcttcagtgtcaaaaacagaaaaggaggatctgagaatccaagcgatagaatcccttttgtcgtagacagaaagagcaaagtccagagagggcaggcttgaggcccaacagcacacagtaaggccctgtgggtctggcccttgcctattctcattcactgccccttcccactcctgtccagcctgatagactttccttctttttttttttgaaatggagtctcaccttgtcacccagtctggagtacagggatgtgatgactgtagctgagatgacaggcatgtgccaccacacctggctaatttttgtagtttagtagagaagggatttcaccctgttggtcaggctggtctcgaactcctgacctcaggtgatccacccgactcagactcccaaagtgctgggattacaggtgtgagccatcatggccgcctgactctttctgatgcctgagtggctaccttgagtcctgcctggggacccatgcacctgctgttctctttccttcaaggctctactcacaacttcctgttctactctcaaaccttcctgtgacgggctcagtcagatctcagctcacgtatcccctcagagaggacttcccctccctgaccaccctatctgaagtagctcacattcccccactattcatttcggccagttgagtttccttgtagcaattattactgtcaaaaatgatcttatttatttacctgtttattggcttttgacccgttgcctgtcctgttctctgttgtttccccagcatctagaacaataggtgcctgacacaataggtgcttcgtaaatatttattattattattattattttagagacagggtcttgctctgttgccccggctggaatacagtgggatgatcatggctcactgccatctccaactcctgggctcaaacgatcctcccacctccgcctacagagtagctgggactataggtacacagcaccaaattttctgtagagacgggggtcttgctttgtagcccacactagtgttgaactcctggcctcaagtgatcctcctgccttgatgggattacaggtgtgagccaccacacccagcctaaatgtttatttcattggtcagtgtcagaactaggattggaatttagattgttaatctcttgccacaagataggaaaatggagcaagatgaggagaaaaaagcatttaatgggagagaacacccttgtctgaggtcagggacctgggaagcaagcacgactttgccactgtcactgtgtgttacttggacagtgccttattttcccatctgtgaaataaaagagctggataagaaccttagttttgagatcctgtctcccttaaaagctgaagacaaaggtaactgatccaagggcagacaagggatggtaccatcatctccagcttggactcccactgctgacaaaatttgtcccttcaaagttgagatagctaccatggggaagagcacttagttctatactgaatggctccaggcattttcatgaaagctctttcagctttggggaagaatattcatccatatctttaccccatcatattagtgtctaagccctgcaatcaggcatgtcagccacgtgatggaatgggagggctgcagggcagcactgtccagtagaaacgaaatgcaagccacatatgtcattttaagttttctttttttgagatggagtttcactccatcacccaggctggagtgcagtggcacgatctcgcctcactgcaacctccgcctcccaggttcatgtgattctcctgcctcagcctcctgagtagctgggattacaggcatatgccaccatgcctggctaatttttgtatttttagtagagatggggtttcaccatgttgatcaggctggtctggaactactgacctcaggccacccgccttggcctcccaaagtgctgggattacaggcatgagccaccgcgcccagctaatttttgtatttttattttatttatttatttattttttgggagacggagtcttgctctgtcacccaggctggagtgcagttgtgcgatcttggctcactgcaacctcagcctcccaagtagctgggattacaggcatgcaccatcatgcccagctaatttttgtatttttagtagagatggggtttcactgtgttggccaggctggtcttgaactcctgacctcaggtgatccaccggcctcagcctcccaaagtgctgggattataggcgtgagccactgcacccgtcctaatttttgtatttttagtagagatggggtttcaccatgttggctaagctggtctggaactcatggcctcaagttatctgcccacctcagcctcccaaagtgctgagtaagccaagttttctaatagccacattagacaagtaaaaggaaacaggttaaattcattttaacatgttttacttaacccaatgtatccaaaatagcatttcaacatgtcatcggttttttagttttttttttttttgagatagtgcttcgctttgttgcccaggctggagtgcagtggcacaatctcggctcactgcaacctccaccttccaggttcaagtgattctcctgcctcagcctcccgagtagctgggattacaggcacccgccaccatgcccactaatttttgtatttttggttagagatggggtttcgccatgttggccaggctagtctcaaactcctgacctcaggtgatccacccacctcggcctcccaaagtgctaggattacaggcgtgaggcaccgtgcctggcgtcatcggtattatttaaatgaattatgttacgttcttttgtgctgtcttcaaaatctgttatatattttacacttacaccaaatctcaattaccatggtacatttttatctgaaatgcttgacctttattttgatttcataaaattcatagttggagaagtagattcacatatccaagttgttccaattatataatagttttccaaaaactgagatgggtgtccattttttttttaagtaaagatgcaggtctggttatgttgaccaagttgctgggttgttttgttttgttttgagacagagtctcactttgtcacccaggctggagtgcagtggcatgacctcagctcactgcaacctctgcctcccaggttcaactgattctcttgcatcatcctcctgagtagctgggactacaggtgtatgccaccatgcctggctaattttggtatttttctcagagacggggtttcaccatgttgggcatgctggtcttgaactgctgacctcaggtgatccgcccacctcggcctcccaaagtgctggtattacaggcatgggccaccacacctggcctcagctgttcaattaaaagtaaatacaacttaaaattctatgtttcattggcagtagtgcaacattaatactgagtagccacatgtgattagtggctatggtattggacagggaaggtacagaatacttccatcaacatagaaaattctatcagtctagctctaggggcagatagtccttccactgacttgggcaagtcactctacaaatggcatctacctcacatggttatggtgagaattcagcgtatgtatgtacatgcaggcacacaatatgcacacagacacataacatagtacaccctttcctgaaaagcctgacacatggagctcaaacatgagtgccacccacccctgggcagcaccaagatggctctagtctgggtgcctttgtctcacccccatgcctttgctcggagtgtgctcctcatttttctgccactttgaccctgtctctgatttggtcctgtctgacatcactgctatatgctttgctcctctcaatttcctctgccctcatgccagcaggagtcatgccagagatcatatctgagaaagcaagacaattttgtgtgtgtgtctgtgcccatagaggagtgctggttgtgttgatatagttgtagattggttgtgtttacacagttgtatatattgacacccttgagtgttatgacttcttttgggggtggtcgccttttaaatcataacttttaatgggattccattttagtctttgtgaagacataaggttgttggcaggcatctgtccctgggagcatccaagcagaaaagactaagactcccttgtagacagatcactggccgccactgaagtgtgtctgcatggcaccacagggctggaagacccttgaaggcaggaattcaaggaaatgtatgatgaattttggcattgccatcaaaagcagaacaggcatggaaaacttgggtgagtgggcgagacaacctcctcaccacagcagagttccatccatgcctggataatgatggagggatttgtgtccactgcagtggggaaccatgaaggacacatcaagggtgtggttggcctgtggtgctctttggaggaatgaataaaaatgaatagaaatcctattgcgtgtctgttcttttggagtttgagggaaaagaaagatccttgagattttgactgggctggaaacctagactccagcgtctggggataggagggatggtggggaatccgctgggaaaaactgggctgtgatcaagagaatttatcagtatctgagtttttccaccctggaaggagtgcgggcagacttactgtttaaacattgggagcttatgatggtaaagcgccttagttctggagccaggtatacccattaatgaccccaactgggccagcctttctgtagccatgcccttggattgttgctctccttctaggtttgactatgtggtttgcttcagccactagaacaatagcaaacatgatacaagcagaggcttggaaagtgcttatgcggccgggtgtggtggctcacacctataatcccagcactttgggaggccagggcgggcagatcacaaggtcaggagatcgagaccatcctggctaacacagtgaaaccccgtctctctactaaaaatacaaaaaattagctgggtgtggtggtgcacacctgtagtcccagctactcgggaggctgaggcaggagaatagcttgaacctgggaggcggaggttgtagtgagctgagactgcgccgctgcactccagcctgggcaacagagcgagacttctctcaaaaaaaaaaaaccaaagtgcttatgcactgggacttcctctcttgctccccttgggacccctaccaccactgccacatccaaaccccgggctggctgagcatggtggcatatgggtataaacccataatcccagcacttagggaggcaaaggtggaagaatttcatgagcccaggagatcgagactagcctgagcaacatggcaagacccccatctctacaaaaaagcaacaacaacagaattagccagatgtggtggtgtgcacctgtggtcccaactacatgggggaggctgaggcaagtggattgtttgagcccaggaagtcgaggctgaagtgagctatgatggctccactgcactccagcctgggtgacagagcaagacaatgtctaaaaaaataaaaagaaggaaagaaaaggaaaagatctgggctaacctgctgggtaataaagggaaaagagacacatggctccgtcatccttgatccctgccacccatagccaaccaacctctgaaacagagctccctagctgataggcagctgaacccagctgagaccagcaaaagaactgcccagctgatcccagaccaagttgcaacccagagaatcattaactaaataggtgattgttctaaaccactaaattttggagtggtttgttatgtagcaaaagcaactaatacagacttgttctctctgtgtgtgatgtggtctctttctccccaacaacatgacccaatgattaaaatcttaaattctgccactttttagctgtgtgactgccaatgtgacagccttctgagcctctgatgtctcctgaaaacagagatgtgaataatagtgcctatgacatagagttgtgaaaataaaatgaaaaacagcttcttaaaaaaaaaaaaaaaaaa

SEQ ID NO: 128 - DNA, 5788 bp, Homo sapiens
gtgtgaagaaaaaaatgacactccaatgggctgcagtggcaacctttctttatgccgaaataggactcattttaatcttctgcctaccttttattcctcctcagagatggcagaagattttttcatttaatgtctggggtaaaattgcaactttttggaacaaggctttccttaccattatcatcctattgattgttctatttctagatgctgtgagagaagtaaggaaatattcctcagttcataccattgagaagagctccaccagcagacctgatgcctatgaacacacacagatgaaactttttaggtctcaaagaaatctttacatttctggattttccctatttttttggctagttttgagacgtctggttacgcttattactcaactggcaaaagaactgtcaaacaaaggtgtacttaaaactcaagcagaaaatactaacaaggctgccaaaaaatttatggaagaaaacgaaaaactaaaaaggattttgaaaagccatggtaaagatgaagaatgtgttttggaagcagaaaataaaaaactagtagaagaccaggagaaactgaaaactgaattaaggaagacttcagatgccctttctaaggcacaaaatgatgtgatggaaatgaagatgcagtcagagagactttcgaaagaatatgatcaactcctgaaagaacactctgaacttcagcattccagttttggtgaatttttaagcaaaagaagccacaaaaatggcagcattggaaaacagactggttctagaaaaggatcgtttagaaagaggcaacaagaaaagactgtgaactttataaaagacacttgcaatatactgtgtcaaaatgataattttgttatgttagcctctagaaaatttaagttcagaaaaatgcactatgaccggttcgtaatttttttaatgccacacataggttgtattgtaatggcattatcaaaatatttgatgatgtttcagatatattgcaaagtctgtattccagctcttaagaaaaatataagcatgttaaataccatatttacatattgataatgtcattggtatatggtggctgtttaccaataaaaggaaaaaattcattaaccggttgcttccaaaattagaagttttaagttgcatgaaaccattaatagccttgaaagctttgataagttttcagtaataataacctatttaatcagatgatgatgtgtttgaaaatagtgttcaatatcagcaaatttgtacacagggaatgtaaataaggataactgatcagagttatccactgtatttataaggaagagtcggaaaaaacaatgaccttagttttttttaagcctgatgatactatggtttactctaataagatagctatattgataattatatttttgttactgtgcccttgcacattttggtctttttgttaatatttttattaataacacataattagtaaccactctactgtttcaagttaatctagtaatagagcttacatatatttgtataactgctataccactgaactgaatttattttacaacagtgtagaattcttgaaaagttaacgtagaaaatatccaaaaagcagtatttctagaaagtgtccaaaaagcagtatttctttcccttggttgtgagagtaactaattatataaatattacctcaaaaatacatacactggtatcacacagtctttctacaatgtttctgtattctgaaagctaaatattaagtactatttttccattcaaatattcatttagaatttcctttagaagatggcagtgattataatattaatatgatttcatttgttccagtgtttagacatgaaatcatcttccttgtctcatgaaaacctaaatataaaaaaaaggaaaatactggagtttttatttctcttgtctttgttacatcctctgtttattataattttagcaccaacttcacacctagctaatttttttcatcataaagtggatgaaatgagcaagtacctaaaaattttatttcagataaaagtcaggagttactgctaaaaaacagacatgtaggagacattcaacaggagtatgaaatgagagttagaccatatgggctgacaacaccataaataacaagaaaagggagtgctgaaataggagagaacagagcaaatgttagctcaaagtatagacttagaaatatcaaagtaagagctatctggataaatatatagatattgagtgcttggaatcctagcctactatgtgaaaattaagtctaatgtcagaataacttacagaaaaatagaaaatgcacagctttaaaatgggcagagttaaaatctattcccagctttatcacttatttagccatgctagcctaggcctctatttccttgtctccaaaatgagaataataaaatttaggtcaggattactatataaactaagataatacagtgattctcaaagttgttcagactgtatagtaaggagaaagtctggttgcactttgaagagcttgaagatttgaaagattcccaaaaaagcattttaaagtttacatttaagggaccttggacctcaaccctctcaagtttacaagtctgaaactttagacatcaaaagtttgagcagtttttccaaggcaacattgatagttagattcagggccaggctgtaagtctagaatttagatatcctgatcccccagataccgctcttctggttatacacagaccagctataatttgctaaacataaaatattgcagtgtattagccggctgtggctccagagtctgtgccctttaccaccgtgcccaactgtttcacatgctgtgtttggtagtttttcctagtactctccttaataatggtggtgtttagcaaattgtattacataaataaatatttatttcatggattgagttatgttgcatattaaattactttccttcccattgtcaataatgacttctttatgtcttaggctgtattataaattcaaacacaggaatgttattcttgcctttttccatcagaattacctaaagttttattagactttccccctacttgcaaatctgcctggaggttctggtctttaggaagtagcacttagcaagttctggataagcactccagaatttgggatgagttatccttgttgtttgtccagctctatcttggaccccagtgctgctaattagattcatgccttgttctttagggcataagttcctctcttggctatttttcctagtatgctgagaactaggattccctttcagtgacagagtcctgccctggaaccccaatcaagagcctaaagtttaactactctctgagatattagcctgatgccagcagcctgcctggatctctaaatattacccattctgggagttgttagtggtctctgctttcctgcagtgtcactcctgcttcctcattgggcctgctagccacagctacttggatgtacccgaacctgttgccttgccctacctctgtgggctggttcagttctgcattcccattccagtgtccactgccttctcgctatccctcccatctgtgcgccaccaccagcttatccccagccctgctaacatgacaaactattgtgcatttgagtgcccactatacaatgtgtgaatataaccgtgcttttaagcattgactttaatgtctgggatgatccgtctagagtccatggaaccctcctgtgttttttcatccctttcttagtaatcttggaaatccacttatgaaattctttttctaacatttctttgctgaacggcatttttaaaattactttcacggtgtttctttccagtttgatctctacacaaacacaactttattacttgcaccagaaatgatttcaaacactttaggaactgtggtaggcttaattatgacttcccaaaagatatccctataccaatccctggaacctggaaatgttctcttctatagcaaaagatatgattaagttaaagtcttgagatggagagattattctgggtaatctgggagtgccctaaatgcagctacatctatgcttatatagaagcaaagggagatattaccacacagaagaggagaaagcacagtgaccacagaggcagagattggagtgatggagccgcagcaaaggaatgctgacagccaccagaagctggaggaggcaaagaacagattcttccccagagcctcttccagcaggagcatggccctacagataccgataaaactgatattggacttcctggcctccagaactatgggaataaatttattgtttcaagctatcaagtttgtgattatttgttactgctgccatagtaaattaatacaggagcatgcaggacagatctgtaatggcctgaactgaatttcaaggggtgtggaaaacagttactctttaacaccactccgtcttccccattagccatttggataagtcaaagatagccttagccatctcctatcttagttacttttctccttcaactgtattttgccattgtcgttgccattgcctctgcctaactgcaagccatcatcatctctcacatggactatgacgacctcctcatctccctgtatcttctctaatgcttctctcatatacatgctctcagcagccacctggtttaaaacaaaaacaaaaaaaacactaatcatgtcattccctgcttgtcttcccgttctttccaactgtcattccctgcttgtcttccaattctttccaactgcagttaagatcaaaccaccaagacctcaccaggctcccatctacttttcagcctcaactcagtccacctgctctgccaatcacacctgtttctttttgttgttctttccctaggatatagatcctggcatacctgcattctgattcttcttggaacaagccaaattctttcccctgtcagtacgtttgcatgtgtagtacatgttgcatcccaggcctgtctgccttcttaccctattttattttcatcatagcacttactaccatctgaaatgatctcatttatggtttgtctcctcagtgattaacacagttcctgcacacagtaaatcagtagttctcaacaggaagtgaagaggtcatcctgaggggaacatttagcaatacctagagacatttctggttgtcataaccaggggaatgctcctagtggatagaagtcagggaggctgttaaacccattccacaatgcacaggactggaacaaagaatgatctctcactcagaatgtcagtgttgccaaggtggagacatcctgcagtagatgcttgtggcagagggtactggttgtaccccagtatccattctttcattcacctgtgttaatacatgctccagttttgtatttttttttataaacagctgtcaagcataaagataacattttccatctccttgtatgtaagtggaaataggactgtcatgtggggccagtttcttttttttcttcctctgtcctgctgcttgaaacatatgctgctatcttagatcatgaggtcgaggccatgcaaagtggagcaacaaggagctgtgtccctgacgccataagcaccacacctgtcctgaattgctgtgaatgacaccagctaactacaatgcattgtctcaacatcctagacataataaaaagccataaatatgtttgtcctatgcagcacaaaacctttgtatctttgccttttatgttgggatcttaattaaaaattacatcctctactgtcaaaaaaaaaaaaaaa

SEQ ID NO: 129 - DNA, 3870 bp, Homo sapiens
gaggaggagcctcgggccgagccaccgccttcgccgcggaccttcagctgccgcggtcgctccgagcggcgggccgcagagccaccaaaatgccagaagagatggacaagccactgatcagcctccacctggtggacagcgatagtagccttgccaaggtccccgatgaggcccccaaagtgggcatcctgggtagcggggactttgcccgctccctggccacacgcctggtgggctctggcttcaaagtggtggtggggagccgcaaccccaaacgcacagccaggctgtttccctcagcggcccaagtgactttccaagaggaggcagtgagctccccggaggtcatctttgtggctgtgttccgggagcactactcttcactgtgcagtctcagtgaccagctggcgggcaagatcctggtggatgtgagcaaccctacagagcaagagcaccttcagcatcgtgagtccaatgctgagtacctggcctccctcttccccacttgcacagtggtcaaggccttcaatgtcatctctgcctggaccctgcaggctggcccaagggatggtaacaggcaggtgcccatctgcggtgaccagccagaagccaagcgtgctgtctcggagatggcgctcgccatgggcttcatgcccgtggacatgggatccctggcgtcagcctgggaggtggaggccatgcccctgcgcctcctcccggcctggaaggtgcccaccctgctggccctggggctcttcgtctgcttctatgcctacaacttcgtccgggacgttctgcagccctatgtgcaggaaagccagaacaagttcttcaagctgcccgtgtccgtggtcaacaccacactgccgtgcgtggcctacgtgctgctgtcactcgtgtacttgcccggcgtgctggcggctgccctgcagctgcggcgcggcaccaagtaccagcgcttccccgactggctggaccactggctacagcaccgcaagcagatcgggctgctcagcttcttctgcgccgccctgcacgccctctacagcttctgcttgccgctgcgccgcgcccaccgctacgacctggtcaacctggcagtcaagcaggtcttggccaacaagagccacctctgggtggaggaggaggtctggcggatggagatctacctctccctgggagtgctggccctcggcacgttgtccctgctggccgtgacctcactgccgtccattgcaaactcgctcaactggagggagttcagcttcgttcagtcctcactgggctttgtggccctcgtgctgagcacactgcacacgctcacctacggctggacccgcgccttcgaggagagccgctacaagttctacctgcctcccaccttcacgctcacgctgctggtgccctgcgtcgtcatcctggccaaagccctgtttctcctgccctgcatcagccgcagactcgccaggatccggagaggctgggagagggagagcaccatcaagttcacgctgcccacagaccacgccctggccgagaagacgagccacgtatgaggtgcctgccctgggctctggaccccgggcacacgagggacggtgccctgagcccgttaggttttcttttcttggtggtgcaaagtggtataactgtgtgcaaataggaggtttgaggtccaaattcctgggactcaaatgtatgcagtactattcagaatgatatacacacatatgtgtatatgtatttacatatattccacatatataacaggatttgcaattatacatagctagctaaaaagttgggtctctgagatttcaacttgtagatttaaaaacaagtgccgtacgttaagagaagagcagatcatgctattgtgacatttgcagagatatacacacactttttgtacagaagaggcttgtgctgtggtgggttcgatttatccctgcccaccccacccccacaacttcccttttgctacttccccaaggctcttgcagagctagggctctgaaggggagggaaggcaacggctctgcccagagccatccctggagcatgtgagcagcggctggtctcttccctccacctggggcagcagcaggaggcctggggaggaggaaaatcaggcagtcggcctggagtctgtgcctggtcctttgcccggtggtgggaggatggagggattgggctgaagctgctccacctcatccttgctgagtgggggagacattttccctgaaagtcagaagtcaccatagagcctgcaaatggatcctcctgtgagagtgacgtcacctcctttccagagccattagtgagcctggcttgggaacaagtgtaatttccttccctcctttaacctggcgatgagcgtcctttaaaccactgtgccttctcaccctttccatcttcagtttgaatgactcccaggaaggcctagagcagaccctttagaaatcagcccaagggggagagcaagagaaaacactctagggagtaaagctccccgggcgtcagagttgagccctgcctgggctgaaggactgtcttcacgaagtcagtcctgaggaaaaatattggggactccaaatgtcctctggcagaggacccagaaaaccacactggctccaacttcctcctcatggggcattacacttcaaaacagtggggagcaacttttccaccaaagctacaaacctaaaatgctgctgccccaaagcacaagagggaagagcaccgccggggccacaggacgtctgtcctccagtcacaggccatccttgctgctccctactgactctagcttacttcccctgtgaagaaacaggtgttctcggctgagcccccaaccctctgcagaaccaggttgatctgccacagaaaaagcatctttgaagacaaagagggtgaggtcttcatgagtctcctgggcccaaagccatcttctgatggaaggaagagagtagggccagtgaaggctgcccagagagaatgtcacagatgaggctgcccctgccccccccccgccagggaggtttcatgagctcatgtctatgcagcacataagggttcttcagtgaaaagcaggagaagagcccactgcaaggatagctcattaggcacatgaccgatgcagggaaggccatgccggggaagctcttcctgcaggtattttccatctgctgtgccaaggctgagcggcagaaacttgtctcataaattggcactgatggagcatcagctgtggcccacagagagccttgctgagaagggggcaggtaaagcagagattttagcattgccttggcataacaagggcccatcgattccctactaatgagaggcagggagagcatgggcaatggagacccaccaatgatccccaaccccggtgggtactggctgcctgccctgggccagggaatggctccttataccaaagatgctggcacatagcagaacccagtgcacgtcctccccttcccacccacctctggctgaaggtgctcaagagggaagcaattataaggtgggtggcaggagggaacaggtgccacctgctggacaatcacacgaaaggcaggcgggctgtgtactgggccctgactgtgcgtccactgctgtcttccctacctcaccaggctactggcagcagcatcccgagagcacatcatctccacagcctggtaaattccatgtgcctctgggtacaaaagtgcctcaacgacatgctctggaaatcccaaatgccacagtctgaggttgatatctaaaatctatgccttcaaaagagtctctgttttttttttttaacctggtagacagtataaaagcagtgcaaataaacacctaaccttctgcaaa

SEQ ID NO: 130 - DNA, 11727 bp, Homo sapiens
aaaaccagtagcatcagcagcagcagcagcagccgccgccgccaccaccgccgccacagcagtagcattagcggcagtagcagcatttagcaatagctttaacagctatagcgacagtagcagccgccctcctctctccctctcgcggacggccgcagccaccgcacagagcgggctccaggcgccgagcgcgcagcccgctcgctaggtagctccagccggggcgagcgacagtgtaagcgaagcacggacccttggagcagccgggcagccgcggaggctctgagtttcagggccagagcccgacagctctgactccatctagcgcggcggcggcggagcctgagggagcgagcgaggagagaggcgcgtccacctggcgggcccagcgtatggagctgaggcagaggcggcggcggcggcggcagcagtagcagcggcggtggcggctaaggcagctcgaacagctgcggcgacggcgacagcccagccttgactgcgaccgcgctagctacagcgcctgctgcctgagcccgccagcgacgtgcgcctcgggagtcggcctgtgaggttggacagcatttggacttggaatgaaacaataagaggttatattcatggataaccaacaagataaggctattgttgcctcagccaacggagaaaacactctgattaatggggtcaaagaaaatgactcagaggaccaggatgtggcaatgaagtcatttgcagctctagaagctgctgcacctatccagcctacaccggtggcacaaaaagagaccctgatgtatcccagaggtctcctgcctctaccctctaagaagccctgtatgcagagcccgccctctcctttgggcctgattgaagcacccgaacatgctgctaatagtgcttctgtgaatgccatctccctcacatctggcattgcaaaaggcctgaacacatggtcacttcccaatgaatgtgagaaagctccatttgccataatggagcctgcaggcatgtcagctctgaatggggactgtctcatgcagccaagtcggacttgcttaggctgcttcatggaatccaaggatgcagtagatcctgagccagggatcagtctgaaagttggtgatctaaatagggattatgaaacgtgtgcagtctctgatatagggattcagtgtattaatgctggagaaaatatgaaatatggagagcagctgctctcagaccagctcctaggcttccccctgcataagtcaagggcaggagacagacgagaaactgagaaacctgacattgacttggaggatccggctcagaaaagctattatgaggcattactgttagacaagtgcaatacagaagaagctttgcttgcaaattccaatcaggattggggttacttcgagacttttattagtgaaagtaagattgaactgcttgacctctgttccaaaaatgagctgtctgtcaacctattctctgaagaagatgtggataactacatgtttgatgatgatgaatcaacactaggcagtgatgtctgctccctgaaaattcgatatgaatcctttcaggacaatgttcgagacaagactactcttttgatgcaggaagatgcccaattcaacttttttcccagcgtctttactacctgccccaagcgagagtctaagagtggggccctgaagcagagcagtgatttttcccaattcaaggtccctgatgtgagcatcatctggggggaggaagataaaaacttggacaagaagaaaggcaaagaggaaggacaggaagacaaaggtgtagagaagaaagatggaaaggataatggagaaaagcctgccttaaataaaccatgcagtgggactgaagtagagcaacttaagaatccaaagcagggccatcttgctaattccctggagacatcagggagtttcagtgatgatagttccttcattgagatctcatatgatgctatgggtgagatcaaggactgtagtcgctatatggctcgggacactaattctggcagctcctcctcccaacagaactatgggctgcgagccaagagaaaagtcagatacagtgaagattatctatatgatgttgactcactagagggtgaaaaagtaaatgagaggaaggaatggctgccagttggttccaaagaggaagatgatgatgaatggtgtcccaaaaagagaagaaaagtaacccgtaaggagccccctgttattatcaaatatatcatcattaatcgctttaaaggtgagaagaacatgctggtgaagttgggtaaggtggatgccagtgagacaacagtgaatttgagtgagaatcagctcaacaaatatgccaagctggcacccttgaaaggcttctggcaaaagaagaagaagcagagaaacaccaacacggactccatcaagacacctttttcccaaaagcaaagctttgaaccaggtagctttgaggtgtcatttctgccacctgctcgcaaacgaaaatctaaacttggcaacaggcacaggattcaaagaatcccatccattgaaatttcagcaagtagtaaacagatttcattatgtaatgatcagaggcacgctagtaatcataaagaagatggaggcctaaaaggtacactgaagtcagcacctctgggtgctcctagctgtgcaaatggatcacatttaaatgacatcacaggccctgactcagtgaaagtcaaagcccaagacacagagtttaaggggccagagaggaaagtgctcaataaaatcaaatttaaaagtgaagctaggttaaaatctaagaaagtcaaagctgctgggcaagaaagcaagccaattgttcaaatgagccctctcttggaaaaccaatcctcaaaggctaatttaaagaatgaagttattcctgggacatcaaacagttcccgtctatctgaatttcatgaggcaaaggctgctaagagttccacttttctaccaacgacatgctcttctgaaatgcctttatcatctgctaatgttaccactaatatacctgttatcccgggagggtatctgcagacattgttagatgcttctgacttgtcaaataacactagtatctcatacttcagccaccattctccagagcaaaatgaaggcagcctcactcaaaccgaaaaatcatttgtacccctccagcctacccaggactgtgtgctcacctcatcctctgactctgagctgcagcagtcatctcataacttcaaaatggaatcaagcaactatagaaatgtgtggcccaacaaggctacttctggcacccaggaattcatggctgaagtctcaagggagatagccccaacccaatccagtgaatttggagcctcccaagtagtctccatggaaaataacctcacacctacaacatacaatccaatctgtctcaatagtggtggcagtaattgcaacaaggtcctgtatgactccatgcaagatacccaactcccatctgatgactcttaccaattatgtcactttaataatggagagatctgctttcctttccagcaggggccagtcaatatggatgatggtcggctctttagctttgattcaatggccccactctctgtcagctcaagtaattattgctccttaagcttgaagtcctgtgaaaaggatggcgatgatgatatcactgatgacttcctggcccattgcagccctaagctggtgatccagcaaagcattgatgagatagcaccactaaaggagtccactgacctcctggatatatccaacttcacccctgacaaattccgccactcttccctttcagagatgtccccaccggacacccctagtctttcccctcaaattaccagatgtgagagtatgaagacactaggaacactaaaggggttccaagagggtgtcccaggaccattggacagtgtggaaaaaatcaagtgggactgcagtaccctttcacggcaggtccaaatggaggatggatttactttaaataatcaccagtttcagttccatatgttcaatgatgaggattctgtcagcctgctccaaaaaaacccttgcctgtcaacatttaatgatccatctggtcaaattagtaccaacaacaaagtgtcaaaatcaagaaagaaaagttcacccagcaagagtggggctatgaaccaaagctcttctcagaaaaacaccaggaaaaaatccctcaaaggtaacaacaaggggattgaaaaaccacctggcaaaaactcccgccaggtccctaagtccacaaagaaagggaaatacatggctgccatcaatggagagaaaatgcaaattggcattggccgtgggggaagccaaaccaacaccatatcctccactgggaagacattggctgaatgtatccaacatggtggccctatggcctctatgaagatgccaagtcaaaagggactttctggagattgggccttggggaaggagagcagcccaggctggagtgatatgagcatgggcaccaacaccaacagccttctggatgatgaccaacgggaatttcaggagccttcctatatcttgtccaacattgcctctggtatggcagatgtgcagagattcatgatggcctccatagagcccctttgggaacccatggagcaccatggggatcccaacatattctactcccctgagtccaatagtctaaaattaaaaaccctcaaaatattggctgggacaccacaggagtctaagaaaaagatcaacagtgggtcccaaggagccactaagaatcacaggtcaatcaagggtgtgagcaaaagcaatgggaaaacagcaataggtgatcctggtcgtgcaaacatgcctggttataacgaggactctcgctctaccttctttgataaaaagtatagtaacatgagcactttaggcaataacggaccgacacacaaaaagttgtatcgtcacaaatccagctccaaggccctgagagatgagaaatgtaagggaaagcacatggagcgagaacaggtccacaaggatgagtctgggacagcttcttttgaaaaactgagggattccgactacaatctcctaaaagcagaaacaaccttttgggttttacctgtgtttgaagaagagactcgcattttccagaaagacatttgatgtttgtgttttatttctttcaaaatatgccttgtggtatgtatgttgacatgtaagtgcttaaagaaaagaattttaaattgtgggaatacgtctttggagcaaactttaatctcatgttctatgtaaaagacttaaaaagtcatacagttgcacaagtagtttatgcactatttacccacaaggaaaaaattgaaaacattgtgccaaactacaaacaagtgactgtactgtatatatttttacttctatatcaacatttggttgtatttggggaagttgtccctgttaatttactagaaacattccagtgattcttgctattaaccacccccacttatgtggatagcacctgtagatcatggtggaaaaatatgttgtgttacacaatttaccaaaattaaaggatactgtttgaaatgtgccaaattttcttacctcatctcacagattcacccacagtttaaagctcattaattatttttaaatggatatatacacacccaaacatatatatgtatatgtttgtgtgtgtgtgtgtgtgtgtatatatatgtatatatatatatacacacacacacgttcttttaaagttttagactctactgtcctgtgtggaaacatgaacagctaaacaaggcaaaataaagattttcttgttccattgtgtaagggttaaaattttggaaaagtctgaaggccacaacagctaagtccatcagggacccaagtatatgcatttacagaacgttttacaaggaaacaaaacagctgctttcaaagtttgttttctaaaagcaaaatctgtagctgaaaattatttaaagtgcaaagttatattgctgatactttatatctcagttttatatattttataatagtctgggataaattataaaaatagctataaaatcaacactaatgataaatgaagtatatagaatgcttttatttaaatagtttcctaaatgttttattccagttttgtcaaaagtgcactcatatcatggctttagtgttctttcagtgtttaatcttgcaatgccaatgtcatttaaagaaaatgttaaggcatcccagttcaaccaaatttttcttcttatgagtaaagtacatttactatcagataagatgaacaatttgtggcaacaactgatttgggccatatacccttagtctgaggataaccaatatttgatgccacacactaaacttaaatctcaattttaagtacaaatttttaaatcacattttttattcagtactccccctactttttaaaaaaaatttcacagccccaacattcctcactactactttttcttcccttttattcaccacttgacttctaacatttgatctcttttctttgcacaattgaaggcctgtgcatctgatgactgatgcattatggcacagatgagataatggatgtgagagcgctttgtagatcataaagtgctatacagatataggggattaatattattaatattgttagttgttgtcgttgttactattcttattaatattgttactaacctattaacttgtgaatatataggctggggtgggagggtggagaataagtgggaagggaaaaaggggatttaacaaaaaaagggaagatgtttcaaaaggaaaattttaagcaaaatatgaacctacctagtcaatgccacctaaatgtattcacaaacagagaagcaacatttgaaagtagtcagagagaaatggaaggaagcctgtcatgtatataagtatatacacttcccggtccatgattcctttcaccagcctgctctattccttacagctgggtcgtaaaatgaacaagcctgtgttcttgatcatgtgtgttcccagcgtcagtctcttgtgtctgtggggatgagtgggtgaggagcattctgtgaggctggtacaggcccattcctaggctttaatgctctgtttgcagtgagccctggaaaattacttagtggaaaggcaccagatgaaacatgtctcctgccccatagctaccattcaaaagggaaaataaccaaactggaaaaccttcttctatttctctattctgatagctagctgtactaaatgctatggccagtccctagaaactggtctttgttttgtttttgtttttgtttttgatttttctgttttgcagctgaattttggcttggaatcaccaactctgcctgtattgtgatccccaagactccagacctcagagtcacctgctggcttagaggagtggagtgctttctatgtaatgaaaaggtggcaattaatgaaaaaataaagaaaatgttccattaatacaatgtgtttttataaaagtaaatatgggagcagttgtcccagttttttttcggtatcagttcagctttggagaatggggtgtgagtggggtaggacagcctgaaactgttggaaacaatttccttgtgagaacttgctatcataagtcctttggaatggatattctttcagttgctcctatggagcccattaagggccaattctagggcatagttcatccctttctccaaagagaattgttattttaaagtacctttttaattggcctgcagtgtattatatgtttttaatatataaattagtgacgcataaccagtcactttgtactgaaacataaaaagaaacagagtttgagaaatgagcaataggccgaggcagaagatgtttattctcttaattgcatttaatattcctctcagtacattgtgttctgagatgttcatcatttagcattttgttggtcctgtctctgctctcacagttctttttcttcctgtcataaccagctgccttagtagagtataaaaatagtgttttgccctatcactggtatctcaagtcagaaatatatattatccttggtctgaaattcctgattaccgctcccttctaaccttccccctctgagaagctgtttcctattaatgcctccctaacagagtcccatttaatctttactttcctggaaatggtaacctcccttattcttcttacttaatctcagaccttggtcttagaatttttcttttatggtctcatatcccacctgcccaaattgtcagggctcaacaatcttaggctgctttcttctggaagttcagaaggaaaccttcccattcttaattgcctttaattgctttggctattttcaaatctaattttttaattaaattttttttaatttttatagagtaggggtacaaggacagttgtgttacatggatatattgcttagtgttgaaatctgggcttttagtgtacccatcaccgaaatagtgtacattgtacccaataggtggtatttcatccctcaaatataattttaaacacacactcgtgcccacatggacaaattatatcacatgactgaggaaacttagaaattccttttccctgaagatctgttaagaataggtctcatctcctgccctggttaggtgctatattatatggagaagggtattgagactttgggggtcatgtttgggctgtgataactggcttgaaccagtgaccatcctttctgcctcgccaaggtctcttataccagcttcttcacatatgctgcttcctcccagctttcccttctgacttcttgttactctgcaactatgtgtcaaggccttaccttttcctgatgttttcaaacctcctgcattactttgatcatcacttcttcagccatctcactgaagtccttggtgctagctgggcttttgtgacaactttcaccttctctgaactttttccttgctgggaagcatctgcgtgtgtgagggggctacggagggaagtgtgtgtgtgtgtaagagagaggcaaaaggatgcttcaaaagctataaacaactctagcaagcatcctaagtcctatgtgaggttttgcagttctagtgaatttctgttttagtaggtttcaattagcatttactgcctaaaggagaaaaaccatatccaaggaccttttagccatgcttgctattaccaagctggaccagtgtgatgtagatccaacatgtcttcagcttacagatgctctcagaacagttccaagaattgaagagagctaagtttttatgctgaagaggagaatggagcactagctagtcctaactattgctagaaatagaaatgtttattttctcctttattattgagaaattatctaatttaaggagtaaccattttcatttagggatttttttaatgactgcccatcactacagaaatatgttctttttataaaataaaactaatgtgaggttggtttgttttctaatcataaaattcactaagcctatagttacatttagaagatttagtaccaaaatcaaacttttagtaacaaacaggaatcttgtcaacacaatgtaggccagggattttgtaaaggtttctcaaagacccaaataagggagaaaaaaattttagttgggctgtttaacttgggaaacactgtcatcagcttgagggtcctcagccagcatgtgattattttgatgacaggactcaggctaccctttaaggcacattttttactcagcattaaacactagctacagtcgtgaagcagagctcccattgcagctacatacttgagatgtactcttggtttcagaatcgtaactaagaggtaaggcattggagaaggacaatgtaaaagacagaggtttagaacaaagtttatggtgtgaatgaggctttcaaaatcagtatctgggtaaattgatactaaagacactgaagaaacactcatccacataagatggaaaggatgtctgtccatctaacaagctcaggggtttctgagtctcagaatgacatcccatttcaaaaagaagaaaagagatattgaaatcattctgcctgtttgagagatgactggttatttacagcacaaaaaaaggcttagaatgaaaactagaagaggccttttgtttttcactcccagtgaggagagtagaaatcttaagatgctctactgggctacctgtagcactgactggagtttgctgcctacagagttttgaatgtactagtccttagtttccatagaactgaatgcacctctttagtaagttgctgatttatggtgctaaagaaaatgattattcccatttttttcttcttccccaagccccttaagcatttaagaaaatttaaaataaaagcgttagaggccctttttatgaatgtaacctaagtttctgtttgacatatgacactgcaacttaaaaatgttaggaaattatttgcctttttttttcttttagagttaagctttataaataatctgtagaatcaattgaagtttaaagcttaaggatcactcttaagacgtctacaaaatcttgtatatttttaagtgtgccaatttgtaacatattttgtaagtgtatatttttcttagaaaagtgctgtgaagtgtctgtatgtgagagttttcctttttctgcaccactaggtgctaataaaaggatatttacttcaaagtttctggttttagaaaccacaatacaaagaaaaaaaatacacttttgttggaaattttgtaacacaaaacatgttgtgaaagagtgtagtgatcttgtgcaaaaaaaatgaacatttgtgagcttcttgctgttttatagattttcttgtaaattattcttgtaacacttctggttttgttgttcttgttgcgaaggtttcaaatatttgtgactgaatgtacggtgaaactgtcataatgttacctagctgagttttgttattgtttatgaaataaataaaaagaaaagtttaaaatactgctttagaatcatatgtattagaaatcaaaccatttctaattaaatctatgtcccaaataaaacgttctttatcatctagagcagtgtttctcaaactatctgtggtgagggaccaatagtttttgcaatccatcacagaccaatactattataaaacacaacaaaaatgaatttctaagaaagttaaatggaaaaaagatatgcaaaataaaagcccaaatgtattagatttaacatgtaaaattacatttcgagataaacataacataaggggaaagaaacgaattgcaaaaagttggtaccctgtttgagacaagtccactcatcaatgtcaaattgccatagaaggttctaatcatactttgaataatactttgactagaccagcagcattgccatcatctgggaacttgttaggaatgcgaaattccaagccctacaccaattctgctgaatgagaatctgaattttaacaagatccctaggtgttttgtgtgcatgttaaagtttgagaagcactgggctagagttttgtgtaggggattcttttgcccctcaaattgaggaatcatcttctagtgtgtccagtcttcaaagaccttaaaacaaattgtgtctttgttttgtgatccagatggaatctgcagagatgcagtcctctcaaagtgttaaagctgtttattgaaagtaataaatgctgatttgcctggtaaaaaaaaaaa

SEQ ID NO: 131 - DNA, 4459 bp, Homo sapiens
ccagacggccccacaaccctgcgcgtcgcctcagagggggcgcgcttgactgacaggcggcggcggcgcagttgcgagtgcaggtgagttccgggccgccaccggctgcttctgtgggccgggcctctgagcattggcgaccccagcccggctccgggctgacagggcctggcttcgccaggctccttgccagaggcctccactcactccagacccctatagcccgtcgctgtcagctgtcaacaaaggatgcgaatgctggccgcttcctgtgggcttcgtgtcacccagaggtgagcccaggccaggatgggggactccagggacctttgccctcaccttgactccataggagaggtgaccaaagaggacttgctgctcaaatctaagggaacctgtcagtcgtgtggggtcaccggaccaaacctatgggcctgtctgcaggttgcctgcccctatgttggctgcggagaatcctttgctgaccacagcaccattcatgcacaggcaaaaaagcacaacttgaccgtgaacctgaccacgttccgactgtggtgttacgcctgtgagaaggaggtattcctggagcagcggctggcagcccctctgctgggctcctcttccaagttctctgaacaggactccccgccaccctcccaccctctgaaagctgttcctattgctgtggctgatgaaggagagtctgagtcagaggacgatgacctgaaacctcgaggcctcacgggcatgaagaacctcgggaactcctgctacatgaacgctgccctgcaggccctgtccaattgcccgccgctgactcagttcttcttggagtgtggcggcctggtgcgcacagataagaagccagccctgtgcaagagctaccagaagctggtctctgaggtctggcataagaaacggccaagctacgtggtccccaccagtctgtctcatgggatcaagttggtcaacccaatgttccgaggctatgcccagcaggacacccaagagttccttcgctgcctgatggaccagctgcacgaggagctcaaggagccggtggtggccacggtggcgctgacggaggctcgggactcagattcgagtgacacggatgagaaacgggagggtgaccggagcccatcagaagatgagttcttgtcctgtgactcgagcagtgaccggggtgagggtgacgggcaggggcgtggcgggggcagctcgcaggccgagacggagctgctgatcccagatgaggcgggccgagccatctctgagaaggagcggatgaaggaccgcaagttctcctggggccagcagcgtacaaactcggagcaagtggacgaggacgctgatgtggacactgccatggctgcccttgacgaccagcccgcggaggcccagcccccgtcaccacggtcctccagcccctgccggacgccagagccggacaatgatgctcacctacgcagctcctctcgcccctgcagccccgtccaccaccacgagggccatgccaagctgtctagcagcccccctcgtgcaagccccgtgaggatggcaccgtcgtacgtgctcaagaaagcccaggtattgagtgctggcagccggaggcggaaggagcagcgctaccgcagcgtcatctcagacatctttgacggctccattctcagccttgtgcagtgtctcacctgtgaccgggtatccaccacagtggaaacgttccaggacttatcactgcccattcctggaaaggaggacctggccaagctccattcagccatctaccagaatgtgccggccaagccaggcgcctgtggggacagctatgccgcccagggctggctggccttcattgtggagtacatccgacggtttgtggtatcctgtacccccagctggttttgggggcctgtcgtcaccctggaagactgccttgctgccttctttgccgctgatgagttaaagggtgacaacatgtacagctgtgagcggtgtaagaagctgcggaacggagtgaagtactgcaaagtcctgcggttgcccgagatcctgtgcattcacctaaagcgctttcggcacgaggtgatgtactcattcaagatcaacagccacgtctccttccccctcgaggggctcgacctgcgccccttccttgccaaggagtgcacatcccagatcaccacctacgacctcctctcggtcatctgccaccacggcacggcaggcagtgggcactacatcgcctactgccagaacgtgatcaatgggcagtggtacgagtttgatgaccagtacgtcacagaagtccacgagacggtggtgcagaacgccgagggctacgtactcttctacaggaagagcagcgaggaggccatgcgggagcgacagcaggtggtgtccctggccgccatgcgggagcccagcctgctgcggttctacgtgtcccgcgagtggctcaacaagttcaacaccttcgcggagccaggccccatcaccaaccagaccttcctctgctcccacggaggcatcccgccccacaaataccactacatcgacgacctggtggtcatcctgccccagaacgtctgggagcacctgtacaacagattcgggggtggccccgccgtgaaccacctgtacgtgtgctccatctgccaggtggagatcgaggcactggccaagcgcaggaggatcgagatcgacaccttcatcaagttgaacaaggccttccaggccgaggagtcgccgggcgtcatctactgcatcagcatgcagtggttccgggagtgggaggcgttcgtcaaggggaaggacaacgagccccccgggcccattgacaacagcaggattgcacaggtcaaaggaagcggccatgtccagctgaagcagggagctgactacgggcagatttcggaggagacctggacctacctgaacagcctgtatggaggtggccccgagattgccatccgccagagtgtggcgcagccgctgggcccagagaacctgcacggggagcagaagatcgaagccgagacgcgggccgtgtgatctgctgggctagtctccccatgtgccccaccccgcggaaggcgtgtttgtgcccagaagagaggccgggctgctgcagaaccccgccgtgtaaagaggcagaaaagttggtttggtttgcagtaacgctgcaactagaaaatatatgcacttcaggcttgttgaaacgaccaagactctgtgacgttaatttgggtctttgtcctggcagtgcctctgccagtcactgtcatcgttgtgtcccccacaactgtcctcttgctagctcggcccagctttgtccctggagcccgatgctacccctgtcagacagaggctgcggcctgggccagagtcagggagtagctgctgcttcacggcgtctccactgtgcgattggcccggagccccgaagactcggagggagctgctcagggccggtgagcgcagccagaagccctggccagtgaggagctcacaggtcctccctggtggtcccgccgcacctctgcatctcctgggcgtcaccaggaaggctctgaagtcccgggctgctctcagcacttctcctgcagactgaagactctggactcattgctgattggaacaccaggaggaggttggatttctgccagtgggggatgtttctggaggcagctggtcccccacaccgcgtcctgctgagcctgccccctggattggctgtaatttgcctcgaagttcagcagttcatcttcatgggaaatttgctgagcccccaccagggaaccggatgatgaaacagggatacctcacagcttggccatttgaggcaaaggcagcttcccgagctgatgctaaagaagacagactttcccttcctcccagcagcagcagtgcagagcccgcctggagggatgtgggggctgtgcagggtgcagcgctcaggtggatcctgggaagcagcctctggatgctgagtggagggagccactgagcacagcaaggcaccaaagcccctggagaaaccgccagggcgaggtgcgaccatcatcaggatcaaagcagacggggcgtgggtggggaaggggctctgggaccagaccccccacactactgcgtctttgtttctatcagtctttgtagaagcaggtggtggtggaaattccagcaggtgggtcccgcagaggccctgaggcctcacttttcggatcttctgtcccagatcctgctccctccctgctgagcctggggttcccctggcattggccccagccttctgaaagccggcgctgcagccagaggccgcacgctgcactgtcgcgacgcagagaggcttctgtgcaggctgggatcgggccccatgtctgtgctgtctagtttgtgttcaaaatgtcagaataaacacagaataaatgttcccacggccaaaaaaaaaaaaaaaaaa

SEQ ID NO: 132 - DNA, 6571 bp, Homo sapiens
gccccgccccgcgcgccgtggccgtttgaagtgactaatttctgtcatatgactgaggcgcccatgggggtggcggggcggctgtaggagcaggggcctagcaagcgcccagcggagcgacccctgcctggccgtggctagcatggcccctacgctgttccagaagctcttcagcaagaggaccgggctgggcgcgcccggccgcgacgcccgggacccagattgcgggttcagttggcctttaccagagtttgatccaagccagattcgactgattgtatatcaagactgtgaaagacgagggagaaatgttttgtttgactccagtgttaagagaagaaatgaggacatatcagtatcgaaactctgcagtgatgctcaagttaaagtctttgggaaatgctgccaactgaaacctggaggagacagttcttcctctttagatagttctgtgacttcatcttctgatataaaagaccagtgtcttaagtaccagggttctcggtgctcttctgatgccaatatgcttggagagatgatgtttggctcagtagcaatgagctacaaaggatccaccttaaaaattcatcagattcgttcccctccacagctcatgctcagcaaagtgtttactgctcggactggcagcagtatttgtgggagtctcaatacgctacaagatagtcttgaattcatcaatcaggacaacaatacattaaaggctgataataacacagttattaatggactgcttggaaatatagttcacagcaacccaatggacatgcctggaagagagctcaatgaggacagagacagtggcatagcacggtctgcatctctcagcagcttgctgatcactccatttccttccccaaactcctcacttacccgaagttgtgccagcagctaccagcgacgttggcgacgcagccaaacaacaagtttggaaaatggggtatttcctagatggtctatagaagaaagctttaatctctcagatgaaagctgtggccctaacccaggaattgtgcggaaaaagaagattgcaattggggtaatcttttcattgtccaaagatgaagatgaaaataacaaatttaatgaattctttttttcacattttcctctctttgaaagccacatgaacaaattaaagagtgcaatagaacaggctatgaaaatgagccggagatcagctgatgccagtcagagaagtttggcatataatcgaatagttgatgccctaaatgaattcagaacaacaatttgtaatctttacacgatgccacgaattggagaacctgtctggcttacaatgatgtcggggactccagaaaagaaccacctttgctatcgtttcatgaaggagttcacctttctaatggaaaatgcttccaaaaatcaattcttgccagctctcattactgcagttctgaccaatcatcttgcctgggttccaacagtcatgccaaatggacaaccacctataaaaatatttttagaaaagcattcctctcagagtgtggacatgttggcaaagactcatccatataacccactttgggcacaactgggagacttgtatggcgctattggctctcccgtacggttagcaaggactgtggtagttggcaaacgacaagacatggtccagaggctactttattttcttacttattttataagatgctctgaacttcaagaaacgcatcttttagaaaatggagaagatgaagccatcgttatgccaggcacagtaattactaccactttagagaaaggtgaaatagaagaatcagagtatgtccttgtcacaatgcatagaaacaaaagcagtttgctctttaaagagtcagaagaaattagaactcccaattgtaactgtaaatattgcagtcatccactccttgggcaaaatgtagagaacatttcacaacaagagagagaagatattcaaaacagctctaaggagctgctaggaatttcagatgagtgccagatgatttctccttctgactgccaagaagaaaatgctgttgatgttaaacagtacagagataaattaagaacttgctttgacgccaagttagagacagttgtttgcacaggatctgttccagtagacaaatgtgcattgtcagagtcaggcttagagtcaacagaggaaacatggcagagtgagaagttgctggattcagacagtcacacaggcaaagcaatgagatccacaggaatggttgtggaaaaaaaacctccagataagattgtgcctgcttcattttcttgtgaggctgcccagacaaaggttactttcctgattggggattctatgtcacctgattcagatactgagcttcgaagtcaggcagtggtggatcagattaccagacatcacaccaaaccattgaaggaagaaagaggggctattgatcagcatcaagaaactaaacaaacaaccaaggaccaatctggagagtctgatacacagaacatggtttctgaagagccctgtgaacttccctgttggaatcattcagacccagaaagcatgagcttattcgacgaatattttaatgatgattcaatcgaaaccaggactattgatgatgttccatttaaaacaagtacagatagtaaagaccattgctgtatgttagagttttcaaaaatattgtgtacaaaaaataacaagcagaacaatgaattttgtaaatgtatagaaacagttccccaagattcatgtaaaacctgctttcctcagcaggaccaaagagatacactctccattcttgtcccccatggggataaagagagttcagataaaaaaattgctgtaggaactgaatgggacattccaagaaatgaaagttcagacagtgcccttggggatagtgaaagtgaagatacaggtcatgatatgactagacaagttagcagttattatggaggagagcaagaagattgggcagaagaggatgagataccttttcctgggtcaaagttaatcgaagtgagtgctgttcagcccaacattgccaacttcgggaggtccttgctgggtggctactgctcatcttatgtgcctgactttgttcttcaaggaattgggagtgatgagaggttccgtcagtgtctgatgtcagatttatctcatgctgtgcagcatccagttttggatgaaccaatagcagaagctgtctgtattatagctgacatggataaatggactgttcaagtggccagtagccagagacgagtgacagataataaattgggaaaggaagtattggtttccagtcttgtttccaatctgcttcattccacacttcagctttataagcataacttgtctccaaatttttgtgtaatgcatcttgaagaccggttgcaggagctatacttcaaaagtaaaatgctgtctgaatacctgagggggcagatgcgtgttcatgtcaaggagctgggagtggttctggggattgaatccagtgatcttccacttctggctgctgtagcaagcactcactctccatatgttgcacaaatactcctttaatatacctaaaaattgttagaaattggtgggaaaataggtagaaaccaaggaagcagacacaacatgcatttatggagattctttttcccttttagacttccatctgaatgagtcagtcaccagggtattctgcatagcattgtatattctgtgtatgtcagatggctttttctttttgactggacttttgggtggtggtagatttttaaacaaatgaaattaaagcaacaataattttgaagcatttgaaaaagccaaagtgtacggtagaaatttctacaaaatgaatattatcaagagtttcatgtgatcactgcagtgttgtcacagctcataaatagcaacagtgtctcatgatttaatggctcagaaatagttattcattagtttttaatttttaatttctaaggtacagagatctataaaaccttgattatttgttagttttgcaattcaaaacagctaatgtctggttatttctcaaagtaagtattttaaacagcctgttaattataagaaactcagaataatgagtgtaaatgtgttatgttatccacccaagtgtacatatgtacctatttttttttaaaaagcagaaatagaaatacaagactggtaaacatgcctttaaaaatatatatattttcaactagtattgtctataatgctgaaatattacttattggtgatttttctgtttcacacactctaaaatataagtaaagccaaccttttttttaaggctgagattcccaaaatgagaatactactttataccatttgtttataagtatgaactgttcttataaatattaatatttacatattcactaatttaacataaatgaaaattaggattaaaaattgcaccaaagcatcggcaaaaacaatactatattctttaaaagtgctcaggtagccaaggcccttgcttttggtatcaaccctcatgaacccataggagctgaatatttgtttcactgcttaataatcctcaatttacactattcataactcttaaaattattctctttttttctaagagtccctcccttccaaaagtgtatttttttcaaagattttcacttctcaattgttgcctttgtacatactatagagtgttgcttgtaagaaaggctaatatggaaccaaactcttgtaagtaatgtaaatagaaaggtgggtggataaagttttcaatactttctactacctcagtttacttgagtactacattatagtttattctttgcttatctggtctaagagacttttaatgctagtagtaaagttggtttctgctttcattgactattttcatcataatttcatcattgattaaaaaaagaaaaccacttgtttattcagttattaaatatatttactatataacacatccattcttgctgtttaaattttcaatagttaatggaaagttgtctttgaccttgaatttacagcattgggtcacattttgccttgctgtgtatgtattcaagagacttccaactagacaaagaaaaaattgttgttttaatggaatgtaaacctgaaattggtgtgtctgcaatctgtttggcccatgaccttttacctagtcccagttattacctgagtctcccatggatgacttgctgccaaggagtgtttgtggatatattttctttggcttaattttcttattctgtgcattaacaaaattatccagttgtctgattttggaattctatgagtcaatctttttggcagaattcagaatattaaaaagttcatacatttgcgggccattgtacctttttttttttttttttttttttgacggagtttcactcttgttacccaggctggagtgcaatggtgcgatctcagctcactgcaacctccgcctcccagttcaagtgattctcctgcctcagcccccaagtagctgggattacaagtgtgcgccaccacacccagctaattttttatttttagtagagatgagatttcaccatgtgttggtcaggctggtcttgaactcctgaactcaagtgatccacctgcctcgacctcccaaagtactgggattacaggcgtgagccactgtgcccagccttgtacttttttttttttttattgtagctctgtatagcacttggataatgtctgggtgtctccttaaccatcaaactgttctttatttaaaatgtttaattaccgtttagaaattctagtcctcaataagtgggtggctcatgctattgttgttcctaaagctaagctttgctgggaaggaaatgacctatagtttcttaaagaatcattaatccttataggattcctgagttactgttttgttcctccccactgcttcccattcctgagttttgtaattcctaatccttctataatttctattaccttcaccatagtcattctttccttacgcaaagcccaaggaatgagctgctgctactttaaagtgtggtcattatgatgaatgtgaaaagagttttggcttgttctaaataatttttacaagttatggtacagacagttgttacatatcaaaaaaaacctgtttattgaaacaggaaataaaaaagggatcttttacattatagaattaaaactaattttttcttgtatataaactaattggtttgattttaaatatttctggcttttattaatatgtcttaattttgagtttgaaaatgttaagtgcaataaaaacatactagtacagattttgttttgttccaattggcatactctggggatgatcacttaaaaaaacagattttacataatgcctacttctggtagatgtcttatgagattgttctgctttttctaagttacttagatgttggatatgtacatagctgtttcttgttctgtatacatttctcaaatgtacacttgtattataataacctcccagttctaggggatatttgtgcaataaatacacatgtcaacttgaaaaaaaaaaaaaaaaaaaaaaaaaaaaaaaaaaaaaaaaaa

SEQ ID NO: 133 - DNA, 6554 bp, Homo sapiens
cggcagcggcggcggcggcgcggctactgctggggctgctgggctgcggggctgcggggctgcgggtcggggaggccgggccgggccgggccgggccccgctgaccgccatgctgaccttcttcctcgtgtcggggggctccctctggctattcgtagagtttgtcctctcacttctggagaagatgcagacacaggagatcctgaggatactgcgactgcctgagctaggtgacttgggacagtttttccgcagcctctcggccaccaccctcgtgagtatgggtgccctggctgccatccttgcctactggttcactcaccggccaaaggccttgcagccgccatgcaacctcctgatgcagtcagaagaagtagaggacagtggcggggcacggcgatctgtgattgggtctggccctcagctacttacccactactatgatgatgcccggaccatgtaccaggtgttccgccgtgggcttagcatctcagggaatgggccctgtcttggtttcaggaagcctaagcagccttaccagtggctgtcctaccaggaggtggccgacagggctgaatttctggggtccggacttctccagcacaattgtaaagcatgcactgatcagtttattggtgtttttgcacaaaatcggccagagtggatcattgtggagctggcctgctacacatattccatggtggtggtcccgctctatgacaccctgggccctggggctatccgctacatcatcaatacagcggacatcagcaccgtgattgtggacaaacctcagaaggctgtgcttctgctagagcatgtggagaggaaggagactccaggcctcaagctgatcatcctcatggacccattcgaagaagccctgaaagagagagggcagaagtgcggggtggtcattaagtccatgcaggccgtggaggactgtggccaagagaatcaccaggctcctgtgcccccgcagcctgatgacctctccattgtgtgtttcacaagcggcacgacagggaacccaaaaggtgcgatgctcacccatgggaacgtggtggctgatttctcaggctttctgaaagtgacagagaaagtgatctttccgagacaggacgatgtgctcatctccttcctgcctctggctcacatgtttgagagagtaatccagtctgtcgtctattgccacggagggcgtgttggcttcttccagggagatatccgccttctctcagatgacatgaaggctctatgccccaccatcttccctgtggtcccacgactgctgaaccggatgtacgacaagatcttcagccaggcaaacacaccattaaagcgctggctcctggagtttgcagcaaagcgtaagcaagccgaggtccggagtggaatcatcaggaatgatagtatctgggatgaactcttctttaataagattcaggccagtcttggtgggtgtgtgcggatgattgttactggagcagccccagcatcaccaacagttctgggatttctccgggcagctctagggtgccaggtttatgaaggttatggccaaactgagtgcacagctggatgtaccttcaccactcctggcgactggacctcagggcacgtaggggcgccacttccctgcaatcatatcaagctcgttgatgttgaggaactgaactactgggcctgcaaaggagagggagagatatgtgtgagaggaccaaatgtgttcaaaggctacttgaaagatccagacaggacgaaggaggccctggacagcgatggctggcttcacactggagacatcggaaaatggctgccggcaggaactcttaaaattattgatcggaaaaagcatatatttaaacttgctcagggagaatatgttgcacccgagaagattgagaacatctacatccggagccaacctgtggcgcaaatctatgtccatggggacagcttaaaggcctttttggtaggcattgttgtgcctgaccctgaagttatgccctcctgggcccagaagagaggaattgaaggaacatatgcagatctctgcacaaataaggatctgaagaaagccattttggaagatatggtgaggttaggaaaagaaagtggactccattcttttgagcaggttaaagccattcacatccattctgacatgttctcagttcaaaatggcttgctgacaccaacactaaaagctaagagacctgagctgagagagtacttcaaaaaacaaatagaagagctttactcaatctccatgtgaagttcaaggaaagttcttctcagtgtaatgaactgtctagcaatattatagttattcttgaaagtaatgagtcaaaatgacacagctgaaaatgaataagcatctgattttatgactgagccttttcctgtcccaagaggtctttaacaatattttctctatcatcaatgagtatattttatttttattataaaaatgatattgtggtggactgctaaaaatatcacaaatggcaatgtaaaaatcaagacattttctcaagaactgtgtaccactaaaagtaatatattgtcaatgttcacagaactattaaacataaaggaaaaacataagtgatatattctacttaattatttgtgaatcagtaaccagatgcagcaaatatctaggcaatgtggactacctcattcagtaactgattgtcaaaatcacaattaaatcagacttcaaaaattaaagctaggtgtatagaatcatgctaaaagaaaacatgataactcatagtctacgtaacttcagagtctttaaacatgacaatccacattgtcatatgtgaaaattttctctctgatttttactttcattcatgaaaaatgaaaattcagaaattctttttttcctttttgttttgagacagggtctgctctgtcacctaggctggagtgcagtggcttaatcatggctcattgcagtctccatctcctgggctcgagtgatcctcctgtctcacctcccaagtagctgagactacagtacaggcacatgccaccacacctggctaatagaaattttttttttagagattttgctcaggctggtctcaaactcctgagctcaagggatcctcccgccttggcctccctaagtgctaggattacaggcatgagccattgttcccagccaaattcagatattattaaaacacatgtcatatttatatagtaacttacaaagacctttcaatacattttctcatttattaagctcattaaagtattcaggaactacctagaaaaaatataatgtaaaactattcaaggatagtgtgtgtatgttcatggacttcttattataatgaattctaaaagacatctgttgactctacaatgaatggatccttgaggaatacttgggagaagaaactcagagttatttctcagggtaggcagcaattaatgtacctacattccttgctggggtcttctagtcttccattcccaatgtgcccatgctatgcctggaaaccctatatggttgtaattctgaacaatttcactttttttccagtaagaatatcaaggcagaaggtgggaaggaggggacattatttccagggaaaatagtttttcaacaatataactttgataaacctctttaaaatgccccaagaaaactttttaagtccatagacaaagaaatactgcctaatggcataattacattcctaaaatctttaagcgtgccgaagtttaaccactaaaacctcctttcttgcattatgtatttagatgcaccctgtattggggtgtcaacaatttcttataattaaaggccagataccatggacagcaattaagttccaagctatagattgtgcctctgaaaaaggcatggaccccaggaacgtgtttttcttctgtagagacaagactctaaaagcatatcaacaatccatatgcaattcatgtgttaatttaaaatgtatgtgctcagtgtttgtagtctagaagctcctttcccttggaggaatgccaagcagtttgcaaaaataaatgctgttagttaaaaaccacataatcacatgggcctactgaataaatatgcatcagtgattatatacttatatttcagtcttgtcaaaagtgaatcactgtttcatttgatgtatttacccagtctttttatccagtttttcttgggcatattctctctgaagacccactgttgcacttctaaatttgacagttaagaaatgagctagttctatacacactgatttttaaaggcgtttctgaataaactaatacttaaaatgtccaaagtcacatctgtacagcattagatttttatatttaatatatatttgactaattaaaagtgaaagttgttacctgaactggatattcatactattttaagggcaagttgcttacatttcaataacaacaaaaaaagaatctgtttcccattgtcctcctactcaactaaaattcatagttggctttaagcccaaaagaattttgaacaatgtgacagaaacaagtaatgtaaaacttattttgttttatttatactttataatagttagatataacagattatggacaacttaatatttcttctttttggctgggcgcggtggctcatgcctgtaatcccagcactttgggaggccgaggcgggcagatcacgaagtcaggagatcgagaccatcctggctaacacagtgaaaccccgtctctactaaaaaaatacaaaaaattagccgggcgttgtggcgggcgcctgtagtcccagctactcgggaggctgaggcaggagaatggcatgaacctgggaggcggagcttgcagtgagccgagatcccgccactgtactccagcctgggcaacagaacgagactccgtctcaaaaagaaagaaaaaaaaaaaacaaaaacaaggtttcttctttttgccacttaaaatatcttatatttctagatttccaggtctatgtggaaatcatcacacttgggccaataaatgggttagttcagatgtgctgagaaaagtaaatagtgtaccctaaatatcttgcatgtacatttatctatttctctgtttaatgccacttaattttgtaagaaatgagaaatgaaaccctatgtatcagtggaaaaatccttcttgcttcagatttcccaactttattctggaggagaaaaaaatctgtatttctcattaacagagatagaaaaaggtgatgtacttacgatggtcacattcatattgggcattggatctatttaagcctagaagtataacagataatcagttccttaagtgtaaatatgttcttaaatgtttggcctttttatctgttattcaaatgtattagtaattctcatattttgcaaacagatccttttgtgtatattataaaatatataccaaatctgtttttccttttgctgtggaagatgtctttatataatattgagacttcccttgcaaatgagagacgggactctggtcaggtatagtgtgtaggcctagccccatgtattaggaactcataaactcagaaatccaaggattaaacattttatgtctccttcatttatgcaagtcatgctttcattctacatgtagttaaaactacaagtatgagaaaaaatagaactttccattggaattttttccaatcaggtaatgttttagcaacttgaaatcagcacttaatttgattgtattacctatcaaagaaccaataacctttcctttttctgcagtaaagaaaatgaaatatcctttattttccaaatgtatgaagcacaaatgcaatatagttatttaaaatataaaatactttaaaatgaatgtgaagaatgggaaaatatatttttgcatgaaaacagactacttacaaatgtgcttaatatctcaggaaaaaaagaatgaataaccgtatataaaattggtaaactataaattggctgtatttccttgccggttttaattttaaggaagcatttacatgaaaagaaaaaaggatcctagtagtctgaatttcctctcaagtatgctagaaaatactttctatgaatttacaattaactgcaataagaagtgggttagcattcaagtaaggtcaataccccaaatgagaaactcttcagttagaacacattagtggttgtaacacagaggcagtagataaatatttgaaatgtgagcatttctaaacttggtaccaaatggaaagggtttcatgaggtgacagtggcttttaaacattcatttgaccgattattctaattttccttgttaaatcattgcaacagttgcatgggggagaatggatattttttgaagaattgcttattccactttcaatttttaaaaatcgaggggattaaaatattactttttaaatatgcataaaagtatcttaactgtaattacattttcagttgctttgttatagtagcatgcatattaaatataaaatgcatttatgaaaatttttgtaaaaaataaaagatttttcatttctcaaaaaaaaaaaaaaaaaa

SEQ ID NO: 134 - DNA, 5842 bp, Homo sapiens
ttagcaggtctttctgcagggctgagctatcgctagggaacccacggtgactgaatcaaagggaagaaagacccaagacctggatctcccttttacatggaccctaaagcaaaggaaaatggcaaatgcacgacagcggcctcctgaacatcaccaaggtatccttctcagaccgaggtaaatacacgtgtgtggcttctaacatctacggcaccgtgaacaacacggtgaccttgcgcgtcatcttcacttctggagacatgggtgtctactacatggtcgtgtgcctggtggccttcaccatcgtcatggtcctcaatatcacccgcctgtgcatgatgagcagccatctaaagaagactgagaaggccatcaatgagttctttaggaccgaaggtgcagagaagctgcagaaggcatttgagatcgccaagcgcatccccatcatcacctccgccaaaactctagagcttgccaaagtcacccagttcaaaaccatggagttcgcccgctacatcgaagagcttgccaggagcgtgcctctgccgcctctcattatgaactgcaggactatcatggaggagattatggaggtggttgggctggaggagcaggggcagaattttgtgaggcatactccagagggccaggaggccgcagacagggatgaggtctacacaatccccaactctctgaagcggagcgactcccctgccgctgactcggacgcctcatcgctgcacgagcaacctcagcaaattgccatcaaggtgtcagttcacccgcagtccaaaaaagagcatgcagatgaccaagagggtggacagtttgaagtcaaagatgtagaggagacagaactgtcggcggaacattcccccgaaactgcagaaccttctaccgatgtcacgtccaccgagctaacatctgaagagccaacacctgttgaggtaccagataaggtactgccgccagcttacctggaagccacagagccagcagtgacacatgacaaaaacacctgcattatttacgaaagccatgtctaataccaaccccgaaaagctatgcatatcaagaaaatcaggggctgctccttgtaatacagatgtagtacgcacttgccgctaagccttaccaggagactctcatcccttaggtaggagtgatgccactttaaaaggagaaacacctgcctgcagtgaatgggactggaatttccccagtagagaagggtgcgagaaacatcagggtgcagaattgataccagacagaaggtgtctatgtgataatgagtttcagaggctgatctctgccaaataccttaattggtgatgccttcttggcaaagagtacaccactgtaagatattctgagttcaagaaccctgtccagtgccccctgcattgcttttccttttaaaaagtataggtctgctacaatagcaaatgcacgtacgtgggttttttgcagtttcttctcagttttaattttgcttttcctttataatggggtcattgttattaatactaattgttctttctggtttagtcctcattgccacttttgtccttatgtttccctagaacacgtacctcagagactttggtatcagtcaccagtaccagggctgatatctacaagtcacattacatttgtcatgttccaaagtagttacgaggcttgttatttttttttcattccccaggcctatttccatagatagctttttttgtttgtttccaacgaagctgctgttaaacgaaactgagaaaaactttgccccggaatagcactttaatagtcaaaaatgtgtttacctgtctgattgagtgagccttttggtgagctcagctgagatgtagagggagattgtaaaaggttaaatatacccacaccacccatgaaagtcactgtttaagttacatcatcctccaaataaagactgattctttacctggaaaatatattgcttccaaagacatcagattcagtggattcctgtaggttatagaatattggcttccaaacaggcttgcagggaccatatgctgttggatgacatataaccaggtccacttttatgaactgcatagctgacttggttgtccttaaagaggaaagcgaaaggttagggtaatagcaaagggaactgtgccatcagattttatgccaaaactgttgaataattatgcagtcctgcaagaaagtggttatatgtgaggtgcgtgatgttatggaaagaagacaaaattagtcatccaaaggcttaatacccactgtgccaataaccagctgcctggctttggacaagtctggacctcaggtcccttatctgtagaaggggcagatgacatgagctctgagcactgttgaaatggtatcactgtcacacagaaccaaaccaatattcacatccttgctccttttcacaatgactttaaagatttttgctttcatctcttggtccacctaacattttcatgcttcattacttaaataagaatgttggttttgagaaatagcattttaaacaaattgtggatcttctccttccaaaaaaaccattaggaccacatctgcaattaagatttaatattggtgagaatgagtggttttatttaattttcccttaaaagcaaaggagacagtaatcttaataaattcataggggccgtggccacatcaggtaatggggttatgatgtccaagattgcatggatcacattggtgatgagagcagacccagatgtttagtcctcactctgtcaccatctgaggaggtgaccttggacaactcccttcctctctctgggatttaatctttttcatctgtaaaatatgcaggtagtactcgagggtctacaggatcccttctagttgaaacatttatagttcacagaaagtttgcagtcttccaggataaccaacccccgttgcatgagacaagcaaaaaatgggtccatgaaattggatacttttgccatccaaactttacaacaaacattatctggctctgtaattgagagcagtgggcttggttttaaacctagccttgattagtttgtttatagataactgttgtggaaggtgatagaactagtcatggagtttgatgagacatctcttgaaaaggactgaactgttgacttctggttagaagtgctttgggcagtcacataaagaaatgagcagtgagaaatcaggagaaattatgactcctgttgggctttctggactagcattgtatgtttttgggttgcagaaaagttttaacaccacctcttagaatataaaaattttccagttgtcatggaggtccacagattcattaccatgggtttatatgcccaaagcaacaacagaggacttaagttcattttgtgatactgtatggatgttaccccatcctattcagttgtcattccacccaaacccatgtgtaggtttccacatggaaaggagaaggcatccattccacctagacattgaatagtgataataagctaaaagtgggcagattttcagtggagcaagagcagaaatatgcggccaaagaatgtttcctgattggttttgctgctttagactgcagtggggagagcttatgtagattttcaaaactttctccctctttaaggcatcataatgctctcggttttgataacaactgacataaagggaggttgacttaaaatgggaatttctccttccaaaaatgctacactcttcctatccatcctacagcttctttatgaaatgagaggccctcctgctagaatatgaaatgcagaagacctcatgactttcagctgatttttcaaagataaagtgaactgttcagcttcatagaaattcatgcgagtgtgactgaacgtgtgtgcatacacactcgtgcacattggactcatttgggcagttttaaaagcttcacactaaatccaaagcctcgtcctttgggtcgtatgtagtcgtttgtaaaatcaatttctggcttctgagtcatcctggtcatatctctagcaatgtttttcttgaaattctgaaaatgattcacatatgtgtgtacatttaattcacttagatgatctgtaaacttggatggtatttattctaaatggggaaaacaattttatatggaaaaatctatgtaatttataatggttttgttttatatattatattttcatatctctagggcacatctatcctcatctttttgtataccatacttagcaaaaagaaatactaatacttgactaaaatctctaggaaccaaacgtgatacatgtgatatatagcttctagaaatcgctctaaaaatctctgaatgtctcatccatcccaagcattattgtgctgtgtcattatgtccagaatgatttgtcttggatgcttatgagcatttgtttttcacaactaaggttgaaagacctgacatctcacacaatggggttctggaattcccctttcctcctttatctgtttttattgtttgtttcatttttaattgcaccagtctatgttgtcgaaactttgttttgaagggcaaatgtgagataacaagaaagcaatgtgatggaaagactggatgaatttacctatggctatgtaaattattttaatggactgataagatgtttcaagtctcatgcttggatctttatttattggtgatctaggatctgctcagctctttagcacatgaagaaaatcaggtacaaaggacatttgcatgtttggaacagcatgctctaagccccgtgcagccaacacaaattaacttgactgtagaaacaccaattccagctgctggaagaaatggtttagaaaggcaaaccagataccttttattctgccctaggaaatacagtgttgatcagtgctaaaactcttcagtggcagtcactgtggttcttttaactggggatttcctttcagtgtttcatttggtaccaaaacagaacatttaccttacatttcagatactctgttttctcagcattgttcagatactttcctttaccgctcttcacgtacccttttggcattgagtaattctataaatgtttctatccttggtttttaaaccaagttattcatactcttaaaatatctaccaaatctcattgtattttcacatattttgagcatcaagatactggtcattttaaaaaatccttcagtaaatagcacagtttattttcctaatgacatttttagggtttcttcattgatcaaccaggtttgggttacacaaatcaattgtgggggaaaaatcaaataaaacaattgcttattatattttccaaaggactgagcatttatcttttattcacgaagatatcatatgaggatgataatgatctttaacagattttttagagatagaatttataaagaggctgatactaagaatactacaatcaaaattgaagctagagaatgtaaaaatagaaagtaaatagttctaagaatattctggcataaattatttttatttagccaataaaatagcctccaaatgtatatctcagacaccatagagctgctaacaatgagaatcaaggaagatgcttgcacttagatttcgtttgttgtatttcagtagttctggatgtcctttgttaaaattggaaaatggaaaaatgtctcgacagaaatgtcaatctggtgattctgtgaactgtaaaatgttcacttttaaaaataaagttgtaaacaagttactcatataagttggtattacagtagcaaaaacagaaaaccatgtgatccatcctgtattttgattgatgctttaataaagggtttgcacagctgtgtggaaaaaaaaaaaaaaaaa

SEQ ID NO: 135 - DNA, 1977 bp, Homo sapiens
ggagagaccgggaacggggagcgcggctgccagcacccctgagccgccgccggaccctccgtcgccccgggccgccccccgccccctgcggtccccggtgtgtccgtctcgggacggttcgattccctccagagccggggaagggacggggggggcccagaggagggggcctcgggcgccccgcctgcgcctgctgcccccgccccggcggcgatgcgctcctggccgtgacccccgctgggggcgggggccggggtccatgcgcggagtccccacccggcccggcgcctgccgctgacggcggcgggggtgggggggcgcgcgcctggcctcctgcccaccccctggcgtcaacaccgcgggccgtcaggggctgcggccccgggctgcgccctcccccgcggccaggctctggagggacccaggagctgccgccggcctcagcccatggcccggaggtatgatgagctgccgcactacccaggcatcgtggatggccccgcagccctggctagcttcccagagacagtgcccgcagtaccagggccctatggcccgcaccggcctccccagcccctgcccccaggcttggacagcgacggcctgaagagggagaaggatgagatctatggacacccgctcttccccctcttggccctggtctttgagaaatgtgaactggctacatgctctccccgtgacggggccggagctgggctggggacaccccctggaggtgacgtctgctcctctgattccttcaacgaggacatcgctgcctttgccaagcaggttcgctctgagaggcccctcttctcctccaacccagaactggacaatctgatgatccaggccatccaggtgctgcggttccacctgctggagctggagaagggaaagatgcccatcgacctggtcatcgaggatcgggacggcggctgcagggaggacttcgaggactacccagcctcctgccccagcctcccagaccagaataatatgtggattcgagaccatgaggatagtgggtctgtacatttggggaccccaggtccatccagtgggggcctggcctcccagagtggggacaactccagtgaccaaggagacgggctggacaccagcgtggcctctcccagttctggtggagaagatgaggacttggaccaggagcgacggcgaaacaagaagagggggatcttccccaaggtggccaccaacatcatgcgagcctggttgttccagcacctctcgcacccgtacccctcggaggagcagaagaaacagctggcgcaggacacggggctcaccatcctgcaagtcaacaactggttcattaacgcccggagacgcatcgtgcaacctatgatcgatcaatccaaccgcacagggcagggtgcagccttcagcccagagggccagcccatcgggggctataccgagacgcagccacacgtggccgtccggcctccgggatcagtggggatgagtttgaacttggaaggagaatggcattatctatagaggctgatgcaggagagacccagcctccggctgtgacccccagcctcacacctgcctctggttcccgcctggtcctccagcttcaggaccccacctccaaaggcccctctgctcaatgcctacctccctagggccctgctgggacatgggggcctgagtgcccatccaagggctctcaaggacaccggcaaggcctccaggccctgagccccacttctgccttcacctctgcctgggacccgagctgggctcctgggccttggtccccagaagatggcggctagggcctcgccgccaggacagagaagggacggggtggctgggcagtcagggaaggagggtcgcccggatccgacattttggagagattccttcactctcctgtcccccctacctcccttctctaatttcttcttttttttaatgataaagtcttaaaaacacggagccacc

SEQ ID NO: 136 - DNA, 6215 bp, Homo sapiens
ctccccgccgccgccgcccccgagcctgcgggcggcgccgaggccgaggagcgctcgctgcagcacatgctgcgtgccatagcggaggagcgcggccgtcttagcctgcgccgcgaggtctgcggcctcgggtgcttcaaggatgaccgcatcgtcttctggacttggatgttctccacctacttcatggagaaatgggctccccggcaggacgacatgcttttctatgtgcgccggaagctggcgtactccggcagcgaaagcggtgcagacgggaggaaggcagctgagcctgaggtggaggtggaggtgtaccggcgggactccaagaagctgccaggcctgggagaccctgacatcgactgggaggagagcgtctgcctgaatctcatcctgcagaagctggactacatggtgacctgtgcggtgtgcacacgtgctgacggcggggacattcacatccataagaagaaatctcagcaagtgttcgcgtcccccagtaaacaccccatggacagcaagggggaggagtccaagatcagctaccccaacatcttcttcatgattgacagcttcgaggaggtgttcagcgacatgaccgtaggggaaggagagatggtctgtgtggagctggtggctagtgacaaaaccaacacgttccagggggtcatctttcagggctccatccgctacgaggcgctcaagaaggtgtatgacaaccgggtgagcgtggccgcccgcatggcacagaagatgtcgtttggcttctacaagtacagcaacatggagtttgtgcgcatgaagggcccccagggcaagggccacgccgagatggcggtcagccgagtgtctacaggtgacacatccccctgtgggactgaagaggactccagcccagcttcgcccatgcacgagcgggtgacctccttcagcacaccccccaccccagaacggaacaaccggcctgccttcttctccccatccctcaagaggaaggtgccccggaaccggatcgctgagatgaagaagtcgcactcggccaacgacagcgaggagttcttccgggaggacgacggtggagccgatctgcacaatgcaaccaacctgcggtctcggtccctgtcgggcacaggacggtccctggtcgggtcctggctgaagctgaacagagcagatggaaacttccttctctatgcacacttaacctacgtcacgttgccgctgcatcggattttaacagacatcctggaagttcggcagaagcccatcctgatgacctagccgcgtgcggagcctgcgcagagccccggccgggcccagccctcggagtgctgccaagtgcctacctgtccaccgccaccggggtctgcgatggcacgccagtgctggagccgcagccaggcgaggccactcgactcccggggccggggccgactccacgaacaccagcccaaactgaagtgcctcttccctcccctgctggcgctgctccgccctgtgccccccgcccatcgccccccacccatctctggagagccctctgcacccaaagaggactagagatgccgagcggccatgagagagagcggaaggagcagctgatgcccagagcggggccagagcggcgggtctatgttcacgtccccccagcagcaggcggaaccacccagccagggcactcagtgcattggactgtccacatgttcttgaggaaagccggtggaagattctggaatgccgtgcggatgaacttcagcacccgagtcagtcccagctcatcctccccagtttaccactttgttctaataggagatgggaacacgagaagtttgatggctttgccctgggctgggaatacctcacccacgcccagttccagaaaggcctccagctgagcagacggccccgatcccgccagaacggccttttgcttccagccaaagaacaccgccaacacgcacacctccaacctgggacatcccacgctgggcctcgcacggaggaacctgcagaatttggattctgagggtagtcgggaggcctcggtagccaggcagaacaggatatctgccaaagggtgtctgatgtggggtggggctggcatcctcccaggaaggttctaggtgggaccccgtcttctgggggcgggggtgtcttttcatcttccctggtttcctagaactcacttcctttgacggcgtgtgttggtcccatctctcagaccagctcactgaggcagaggagttgctcagaggctcacatgggcacccccattggttcgtgtgagcagctgcccagccccaggcctgccctcggcctggtccagcatgaaggcgtttccatctgcaaggatgcacggtaccctccccgagagcaggcctgtcccctacccaactgggaataaactggaagctgggtctctttgttgctatgtttttttgtttgaagttcccaggaatatttgaggggttccggtgatgtgtttagggatcttctctgtgggggaaaaggaagaggagggtcttgttctcccatctgtttattctttgggctctgggaacaggggactactttggggctttctccagacttttgtatgttgttattaaaagcgagctattgcatttcattctgcctcagtttgcccacctgtgaaatggggctgataccacctacctcactgaagtcccagggttcaagtgtgtggctgggtcagggcgtggtcacccgtcattctgcataggtcgggttggatgttagactcctgggatgccctcctccccctcgccctttgtaataacctaatctgagaccgtgcttggtggggggatgtgaactttctctctcccccagcagtgtctgctcaggcctgacagctcagctctgcacgatttcatgttcctaaacccatgtcttagggcagcacagagccaggtcatgtcatgccccaaagtgtggggacagagcctcagggagccccgagcatggtccagccccatttgagtgctctccggggatgccaaatgctgcttccaagtttgagtccatgtggctaaaatacacccatttcttcaggaactcttcccctggttgttctggggatcttgggagaaacacagccctgacagctcgtccgtgggaagatgaggcagtccaggttgtgaggagcacagcggcccgccctctgttctcagaggtgaggggcgggagaaggttgtctcctctggggccagcatttggccaagctcggaggcttggccagcactgctggatggctcagagcaagctgggctccccgtctgtaagatggcaaaaatgctgcccccctcacagggtgaccatgaggaccagtcacagtgatgtgtgaaagggctcgctggtcacagaaacgtgtacaaatcatgctattttagagatcagccctcaatttgtaaggcatgtgaacagggcacgcggtgggctggtggtttcatagccgacacacagcgcctaccatgtgcagctgcctgtccgaccccatcttacagacgagaaaaccagcacacaggcaccaaggaactgtccggaactaacagcaggggccggcgatgggagtcaaacccaggcacgcggcctggcctgcatgctgagccacatggtgctgtccggacagatggacagacactcggtggagtctgcctttctcaggccctaaatccctctccaaagggtacttgcgatgccggatttaaaacttgctcagagccacttagccacttgagaaccagacagtaaggtgttactcccaggtttgtttttccaaagtaacagatgacatgtggaataaagtaatagagtaacaagtggcagggccagaaccagggtccccaaagtcctggtgttggcacatttgtacttcttgtaagaccatctttaatttttctgggaacacacctgccttttgtgtaatgcggggaagactaatgcatggtgacacctagttttcctcaacaggacacttgatcccaaaacccctttaagaccttaggtttcctcagcggaaaactgtactttaatcccaaaccccctttaagacatattggggctgggcgcagtggctcacgcctgtaatcccagcactttgggaggctgagatgggtggatcacctgagatcaggagttcaagaccagcctgactaacatgctgaaaccccatgtctactaaagatagaaaaattagctggacatggtggcaggcacctgtaatcccagctactcggaaggctgaggaaggagaatcacttgaacctagtaggcagaggttgcagtgagccgagatcacgccattgcattctagcctgggcaacgagagcgaaactctgtctcaaaaaaaaaaaaaaaaaaaaaaaaaaaaaaaaaaaaaaagatacattggtctttaaacccaaaccccctttaaggcatgttggtctcaaggggatttgggattgaagcacagctttctgttgaggaaacctaggtgtcactttttagaacattaaaaagaaagttgtagggtgggcttttccatttaaaggaatgtgatgatcctaggttctgatgagtgataggtggtctccgtttataccctttcttcttttggcacctgtaagttccggtagtggccatcttacattctcatgtcctgctggaagtgcctagttgcctgcaaagccagctaaggcttattatttcaaaagaagattatttaaaacatgagtgacaggtagtcagaagagaacaaaaggacgcaagatactctatagccaagtcagcttggaggcaggatgggttgctgagtgaagtcgccgctcacttttggattcttatggactgtgagttagtcttccctctacacggagtcacaggaagggtataaatgcatgttcctgaggtgccctcccccaaagaatgtacctgcactcaaaccaggatctgtttttgctgttttaatcataaatagactagttagtagaagacttttgaagaacaaagtaaaacttttttttttcattaaaagatgtcccagaggaaaggccctgtgcagccagtatattctaatgactgcctggaccatgtcctaatatggtggttttaagttgttggccaaaatcctttaaagacatacgaaacatctgccaactttttagcgaacttaacaggtttcactgacgttttcctcaatttttgaatttaggtgggatttgctttcatgtcctgtttcaaaaaccaagtgtctcttgacagcccactggttcttcctgtcctcttgctctagtctgtatcagaaagcagaatgactgtacttttgttttacaaacaaccacctgataggacggacactccacgagataaggaaaggcacgtgcccttgagcttgaatggaagcagcctctggagggggcagccactgcccttcgagggagagcagctcttcagcagtggccagagtgccacgtgactctgcagatgacccctgggagccgggtgatgggcacctgctggggcttttgttttttctttttcactggctggcttgatcctcagtggcaaaaggacccctgagccccttctccgagccctggagcactcctcgggacaccgagtggcctcagggctgggttcagagctcctcccgcagggggagcctcagaagtggaggcagctgctgatgggtgagtttacaacttcttatcctgcctaaggcgagtaggcgtttttattccgtttccagtccttgagctcagcagatcaaaataacagtgaccctgcaaccccacagagcccgcgacacgctcgctttcttccccgccctgcccctttagtccccgctctggaaggccaggcagtttaggtgtaaataggtatcttttatggtttccaaatgaattatttgtgtgagagtaattaaatctgtaagaaaacctgttgagattcttcactatgaattatgacttctacaacatgtattttagcaaaaacacgatgctggcctccactggatagctcagtatgctgattgccagtgatagttctgtacgcgttaccaacagcgtctttattaaccctcttccacatccagtggaaatcattgctaggcggtatttgttggttggctgttagctttgctttatgatttcatgtttcttttaaaggttgttttgcatgttgaatattaaattttttttttctgtgtc

SEQ ID NO: 137 - DNA, 6919 bp, Homo sapiens
acgccctgccgccccgcccggccgcagctagcgtggagccgccctgcgggcaactgagaccctcgcagctgcaccgtcctcctccgccgccagtcgtccgccgccatggacgtgtaccccccgcgccggcaggggctgccccgcgctcggtcccctggcggctccagccgcgggtcaccctccgtcagctgcagtcgacttcggcaggttcagagcatcctgacccagagcagcaagtctcggccggatgggatcctctgcatcctaggaatcgatagcaggtacaatgaaggctgcagagagctggcaaattatcttctatttggtttgtacaatcagaataccagtgattttgagaaaacgggattttctgaagaagtactagatgatgtaattatattgattaaatcggatagcgtccatctgtactgtaatcctgtaaactttcgctatctcttaccttatgtggcacattggagaaatctgcatttccactgcatgaccgaaaatgagtatgaagatgaagaagccgcagaagaatttaaaattaccagctttgtggacatggttcgagactgtagtagaattggcattccttacagctcccaaggtcacttgcagatatttgatatgtttgtggtggagaaatggccaattgtacaggcctttgcacttgagggcattggaggggatggattttttaccatgaaatatgagttgcaggatgtgagtttgaatctatggaatgtctacagcaagatggatcctatgtctctggagagtttgctttcagatgatttggtggcttttgaacatcagtggactagcttcttcgctaattttgacacagaaattcctttcctgctagaactttcagaatctcaggcgggtgagccattcagaagttatttcagtcatggaatgatctctagccatataactgaaaacagccctaaccggcagccatttgttctctttggtaatcactccacacgagaaaacctgaatgctggcaactttaacttcccttctgaaggacatctggtacgaagcactggtcccggcgggagctttgccaagcacatggtagcccagtgtgtctcaccaaagggacctcttgcttgttcgagaacatacttttttggagctactcatgttccttacttgggtggtgacagcaagctgcccaagaaaactgaacaaattaggctattgtcccagatatatgctgctgttattgaggctgttttggctggcattgcatgttatgctaaaacttccagtctaacaaaggccaaggaggtagcagagcaaactctgggatctgggttagattcctttgagttgattccgtttaaggcagccctgcgctccaagatgacttttcatatacatgctgtgaataatcagggaagaattgtaccgctggacagtgaagatagcttatcctttgtgaagacggcttgtatggccgtctatgacattcctgacttactgggaggcaatggttgtttaggatctgtggttttctctgaatcatttttgacttctcagatcttagttaaagaaaaggatggcactgttaccacagaaaccagctccgtagtcctgactgctgctgtacccagattctgctcctggctggtggaagataatgaagtaaaattgtctgagaaaacccagcaagcagtgaggggggatgagtctttcctgggcacttatctaacaggaggagaaggagcatatctttattccagcaatctacagtcctggcctgaggaagggaatgttcatttcttctctagtggccttctgttttctcactgtcgtcatagaagtatcatcatttccaaggatcacatgaattccatttccttctatgatggggattccaccagtactgttgctgctcttctcatagacttcaaaagctcattgcttcctcacctcccagttcatttccatggatcaagcaattttctgatgattgcccttttccccaaatcgaagatataccaagcattttactcagaggtcttctccctctggaaacagcaggataactcagggatctctttaaaagtgatccaggaagatggattatctgtggaacaaaagagattgcactccagtgcacagaagctcttcagtgccctgagccagcctgctggggagaaacggagttccctaaagttactctcagccaaactcccagagctggactggtttctccagcatttcgccatcagcagcattagccaggagcctgtgatgcggacccatcttcctgtgctgctgcagcaagctgaaatcaacactactcacagaatagaaagtgacaaggtaattatcagcattgtaaccggcctcccaggctgtcacgctagcgagctctgtgcttttctggtcactctgcataaggaatgtggcagatggatggtgtatcgccaaatcatggacagctctgaatgttttcatgctgcacacttccagagatacctttccagtgccctagaggcccagcagaaccgctctgcgcgccagtcagcctacatccgcaagaagaccagactgctggtggtgttacaaggctacacagatgttattgatgttgtccaggccctgcagacccacccagactcaaatgtcaaggcctccttcaccattggtgccatcacagcatgtgtggagcccatgagctgctacatggagcacagatttctctttcctaaatgtcttgaccagtgttcacaaggcctggtgagtaacgtggtattcaccagtcacaccacggagcagcggcaccctctccttgttcagctgcagagcctcatcagggctgccaatcctgctgcagccttcattcttgcagaaaatgggattgtcaccaggaatgaagacattgagctgattctctcagaaaacagtttttcaagtcctgagatgctacgatctcgatatttaatgtatcctggctggtatgaaggtaaattgaatgctggatcagtctatcccctaatggttcagatctgcgtatggtttggccgtcccttggagaagactcgctttgtggccaaatgtaaagcaattcagtcctccatcaagccaagtcccttctccggaaacatctaccacatcctgggcaaagtgaagttttcagactctgagaggaccatggaggtctgctacaacacactggccaactccttgagcatcatgccagttttggaaggacccacaccaccaccagactccaaaagcgtatctcaagacagcagcgggcagcaggagtgctaccttgtgttcatcggctgctccctgaaggaagacagcatcaaggactggctgcggcagtcagctaagcagaagcctcagaggaaagccctgaagaccagggggatgctgacgcaacaggagatcaggagcatccacgtaaaacgccacttggaacccctacctgcaggctacttttataatggcacccaatttgttaacttctttggtgacaaaactgattttcacccactcatggaccagttcatgaatgactacgtggaagaagccaaccgggaaattgagaagtataaccaggagctggaacagcaggagtatcatgacctctttgagctgaagccctagaggaaggctgggcccgtacgtcctgcagaatgtccaccttggagatggacgaacgggtgtcttaacctcagctctgctggaggcctctcccttaaggggctgtctttgttctccttggcctgtgtgggctggcttgagtgcatgttgtctttattccctgtatagcgctgaagagcatcacctgcaccattgattttgggggtcgggggaatactcaaggatgagcagatggggcctgcccgtctacgtgtgcaactggcagtccaggagctctgggtttctgataacaggatctcctttgggctcttgaggttggggagaagcattaggattacacagaggagctactgggacttagaaggaaccctggctgcctgaactgtggccgtgtctgggaggcgaggccacgacaggcctcaagcctcagatgctgctccacgagagccatcttccccagtggagtgcctgcctcccctgctaggcccgtttccctgaaggagctggccgtactggccgtgggcccagtcctgggaggagcagcacagccttgcccaggcccagtccacagagccagcagcttgggttgagatgaatgatgtgttcacaaatgaggggatttcccttctggactaaactgaaggagaggcttgttgctttccagaggtgtgtggctcttaagttgacatcagcttttccccttgtgggtggttctttagctctcctgtcacaccattcgggtgtcctaatgtagggacaagagcaagcctgctgctcaggccccctggcgaggcttcacctcactgtggaagggggcgtcctgcagctggttagtcttaggcctggtggctgatcacttgtggggtcagtctccagcacccagcgctcccacaagccttgccaaggaaggcctgcttttcagccacaaacttcaggaaactcatccccccgctccccaaagtgttgttgctggccctgggcttgtgtggctcctgaggattgggaatttcaaataattgcaatacctgagttagaattccttctaatggcatcgttttaagctggaccataaagcagaggggaattacaagtgtgtcccatgcctgaccttcataattggtgtgggggacaggggagtcacagccactgatatttaggtgatgtctcttaggacttcagtgcctcagctgcctgaactgtaaatgttttctgaatttcacatatttttttttgcatgccttaggaagaagcacataggtaaaaccagcagtttccagtaatatagggggtttttgagcaaggcccctggagcagcggagagacaagatggagcacatgtagtctgtgtgcctggtcacacagaggcctgcatgcaagtagcaaagcagctctcaagggcttgtcagtaaaatatattagaaaaaaaaaaaaaacaatttgaagccaaatgaacaaaactccagataccattgataagaaattttgcatcaagaagggcttctgaaaagacccacgtgctccagtcccagctccaaaagccactgatgacaagggccccactgtggaacctaagtctgggagccccctgacttctggctggccagaggctgcggtccgtcaagggcttgcctcgcttcagaatcagtaacatagatcttaagtgcaattgattaataagcagtgagttactgtagcttcctttagctctaccgaactctttttaaaaactcaaacttgagcagccttagaaaaggggttggggggtgggaaccacaggccatttctctaagtgggctgctgtgaagttttaaatgaaagctctagctttaggagcttgagccatttcctgactgcactggcctggcagtctggctgctgcagaagagtttttaaagaggggtcggagcccgcccgtgagagcgggtcttctcaccatgtggggctgtactacgtggtggtctttgtttctcttcacagaaatgctctctcaccaacttgccccactgtcccaactcctctcctcttagagaaaaaactgtgattacctcaacttgaatatgaaactgtgattgaaaaaagtcaaaacgtgaagaagcatcaaagccaaaaaggcaaaactggctgaggcctctgttgatgctcctcagcctactcgggaacgtgaaggggcagctggcgaaagggcattcctggggccacttgctctgccccactgataaggcacacccgcggtgcactgtgagctctttgaggactgaggccaggggatgcctcctggaacctgccaggcctctctgttctgtgaaggtcagtatccacttgattcctccaggcggcgctccaggtgggaggagcagggtcttctgctgtttccaaaggaatggccatgacactgcttttgaccttagaagtggatccagggacccagcaaagagcgggggtgggttcccagggacaggcagtcctcccggggcttacatgctttttgctaactttcctattagcagcttcagtttatatcacccagagtgcgtgggataatgttgaagtcgctgaagttacgggttattttatgtttttacatgggatttttctgtttttgattggaagaaggagacagaaattggaggaaatgggattattatcctagggaagggccgttggcaaggagttgagccggcccctctgagccctgggggctatctgacctgaagcctggacactgggcccttcaggtcgcaagaaaaagttccctcctaaattctattaggattttggagaatttttgcacagtaagaagctctgggttgctccttgggcttctcaaaagggaaaagttcaattcaaagattgtaaactacgaagtattccagccgtgttgctgatctagttggatagttgtacctcaaaaaagtaggtgagaactggcttcctcattgtcccaggatgtcaaatactaatgacataagagctcacttacgtgccaaaattcacttttatactagtttttcagtgctttaatatttgtaacttaaattttaaaactcgtatttacaaacactactgtaacttcagtgaaactgaattgtgcgattgaagctttttgcttatcatagtatttattacactacttaattcagtaaatatataaaagtagccttcaatttatttttatattattttacatgtttttacctgcagttgtgtatgtgaatttaccttggtaatcgagatgtcatgctaaggaccaataaactatcactgaacaagcaaaaaaaaaaaa

SEQ ID NO: 138 - DNA, 5542 bp, Homo sapiens
agaccttgtgacaaaatagaatgttgagtttttgaggaatccaaagtaggccagtattgccagagaacaggagaggaggagagtatggtataagcatgtccagaaataaggagaacttgaagcagaatggctgcaagatgtgggtttatcaactctgatctcaggtgatgaagaggaagatggcaaagccttgctctccacattgactcgaacccaagcagctgccgtgcaaaagagataccatacctatacccaaaccatgaggaaaaaggataagcaatctatcagggatgtcagagacatttttggagtcagtgaatctcctcctcgtgatacctgtggcaaccacactaatcagctggatggcaccaaggaagaaagagagcttccaagagttatcaagacaagtggttccatgccagatgatgcttctctcaacagtactaccctgtctgacgcatcccaggataaagaagggagttttgcggttcccaggagtgactctgtggctatacttgagaccattccagttctaccagttcattccaatggatcaccggagcctggacagccagttcagaatgcgataagtgatgatgattttctggaaaagaacattccaccagaggctgaagagctgtcatttgaagtgtcttattcagaaatggttacggaggctctaaaaagaaataaacttaagaaatcagagattaagaaagaagactatgttttaactaaatttaatgttcagaaaaccagatttggcttaactgaagcaggagatctgtctgctgaagacatgaagaaaatccgccatctctctctgattgaattgactgccttttttgatgcctttggaattcaactgaaaaggaacaaaacagagaaagtaaaaggacgagacaatgggatttttggagttccacttacagtcctcctggacggtgaccgaaagaaagaccctggagtgaaagttcccctggtattacaaaaattttttgagaaagttgaggaatcaggtctggaatctgaaggaatttttcgactttcaggatgtactgctaaagtcaagcaataccgtgaagaacttgatgccaagtttaatgctgataaatttaaatgggacaaaatgtgccatagagaagctgcagtaatgttgaaagcgtttttcagagaactacccacctctctcttccctgtggaatatatacctgccttcatcagtctaatggaaagagggcctcacgtcaaagtacagtttcaagccttacacctcatggtcatggcgctgcctgatgccaacagagatgcagctcaggccctcatgacattcttcaataaagtgattgccaatgaatcaaaaaaccgaatgagtctgtggaacatttctacagtgatggcaccaaaccttttcttcagtagaagcaaacactctgattatgaagaattactgttagcaaacactgcggcccacatcatccgcctaatgcttaagtaccagaagattttgtggaaggttccatctttcttaatcactcaagtaagaagaatgaatgaagccacgatgctattgaagaagcagctcccaagtgtcaggaagctgctcaggaggaagaccctcgagcgggagactgcaagccccaagacttcaaaggtactgcaaaaatcaccctcggcaagacgaatgtctgacgtgccggaaggagtcatacgggtccatgctccacttctctccaaggtgtccatggccattcaactcaacaatcaaaccaaagccaaagacatattggcaaaatttcaatatgaaaacagtcatggttcatcagaatgtattaagattcagaaccaaaggttatatgaaattggaggaaatataggagagcattgcttggatccagatgcttatatattggatgtatatcgtataaatcctcaagcagaatgggtgattaaaccccaacaaagttcttaaaatatcctcgagagagctgctatcatgtattatatgccaaaaagatcctacattttggtagggaaaaaacaacactgtgtttgacgtatttgttcctacagcattctcagtatttctggccctcagcagtgggcattgtaagcatgaactatggaagaggcgccggttcaccaattcaactgaagctttctcatgacttttttttttataaaagtaaaggaaagatgatgtggtccttccagaagaaagaccaatctagaatatggaactctaatcacttctagtatttcaacttcctagcagaaatgaacttggccctagacctagggataagcaatgttctttatgtagccaatgctacgaaacaaaagaggtgaaagagacccttttttatacttaatgtacatatattgactttttgagcaagaatgccagaaatagccttcatttctaccctgcaaaataatccagatctgctttctaaaatgaatcagtttctaaagtgaaacatgcaatatttatgctctgactgactcctgaattggaagaggaagaacttctgtttacagaaaactgtattgttatatatgtcaggctgtgtattgtgactatcagcattctggtgcaaatgaacttttctccatcatcgactgtggaaaattgatacttttaaagcatattcttctatgagcacaggtcctcctagtgaagcttagtttgacaaagggtgtcatatgctttcctaacctgatttgtagttaacattcacagagcctacattttctcattacggttatgatgctcagtatctttccaagtgccaggcacgggcttccttttctgatcaaacataccattttttatatttcacaactatagacagtcacttctgcagtcccaatttaaaaatgcagaactgctttatccaagaatgctgaaaaatactgttctatccaggtttcctaaactataaaagcagattttgcttttgtttgttaatcataggcatggccgagcattgtggattagcctgaggcttaaaatcagatgcatgtctggtaagatgaccactgtctcactatcaagagcctgcagagccattttccagacctgtgattgcccagaacacatagtccccacgtttctaatttggagcaaatctaaaaggtgctgagggattggacagctctgactttcctcgagactatggatatagtccttctcagattagctggaaatggggacagagttctcatttatcccagatatatacattggcttttttggaatctatagattgagattttgatgaatttatattggttttaatgagacccaaatgactctctcttaacaattcaagcagtagacaaagttgctcacaaatacagaaaacatctttttgtctacttcgcaagtctcaaaacgtgataatatttaagcccatttgtagaagaaatcttgtatatactattattacaccttgatatctatacaaaacatcacttgtattaaaatatatagataactttctggcatttagaattttgttccattcatttaatttgttcatctgagaatttttttttttgcctgaaaacccattaaaagaaaacgtgccttctgtataagtttatgtttattcctacattttattcatttttaatgtatgggtaattggtggcacatgactttacataatgactttctagactctgaaaaaaatgcttttatcatttttgcaattcagacaagggtaaacattttactttatgtaattgccacatcccaagatgtaaaacggcagtaatttatgaccacgtatggaagaaattcttcaaatagctaccttacatttctgcgtatatatgaaaactgaatgatatttctcagtgtatttccttgcatttgaatggttcaattctgttgtgtttatgtagaaaattcacaaatctgttcatttaattttttaatttgagaatttttatttcttttgactgaaaacacattagaacctatgagtaaattctgaaggttttaagatttacttcagcttgtcaccagtttcaaataaatccctaataggtaacaagtaaaatacaaattcttgtctactttcatgtggttttaaatggcagggacttcgctgagtcagtaagtataatcactctagtttattcaaggatgtgtggcaactttcaacttccatacgtatatatgtatgtatggaaggccatgtcaatactagtatcattggatataactttgattcttaatcagagggcaaattcattagagaagaatttttagtagatacacagactaatatttgtgtggaggttcttttgaccaattttattcctaagaataaacaaacccctacagttaaaatgcaaagatgcctgtcatctaagtattgaaagaatttttgccttatcaagagttgttttttaaaaatttaataaattcataaaaaagactcatatctttgcaaacaaaagaagggcagatactgggcttctacatgctatccttaagagcttctccccctcacccattcctagtgctcttggtatacacttgggaaaataatgtcctccaggagaaagtgttagagggaactaacattttaggaatgcttattcagaaaaaaatcctagagttgattcattgttttcctccatcctgcaaaagaagatccctttgttaagcagctcacttggaaatatgattcttggagtcaatgatctctaaacaaactggattatcaactatttacaacgtctatacagtataaactacctcacttgcctttcttgggaaaaaaaaaatgaatggactttaacaattgttgttacaaactgtgcctgaatcttattatttaaatcacttcagttagctttcagtgtatgtttaataatatacatttaatgatgaaaaatattttcagcaaagctttaaaaccagaaatactgtgtaactgtgatctatgtggtatactctgagagaattctgtgtcctgctcattgtcttgagtttctaaccatgtgcagatgcaagcgttcaggagtaggaattaatgtccatcttttctttcaggcattttcatctgctgtccacgtatttcacttgactgaaagctcatatgagttaaaatgtcccttcttcctagcgagcatatttcaactgttcttcataaatgtttatgtgccttaaaagactttatgttaaaggattaaatagtttctctgacaggcagtttttaactgttttccacaaataaaaataatatgtcatgggattaaaatgtttgttttcaagcatttttaacagttttacacacttacatacaccttaattaaaaatttttttctgtcagacatttaccaactattttctaaaactaatttgacaaatcatgacactagaaaacgccaatgttttatgtctttgcccatctcaaaagctaatattgattcttctgttccatcagctttcattgttaagtagaatatgtatgttgcattttatccataagaaataaagagaaaaaaactaaaaaaaaaaaaa

SEQ ID NO: 139 - DNA, 4720 bp, Homo sapiens
gggtcctggaggcctctgggcgcgtgcgcgggcggtcgctacctgcggccgagccagggagcgagagggcgcagagggcagcgggcttgggcagcatgaggcccggaggggagcggcccgtggaagggggcgcgtgcaatggccgctccgagctggagctactgaagctgcgctcggcggagtgcatcgacgaggcggccgagcggctgggggccctgagccgcgcgatctggagccagcccgagctggcctacgaggagcaccatgcccaccgcgtgctgacgcacttcttcgagcgggagccgcccgcggcctcctgggcagtgcagccgcactaccagctgcccacggccttccgcgccgagtgggagccgccggaggcccgggcaccgagcgccacgccacgcccgctgcacctgggcttcctctgcgagtacgacgcgctgcccggcatcggccacgcctgcggccacaacctcatcgctgaggtcggggcggcggccgcgctgggcgtgaggggggccttagagggcctccccaggccgcctccgcccgtgaaggtagttgtcctgggaacccctgcagaagaagatggtggtggcaaaattgatttaattgaagcaggggcttttacaaatcttgatgttgtttttatggcccacccatcacaagagaatgctgcttatctaccagatatggctgaacatgatgtgactgtgaaatactatggaaaagcatctcattctgcttcttatccctgggaaggattaaatgcattagatgctgctgtgctggcctataacaatctgtctgtgttcagacagcaaatgaaaccaacctggagagttcatggtataataaaaaatggtggtgtaaaacccaatatcattccctcttattctgaattaatctattacttccgtgcaccctcaatgaaagaacttcaagttttgaccaaaaaggcagaagattgcttcagagctgcagctttggcttcagggtgcacagtggaaattaaaggtggagcacatgattattacaatgttcttcccaataagagcctatggaaagcctatatggaaaatggaagaaagctaggaatagagttcatttcagaagatacaatgttgaatggcccttcaggatctacggattttggaaatgttagttttgtggttcctggaattcatccatattttcacattggatctaatgccttgaatcatactgaacagtacactgaagctgctgggtcacaggaagctcagttctacactctgcggacggccaaagctctggcaatgacggcactggatgttatttttaaaccagagttactggaaggaatcagagaggactttaaactgaaacttcaagaagaacagtttgtaaatgcagtagaataaaagacttaggggccacttataaatcaagaagacgtgatgatttttttcttttaatctcttttaatgaaggcatgcttgttttttaatcttaaaggagtaaaattctttttacctgataagtgaggacagggtgtggagaaaacatattaattacctcatatctaaagtgaaaatttttgcaaatccgtacttgataggattatgatattacaggagctggtatgtgatgccattctttctttttttttaccccgcaaccactcaccttcacagtagtgataccatttcttaacctggaggatacatggcatcatttttataaaatatgttagtaaacctttttgtaagccttaaatgttatgtgtatttttaaaagcttaagagatttcaaaccttatattcagaattgacacccatgagagtgttttgtggtatagggtggtaaacttgttctctaatcgtatattaattcctctaccagattgtatatttgaagccagtgtctttcctttttttgttttaagatagagcctcgctctgttgcccaggctgaagtgtagtggcacaatctcggctcactgcaacctctgcctcccaggttcaagtgattctcctgcctcagcctaccaagtagctgggattacaggtgtgtggcaccatgcccagctaatttttgtatttttagtagagacggcatttcaccatgttggccaggctggtctcgaactcctgacctcaggtgatgcacctgcctcggcctcctaaagtgctgggattacaggcatgagccaccgcacccggcctgccagtgtctttttaatacacatgtgtgttggtatttttaaattgttacagtatctagcatattgcttactctgaatattcagtactttttgaataagcaaatattgcttccttgcttggaatcatcagagtttaaagtagcttcgtggatggaccatgatcctaagatgagttttaattttgtgtttacagtcatctcttgtacaacgtggagaagaaaagatatacttactactttgcttcaggtacacataagaaaacctcttttttaaaaaaatttttatttttttacataatagagacaggggctcgctgtagcttccaggctggcctcaaactcctgggctcaagcaatcctcctgtcttggcctcccaaagtgttgggatttcaggtatgagacaccacacctgcccatttttgtttggttttttaatgggcaggttcttgctctcccaggctggagtgcagtggtgtaatcacagctcactgcagtctcgaactcctggactcaagcagtcctcccacctcagcctcctaaagcactgggattacaggcttgaggcactgcacctggccctgaccattttttaaaaaggttaggcttagtgcaaagtttaaaattatatgattcttaaaatactgaattagtttctaaactaaactagaggtataggtggacctgcttgaggtatctttgtttttatggaacatttttattacatgcctttataatttttcattgttcacaccctgtactgaaacctttttctcaaataccaactcttggctatgttaaatttgtagactttaaaagatgttatctaaattaatggtttaaatatacaaattgaaaatattttctttttagtggcaattttaaaagcaggccttaatatgggacctgcttttaaagtaaaatatgtggtactatgaattactaaattgctatataccatgtaatagtgagtatagctaatatttagtatgccttttaaaaattttggactgcttttcggttttaacaaattctccacatgtgaactactcaagaaattttccctttttaattgcctctatagcactcataagagctagggcattaggataaactagaatattttatgtttatgaatacttgtataaacttaaaagtgttttgatttcccacaatttcccaaaggaatgtttatttattaagagttgtgttgataatttaactgttacaatttcagcagttgaattcagtgaacactggttgaggagtgcctatttctaagcactgggtgtaagaagaaaagacacttgcaaaggaagagctaagattaacataatttctttggtttttctattgcttgttattattatgtaaaaactgggtggcagttcacaaggaagattgttgtaacagaagagtgacaaccaatagttttttgatcattaaatcaaattttgtaaacagtggcaggagcgtggacttaaaacaaggcttgcttatttggttttgtcaaagttttacgaaaatatatgatatatatttatactaaaactatataatccttagatttaggaaagcaatcagttaatgtctttagcacactaaagcagtattaaacacaggtacaagttggaaattgtagaaaactgaaagaaaacaagacaaaatgtctatggtagggaataaaagagtttaagatattatgtaaaattatgtgtattttcttctcttttacataaattgtttgtgaaaagtgtgctcaacttttttacaagagtgatattaacttggatttatttttcaatataatttggagaccctttgttatccaaataaaattgatgagtttctgtgcctgtaaaaaaaaaaaaaaaaaaaagaaaagaaaagacactgttgcatgccccagaaagcttgtggtgggtggtaagttctcacgagatttatttatctgagcaacattgggactgagggaacatctgaaagctaccatcttgaaaatttttgaggaagtgtttctgaaatatttaaaaatacttaagtcagtcattttgaacaaaagaaattgatacaataagtttttttttttaaggatgattgtctaattttgtaatatgttgttttttaaaaacctgtctgatggtgttttatacatttctaactttttacctgagttatctctttagtcttttggaaaataccctacacaatactaacctttaaaactatcaaatttttgttataagataaatgttatctttgtactagatagcaaccctttataaggttgtaaggtataataaactgcttatttttttacatacttcatatcaagcattttgcagtccaattatatagttgaggatggtgtattttgatatgtatgaagttaatattttcaagtaagcaatcagtctactaccatcagattataagcttttttgtaataataggtacataaaatgtgtatgaaaaatctacaataaacatgtttatctgatagcaaaaaaaaaa

SEQ ID NO: 140 - DNA, 2852 bp, Homo sapiens
gcggagcgcgggaggccagttgggaggcgcacatccggcggttacccggtgcttcataaagccgctttcgccgctggctgtcgccgcgttttgcctccgcagcagctctgggctcttctcagctgcgcgagcagctgctccaatgccccggagtggccatgggcgccccgcactggtgggaccagctgcaggctggtagctcggaggtggactggtgcgaggacaactacaccatcgtgcctgctatcgccgagttctacaacacgatcagcaatgtcttatttttcattttaccgcccatctgcatgtgcttgtttcgtcagtatgcaacatgcttcaacagtggcatctacttaatctggactcttttggttgtagtgggaattggatccgtctacttccatgcaacccttagtttcttgggtcagatgcttgatgaacttgcagtcctttgggttctgatgtgtgctttggccatgtggttccccagaaggtatctaccaaagatctttcggaatgaccggggtaggttcaaggtggtggtcagtgtcctgtctgcggttacgacgtgcctggcatttgtcaagcctgccatcaacaacatctctctgatgaccctgggagttccttgcactgcactgctcatcgcagagctaaagaggtgtgacaacatgcgtgtgtttaagctgggcctcttctcgggcctctggtggaccctggccctgttctgctggatcagtgaccgagctttctgcgagctgctgtcatccttcaacttcccctacctgcactgcatgtggcacatcctcatctgccttgctgcctacctgggctgtgtatgctttgcctactttgatgctgcctcagagattcctgagcaaggccctgtcatcaagttctggcccaatgagaaatgggccttcattggtgtcccctatgtgtccctcctgtgtgccaacaagaaatcatcagtcaagatcacgtgatggcaagatggtggctggcttctctgcttatcgcccctcatgcagtgggcttcctttgctaggaagacagccaagggagttcgaatagttggggtgtgggctatcttttcaaaaatctatttgctggggctcttaatttctttagtgttctttgtatgtagggatttaaactttgtcatatggtacaaatattccctgcccccctgcagtttcccatttgtctttcagtatgttaatatttttgtgccatactggttttaaactttcatgttgtcacatctgttaatcttttctttaggatttctggattttgtgtaatttttaaaaaggtcccctcctcctccctaatgtgtctgtggaccacctggattccactgtacaaggggaaaagtgtctattcctttcccaaagatggaaaatggagggcttagggacactagatgcatctttctcagcatcacttccagatgcagtgacttgttgggctgcgtccttaatggccatggcagagcagtcccttgggggatccagccctgtacaatgcatctcttcctggagaaagctggcctgctccagaccccaccattcccaggcgcccttggagtggactctactgatgacagacagaccctctgagagacaagaccctctgactctgtgatggaagatgccagagattttcctttggggtaattgtccttaaacaaaaccaaacagatgaaacacacacaggacttgtggctaaaaaggctagtttttcacttgcatttctcaactaacccaggttttacatgcatctgtgaatccttttactactacctctgtggagagatggagagacttcagataaacgtgaagctaatgagtaaaaccctctctgccaaaacctacactccactttaggcccttcttgaagatgagcacaatttttaaatactgagcacaatttttaaatactgacatcacttcctcttccccctcccaccccagctcagcagcctcaaatctacagagaagaagaattatggcatgaacattcccacagacccaccatctttaagacttgacctctgtaagtttaccaaagggctcctcacaattgtggtgggggttctggttcaaaatttggagcaaacatgaagtttttggaaacgttttctcatttgaagcctccagtatgctgtactattctggaaattaccttcaagagtctcacttcttgtttctgttgtgttttctgtgggcatcatgttcttcacgcttgcagtagaaggtgctttctcggtttcccagagtatccaacggctcacctttctcaagtgctggcagtagctatgcactcacgggctggtttgggtcgctggtgcagcagcgcaaatctgttgccttctgaatttttctcacctaatgtgacactggctacaatgaatcttctcttcatcgggctgaatgaaagattcaagaaccatcttcaaggtgcatggtgggaattatcaacctcagggatactcattttaactcaggcgtgtcctgctttgtaacattccattgttgggagagggcaggacaggtgtgttcttctgtgggcaggagtcatgtcactgtcctacatatgtaagagttgggaaggtgacgatttttgacacatccaggaactcttactctagttagaatttgtaccagatccaaggtgaaaaccccaataagcaactgaatttagagtttaaaaatgaatgactttatgctacatctgtggttatcaaattatataggttgttgagaagcagaacgctgtttgtagtaagaaatctttgtggaaccccagtgtgtgaagtaaattgtatgttattaaatttatttaaggtt

SEQ ID NO: 141 - DNA, 3218 bp, Homo sapiens
atgaagccaggagcgcctcaaagtccagcctgctgttgaccaacactaacagatgagcaaggagctggcagcaatggggcctggagcttcaggggacggggtcaggactgagacagctccacacatagcactggactccagagttggtctgcacgcctacgacatcagcgtggtggtcatctactttgtcttcgtcattgctgtggggatctggtcgtccatccgtgcaagtcgagggaccattggcggctatttcctggccgggaggtccatgagctggtggccaattggagcatctctgatgtccagcaatgtgggcagtggcttgttcatcggcctggctgggacaggggctgccggaggccttgccgtaggtggcttcgagtggaacgcaacctggctgctcctggcccttggctgggtcttcgtccctgtgtacatcgcagcaggtgtggtcacaatgccgcagtatctgaagaagcgatttgggggccagaggatccaggtgtacatgtctgtcctgtctctcatcctctacatcttcaccaagatctcgactgacatcttctctggagccctcttcatccagatggcattgggctggaacctgtacctctccacagggatcctgctggtggtgactgccgtctacaccattgcaggtggcctcatggccgtgatctacacagatgctctgcagacggtgatcatggtagggggagccctggtcctcatgtttctgggctttcaggacgtgggctggtacccaggcctggagcagcggtacaggcaggccatccctaatgtcacagtccccaacaccacctgtcacctcccacggcccgatgctttccacattcttcgggaccctgtgagcggggacatcccttggccaggtctcattttcgggctcacagtgctggccacctggtgttggtgcacagaccaggtcattgtgcagcggtctctctcggccaagagtctgtctcatgccaagggaggctccgtgctggggggctacctgaagatcctccccatgttcttcatcgtcatgcctggcatgatcagccgggccctgttcccagacgaggtgggctgcgtggaccctgatgtctgccaaagaatctgtggggcccgagtgggatgttccaacattgcctaccctaagttggtcatggccctcatgcctgttggtctgcgggggctgatgattgccgtgatcatggccgctctcatgagctcactcacctccatcttcaacagcagcagcaccctgttcaccattgatgtgtggcagcgcttccgcaggaagtcaacagagcaggagctgatggtggtgggcagagtgtttgtggtgttcctggttgtcatcagcatcctctggatccccatcatccaaagctccaacagtgggcagctcttcgactacatccaggctgtcaccagttacctggccccacccatcaccgctctcttcctgctggccatcttctgcaagagggtcacagagcccggagctttctggggcctcgtgtttggcctgggagtggggcttctgcgtatgatcctggagttctcatacccagcgccagcctgtggggaggtggaccggaggccagcagtgctgaaggacttccactacctgtactttgcaatcctcctctgcgggctcactgccatcgtcattgtcattgtcagcctctgtacaactcccatccctgaggaacagctcacacgcctcacatggtggactcggaactgccccctctctgagctggagaaggaggcccacgagagcacaccggagatatccgagaggccagccggggagtgccctgcaggaggtggagcggcagagaactcgagcctgggccaggagcagcctgaagccccaagcaggtcctggggaaagttgctctggagctggttctgtgggctctctggaacaccggagcaggccctgagcccagcagagaaggctgcgctagaacagaagctgacaagcattgaggaggagccactctggagacatgtctgcaacatcaatgctgtccttttgctggccatcaacatcttcctctggggctattttgcgtgattccacagacctggcttcagtgtagacagattaaacaaagcccaagcctgtcagccacagaaacaggctctcctcttactttgctgtctaaactggagatcacagaagtcaagactgcaagctcccctgaagagaatccaactcaacctgcacacttgacaagtggagaaacagaagcccagagagagcactgggtttgttcaggaccacccagaaggtgtcacacggggtttccccactctttctgatatattgccttacagacctacctcaaacacactgtttccaccctcttcttgaatgtattcagtagcctttactgaatgtgtgtcttgagagtagaaaaatggaggatacaagaaaaggagcaggaagaaatttgcaaaaatccaagagcacctttgctcccccttatcctccttcctcttcccctttctagttcccctacctctctatctttctattctcaccaataatctctttgttgcatgaatttacccaggagagtcctatatttccattggtggctccacagtggtggctgtcagacccgaaggggtggggagccaagggtggactttaagcatggtgacagatggtattttgggcagaaagctcttagacaatggactatccaaagcactatttaaattctgcctcttcctactctctaacccaaatatgcacaaactctctatggccttgagaagcagttggagagacatgacttgttaaaacctcaaggaatcaagacatgttactctgtatttaagggtaagccccacagcgggcagcacaaacagcctgggagccactgtgcctgtgcttctctgtccttctccctttgcttgccatgaatccgcataccttggaatacactgtgaccccagttaagtgtcccttcgccaggaagctgccgcaacgtccagacctgggtcaagttcccactcctgctcccatagccttgacctgcttctgtcacagcactgatcacactgagatggaagactccagggggcaaggaccaagggccatatcccaagtgactttgtacccagaaaataacagctgttcaataaatgtgtattgagttaattagttaaaaaaaaaaaaaaaaaaa

SEQ ID NO: 142 - DNA, 4490 bp, Homo sapiens
aaactttacccggcctaacagctgaggcgctttacggcgacggcggctgagtgagaaccttggcggctgtggaggctgccgcggctgcgaaggaggcggcggcggtggcggaggaagaggagtggcggcagcggcggcggggacccgtgcggggatggcggaggtaccgcctgggcctagcagcctcctcccaccaccagcacctccggccccggcggcggtcgagccccgctgtcccttcccggcgggggccgccctcgcctgctgcagcgaggacgaggaggacgacgaagagcacgaaggcggcggcagcaggagcccggcgggcggagagtcggcgacggtggcggccaaggggcatccgtgcctccgctgccctcagccgccgcaggagcagcagcagctcaacggattgattagccccgaactgcggcacctccgggcggccgcctccctcaagagcaaggtcctgagcgtagcagaggtggccgcgaccacagccacccctgacggaggccccagagcgactgcaacaaaaggagccggggtacactcgggcgagaggccccctcactccctctctagtaatgcaagaactgcggtccccagcccggtggaggcagcggcggcgagcgatcccgcggcggcccgcaatggactggccgagggcaccgagcaggaggaggaggaggaagacgagcaggtgcggctgctgtcttcgtccctgaccgccgactgcagcttaagaagcccttcgggcagggaggttgagcctggggaggatcggacgatacgatatgtccgatatgaatccgagctacaaatgcccgatatcatgagactgatcaccaaagatctgtccgaaccctactccatttatacctatagatattttatccacaactggccacagctgtgcttcttggccatggtaggggaggagtgtgtaggtgccatcgtttgcaagttggatatgcacaaaaagatgttccgcagaggttatatagccatgttagccgtggattccaaatacaggagaaatggcattggtactaacttggttaagaaagctatatatgccatggttgagggagactgtgatgaggttgttttggaaaccgaaataacaaataagtccgctttgaaactttatgaaaatcttggttttgttcgagataagaggctgttcagatactatttaaatggagttgatgcactgcgacttaaactgtggctgcgttgagaaactgacatcaaggaacaactatcatccgcacagaatcgacctttgcatgcaatgcaatttgtacagaattgctttgcaggtggatttagtaatttccatgcagctcttacctgtcagtgtctcattgagtgtcgcacaatatttgttgcactttggcatggcacatttgttctgaattaaaagattgttttaaacttcaggagttcttttggtaccaacaagatgtgccagttgatagccaagatttatgtgttcatttgcaaagtctgctgacaatgttatttacacagtgatcattttatcacagaaccagtaagtggaacataatttttgttccttaaaaaagccaatgtggattgtaaaagtctttaagtatactaacatttcacacaaaacctgccctagttttctgaagtgggtgagggagacgcttcagttttaggttttattttttcaatattaaattttccattcttgaatattggtacctcagtgattagtgaatgaaaaaaatgtagggtgggtatgtcttacaatgagtaaaggtaacaattaaattttgtctgccagtgcctgtgtagataagtatatttgtcttcatctctagtttttgaatgcatgctatcttttccttttctttaaggcctttgcaagcaaacttttgtttttatttaaattctaaatttgataaattatttcagatttttataatttggatacttttttcaggtgaatgaaagaatggtttactttagaagtccctttttccttacagtaacaagttgaatctacttggaaaattgagaaatggctcaaaagagataagaaaagttgatggagccgggaattgctggggtttagatgcactttttcttttgagagtaagggaagttttggaaaagaatagaaaattagtgtaagttgatatgattttatttaatcaaaattactgctacgctgcgaagaacagcttttacaaagtagctgaatttgtttttcccacttgatttggattcacattgctttcatttcttaaaatgcttcacttcaggttcttggtcttggaaataaatttcaaggtgcattgtatccattttaagctgctttattttattttcacttgtatgagcaaattcttgggggagctttgcttttcttctgccagaaaaacaaaagggggaaatgaaaatcttttttggaatgagttctgtgggttttcttaacagccaccatgtttattagttacattgtgttttggccaatcagtgcaatgtaacaaattttacagttaattgctttcaattgagtcagtaaacctgtgatagataatttatttaactggaaaacctaggtacccataagaaaaaagattcattctctgtgaaaactgtaggaatctgttgttgttttcatttgaatatgctctacttctgctctagtatttggtttggaatatattttgtggctctaattactgtatttttaaaaaccctacctccattaacagttggtaaaggccccttttcaggaaagtttgttgctttttttttttttttaaaggaaagctgctctttgctcagtatagtgttttgaaagtgaacatagtaacaaatactttaaaaataaagatacacaatttatatttgaaaataaaaactttctgctggtgggattatttatagttctttatttttaaagaaaatgttttcctttttatattgctcttgaaagtttaatgagcagaatacaatactggttataataaaaatatggtaaccacacagtactcagcctttcaatatgtttttggtcaaacttcatttaggcactagcatttagaagaataccaatcacagtgatgcttttgttatttaatatgaaggaaatggaactaaaacatttatgtcatcaaattttatttcacttctttatatttgacttgctggttgatacataatggttgatgaacatatatttgcttaaatcactaatagggatggttgtaaagtagatagatcattggttcaaccattttagtgtttttgccagattgtcaatgaaaccatcatactgaccttttcctccaaaattgccaaattgactgaactggttgggtgtttgtaaagatgacgttaactgtgtgactaaaaagtcagatggttgccatattgtttggaatatgttgaatgtcagtgtatgccttatgtctttaattgggtatgcaaaaaaatttttacttaagtagattaaaattttaacctctagcatgaaaacccagcaccaacactgaaagactccattcaggttgaagtagcctcaaacagtaatttactttttgataataggctgttgtttttcttaaataagcttaaaacaattctatctgaaattggtagcatgggttcacttggctacaactgagcaaaatagatgcaactttcttttaatggggtgctgcctctttaggactgactgtactatccactgacactggtttggcagttggtactgctgaacatttttatacatgctaccatgaagctatatatgttagtattgaagaagctaacgggtatactatcatttttgatgtgtgggctgattataatttcctgtatttcctgtacattgggatgaaactactttagcaaagtccacagatcagaaaccagacggtagtttttgaagttgaaaccagcaaaataagaaaaaataaaaaatcgattttaatattttctgcctctttcccaaattacccttcccacttgctcgacaaatctatgtaaagcagtttgttttttcatgttttaactttaccttgccctgtgttatggtactggctgacatgtctaagactggatgtgtatatttattatggtgtctaaaaatcatgaagttcatcacttttcaggagtatagataaaatcaaattggtagtacatcagagttacttttcagtgcaccatgacatcactaaaatgagtgctgtaatgttacagggctttcaggtttgtaaaaacataaccataaattatattgacgtcagatatgagttgagtatctataaaatatcacgtgtatctcaaaatattggactgctgtttgactggatattgctgcataattttcttctattgtcccatatccttttggagagagatttaatgggatttgaaatgtgcaagctgtctaaataagatgcagtcaaataaagtatggttaagttgtgaaaaaaaaaaaaaaa

SEQ ID NO: 143 - DNA, 3569 bp, Homo sapiens
atactttggtggccactgaaagtcagcggcgcggactgccctgagggcgggaaagggtggtcactgggtcagcccgaagcacctgacatgagggcggggaccccgaaatgcacacgaagtccggaactggtcttctgtgattttcattcgccctggtctctgttccctttcgtactcaaagctcgtgcatccagggaggggaaaccggagatagggtcttcgggccccgggcagaccctctgtgccgctgcaaaccgttgcagcctgaggctgtcaggtcctcccccagacacctgcggaccctccctctcctggcttcccgtctggtcatggcgagattctgggtctgcgtagccggtgctggcttctttcttgcatttttggttttgcattcgcgtttttgtggctctccagttttgaggaactttacttttgcagtttcctggagaactgagaaaattctttaccggctggatgtgggttggcctaagcacccagaatattttaccggaacaacattttgtgttgcagttgactccctcaatggattggtttacataggtcaaagaggggataacatcccaaagatattagtgttcacagaggatggatatttcctacgagcctggaattatacagttgacacacctcatggtatatttgcagccagtactctatatgaacaatccgtctggatcacggatgtaggaagtggattctttggtcatactgttaaaaaatacagttcttttggtgatcttgttcaagtcttgggtactccaggcaaaaaaggcactagtttgaatcctttgcagtttgataacccagcagaattatatgtagaggacacaggagatatttacattgtggatggagatggaggattgaataacagattgatcaaactgtcccaagatttcatgatcctttggctgcatggagaaaatgggacagggcctgctaagttcaacatacctcacagtgttacacttgattcagctggtcgggtgtgggttgctgaccgaggaaataaaagaatccaagtatttgataaagacactggggagtggttaggagcatggaataattgtttcacagaagagggaccttcttcagtcaggtttactcctgatgggaagtacttgattgtggcccagctgaatcttagcaggctctcagtcgtagcagcacccccagtgggaagcattggggagtgttctgtgatcagcacaatccaactagcagatcaagttttgccacatctcctagaagtcgacagaaagactggagcagtctatgtagcagaaattggagcaaaacaagtacaaaaatatgtccctttgaatagctatgttccttcatttggttcataatgtttctttcctgggaatatttcaagtggcagttcagattctcaattcactaagtgcttaaaaatgatgttcaagcacaagaatttatttttctagtataaaagatctagtatcagaaagatttgtttttgtatcattaagaatcttatattttgttgccctcttgggacttagttttatttgtaagtgcataaggatattttaatgaaaggaaagtaactaaaaaatggggttgggaagagggactaaggtggtaacctcattatttgccctggtagactgattctccctgggtaaaaaaaatgggaataaaaatgagcttgcatgataatttattaaatttcatgtgaagaactccagacctccagattgtgcaactaacataaaatgagctgcttgagagattgtaaataagatgaactattgattaatttgagtacccacagagtgctgtgtcttgacgacttaaaaatgaaaaagcaggattgccttttgagtagcttgcagtctagtggggagacaagcaggcaaacagtcacaacacagcaaaagcgaccttggagcatagtgggacttttggagtaggagtgctgcatttgactgagggaatcatggatacttcgcaggagaagtgaatttgagctcagacttgaaaactgaggaggagcttaccaagggacaaggaggagaaaacaataatttccaagtaaagaaggtataaaaagttagaagtgtactgtaaactttgataggcttttaggccttttttaaagcccaacttggcttctgtccattacctataagatatttaatgtcagtcagcctttaaatgtaggaataaaatggctggcatctaagcactttagtaaaagaggtttttacaaataactaaggattgtagagcttccttctctttttttttctttttctttcttttgttttacatgaactcaacttattcctaacatttgtctacctcaaagaaatttcaagattatttagataacatggatatgtgccaaatcctttgagctgttaagatgataatttcctgctttcctcctacatcttctcctcccactccctcctttggtgtgaatattggcttcccaattaagacctttttttttttttttccagtttgttttagcttattataggttttggaggaactttgccattttgtaatctttcaaatcattcttcacccttcctcacatcagcttcctgcttttcccagtgttttactgtaaattgtgtagcatatgacaaatcttgagctgactttcctcttcacctgttatggctggagtattttccagacctgaagggactcacacttgttttgatacttggatcacatctccgtgaggttaggaaggtaaatctaccaacaggaagccctgtactctgtattccaaggccattggtaaatgtgttggtgccactgatcggactgtatgaccttaaacaagtcaccttagttttcagtgaaatgggaatatcattgtctcctctttcatgaatgctgtgagaatcagatgtgcaacaggtacagacttgccctttgaaatctatacctctggatacattagaggcattttattaacaaaggcccttctaaatgtgctatttatttgacaataactatcagatttgccttaattttgtgtttatagcatttatcaaaacgtatcctcatagactttatgcagattaatatggtcaattgatttggataaaagaaagtaatttcagggtttgtttttaagccaggacaagaagtgcaaatgcctctttgaagcaatttaggctaaactgattttgaaatttcaaaatgttttattttactttgttttattaagccaggacaagaagtgcaaatgcctctttgaagcaattcaggctaggtaaaccgattttgccatttcaaaacgttttattttactttgttttatatcagagtcttataaaacctgctgcaaatatttctgaatgtctttgtaaaagtgtttgttagtgtacctgtgattatagtacttcacttttttcctttggattaattggttaaatgaatgagaaatgtgttatgttttttactaaaaagtataaattaaaattttggaaagaaaaggcaatattatctggctccccaattaaagtttgattttattgtcacaaaaaaaaaaaaaaaaa

SEQ ID NO: 144 - DNA, 7616 bp, Homo sapiens
cggcgggtggcggcggcccccagcacggccggtgcaaggcctcgggttaagcggcggccgagcggggctcggcccggggtgctcggggagctcgccgcggcgggcagcaggaggaagcggcggcggcgcgtcccgagcggtgcgcgccatggcgggcgggccccccaaggccctgccgtccacggggccccactccctgcgcgacatgccgcacccgctggccggctccagcagcgaggaggccgtgggtggtgacagcacgcccagcccggacctgctgatggcccgcagcttcggtgacaaggatctcattttgcccaacggtggtactccagcaggtacttcaagtccagcttcttcatcttcccttctcaacagacttcagcttgatgatgatattgatggtgagactagagatctcttcgttatagttgatgatcccaagaagcatgtgtgtacaatggagacttacatcacctataggatcaccaccaaaagtactcgggtggagtttgacctgccagaatattctgttcgtcgaagataccaggattttgactggttgaggagcaaactggaagaatcccagcccactcatctcattccccctcttcccgagaagtttgtggtaaaaggtgttgtggatcgtttttcagaagagtttgtggagaccagaagaaaagctttggataaatttctaaaaagaattacggaccatcctgtgctgtctttcaatgaacactttaatattttccttactgctaaggacctgaacgcctacaagaagcaagggatagcattgctgaccagaatgggcgagtcagtcaagcacgtcactggcggctacaagctgaggactcggccgcttgagtttgctgccataggtgactacttagatacatttgcactcaaactgggaaccattgatcgaatagcccagcggatcatcaaagaagaaatagagtaccttgtggagctgagagaatacgggcctgtgtactccacatggagcgccttggagggtgagctggctgaacccctggagggtgtgtcagcttgcattgggaactgctctacagccttagaagagctgacagatgacatgacagaagacttcctacctgtgctcagggaatatattttatactctgactccatgaagagtgtattgaagaagagggaccaagttcaagcagagtatgaagccaaactggaagctgtggctctgcggaaggaagaccgccccaaggtaccggcggacgtcgagaaatgtcaggatcggatggagtgtttcaatgctgacctgaaagctgacatggagaggtggcagaacaacaagaggcaggacttccggcagctactcatggggatggctgacaagaacatccagtattatgagaagtgcctcatggcgtgggagtcgattattccactactgcaggagaaacaagaggccaagtaaagttctttcttgggacggagactcttctacctacacagggcctggcaccctataccggaatgtccctgcagtgccagagacgcagtgctgggaaaacaaccacagaaacatctctcctttgtgtatttttccctcccccacctttcaccccacagtggttttcaattagtatttattccatggtggagtctgtgaggctagaatatctctcagcaagagcagcatacctccatgttgtgaaggcatctgttcagtgaagcactacgaaaatttgaaaccaagggacaagacaacctgcagctgacgctctgacatttcatgacagtttcctctttagggacagctgagttgccagttgtgggagagaacccggggcctgcttttcaaggatgaggaggaggcaggaacagaaggcagctgctgctttctgtggaaacctggcccctctggaattggcctctgtgggcattgactcgtcttggcctaggaggcattggtgcctccctggcaagtccttaacgtacagtacctgtagctgtgagtgtggcctgctgcctgcttgtgatgagtgataccgtcttactgtttctgtttcacatagggacatttaaatcaatgtcaatgtgcgtccatgcttgagtgagcaagccagcgtccttgtcctcctgcaatgcctttgggaagctcaggggaatgctccccaagcttgtttctgacactagaatgcaacagattggaaactttttgtgtaaaatgaaaaaaacaaagtgctggttttttttttttttctgtgaaggtcttcagtgttttgcttgttcactgtcatcagagcagggattagacctgttagggaatatctattgtcttgaagtcagagtagctccccattgttgagatcagtgggcatataccaagctccacccccagtgtcagctttgtgcaatttgcctttacctcaccaaaaatacctactttaatatttcctcctgtgtcctctgaatgtctgggcgagcttttggtgagagggctggtatgtcatgttgttatgatacagtcgaaatttgtcaatgcagtgtgaatgttctacataaagtgctttaacccttaacatttcctggtcaggaaggaaaatcagtacctggacgggcctcgaaaatgacaaatgcaacagcgagccctttgtgtccagctaagctaaagtctcctcagtgtgcagccagattcctggggactgctgagtgtggttacaggctgcatttcagacaatgaccaggtttacttttcagatcacaaagcaaacagtcaccaaggatctgtcttccaactcttttttttttctgctgaaatgaagctacatgtcatgtttgtgttctttcatctgtggctcatccctgtaaaactacgaatctgagcctcaaataagcagtagtttttttgttgtttatttttaatgaaacagctgtgttaaggcgctgcttcagatgcaagttcacctggaaatactggtcagcgggcagcacgtcaaggtcacttaagcccacttttaactgcaggtcatcctcgcatcagccaaggctgtggtgctgttgatgccgcagttggacagcataggacggcttggttctgtttcattgtgtttgacaatgttgcagtttaaatgataatgtttaaatcaattggtacttgcctgtagtgttaaaccctatttgtgccattctcaagtcctttgatgtgaattttcagtttggtacagttagaaatgactcattgatgcggacaggtaagaacaacccatgtacccccgagtgattgcatgctttattctacctctaagccatcgtgttgacgtgggtatggacgcctgggtctgacctgacactgtgctgggagaatcaggatgtgtgtctaatggcgagctgacagccctctgctgatatttggcagaaggcaccagaccagcccagcagcaaatgctcatctttgggaacataggaagctttaccttggggaaggtatgctttacaaatgtccagtgtaatgaatgtttggaaaaaactggagttacaggaaaatgaaatctgactatctgctagttgccaaaacccagaaacattcctgtgtaatggttagttgggaaagaaggcagcacttgaaaaaatttaccaggttcctcactgggagatgtgggaaggggcgtgggacgcacgcggtcactccctctcctagtgagaggcagatggctggctctgaagggaggcaggcaccgtgggatttgggcttgctctgcttggtccccatgtgatgccctgtgctgtaagatatcagaaagacctggaacaaggcaaactttatgtcctcctggcatgttattgataacagagccaggaagtccagtgtacattacagattttctgggagaaatagtccttccagagaaaggattccttcccagcctccaggctggtgtctcatgaggtgaggaggctggcccagaaggaaggggacgttaggtggtgaagcaggctcccctgggcctctgagggccagcagtcccaaccatttgcctcttcgttttgaccaagcacaaaagagatattccctagaagtgtcacacggaggcttctgtgccaaagactgccttgtagaggtctcatcacctcacacttcttgacttcacaaaattgtggccctgagatcagtactcctctcttaagtatttattattattattatttactttacctcaagcagacagacataggttttgaggcttgaatacatggcagtggaatacaaggccctccctagcagccgccccaggcctggaaagtgggagatttcattcgcccgggttaaaaatccagaggaagacagaagagaggagtcctaggaactgagcagattttagagacgcaaatgatgtttaagagagccttgtgatttgtagcaagcatgggcactgctttttcttactaatgtggtagatctacacgaacattctaggctgttctgctcagagcgaggaaccactgctcctcaatggggagggaacataccacccagccaggcttagcattgggttttatcctttaataaaagttttataatgaatcctgttcaccttaaagtgtgattatggagatgattggctccatattccaccacgtcattccttcaactcaccagacacctttctttagttgaaataaaccagcatgacctggagatcatggtgactgtaagctaagtctgttttcatgccagatttcagccccacccagagtgtgctctagatgttgttgatttgaatggttttcccagttcccactccacatggggaagttgaatgaatgcacacctgctgctcacttcttgtgaggctgccttttgtgatcaaataacaggaagttctgctttagaggagggcacgatgaccatgtggcagtctgcaagtggaattttgggatggcagcccgaggaacatccagagttactgtgtgacttggtcctgccatcgttagctttgaaatcacaggcattgggctctgttttgacaccattcattggactgcgggacagtcattctttacgttctctcttgagctggtgagagaggaggaagagggaagtcaagagcaacctccaaggcctatgtcagcctcttctccttgggtcttggggtgggttagaactgggttccagtctggccagatgggttgctggctgcactgagggtgattcttctcagaagatgggctgcctgtggtcaggacagggcataccagtctggactccaccttcccagacacctactttaaggacctgtggaaactgggtgatccaattatagggctggggcaaccctgctttggccaccctcatttacaaacttaggttgggagcttgggtttcctgtctcacttccaaaagccttcaagatggcagcagatggacacaccctctcatttcttgtgtcttgtctgtcagatggcaggaggcctgtatcagtaaatttgaggaaaatgttctctcctgggccagcctcacagcttgcgttgggtgtgttggaattgttctcttcggccttgttctgccttgtgatcttttcaattcagtgaataaaccaggaatccattttttcaccaacccaccctgtagattgtcagctttttgtttgagagatgcctggtctcacagttacatgtatcagagtgtgtgtaagttgtctgtgttagaaaggttggggtgggggctttgttgcaggggattagactgttctttcttcatcataatttgagatacatcctgagtatgactgtctaaccctttctgtgtggcagaaaaatatgttttccaggtagtttttactactacagagagtctgtaaataagtgctttaaaaaaataacaaaccaataagatatttgtctcctatataaacattctgtgtatttagcacttgaaaatcaacaaatccagaatttaaaaaaatgccacagacttttcaaagcccaactctacttttttgagaatttgtccgtacctactaatatgccttattcttcttcacctagtgttttaaaagtcctgggtagaaagagttttagaaatgtaatcagttgttcagcttcaataatatagagatctaacatagtcagtcctcaggccccctaaagaaacaagcaagaaagtgagggccatcactagggttggctttggggaggggaaaactaaggactgcttttgccaaatgatatttttgataatgtaaggaaacacagggaccacaaaaccttttttttttttttaagtgtgaaagattagtgccttttggcatacttttgattttagaggatatagtatcggcattgacaaatcacgtagaaacaaagaatgctatagatgacaacagtattaaatgttactcctgattctgcagaacagcttttgaagatactggggggtatcttcaagcctcagagcagcttgtttcagatagaaattctctatgggttgaaatgccaaaaacagaaaacatgatgttgactcatgtaatttagtccattttagcagagcctttagtgttaacaccagtggcgaggagcattgcatattctctgtcagcagcagcactcccacaccaggtggttctgggctctctgtaggctggtcctagtaggtgacacccagcaacacccctgttggacaggattgattgttcgcagtcttagaccaacacttcagtcagaaatgttactgggaggaggaaaggaaaatcactttttttcctccatgtggaaatgaggagagaggaaagtggattgcaaaccaaaatgtgagtcagtgtgatgaagcagtggctctgtcatctcggcctttatccaataacaaaccagcatctcttaaaggcgcttttggcctagacacccctgaagtttggatgaagtctggtggattccctgtctgttgtatttctgtgtgcctgttcccttcattgctgtgagttgggagtgcattgagagatgatgtccatctgatatattcctgtgaaataaactgccagcaaactttctaacttgtattttaactgttaaagaagagattaaaaacttcggctttggacatgtccacattatggactgtcatcttatttttaaaagtcattctttacgtttaaaattttaaaataaaaaccttctgaggtattgatgtagtccaccgtgtaaatgttaccttctctccatgctgccattatgccaaaacaaaagctgtgataaaaaaagtgcttgagagagtgtgttgataagaaagtgatttatttacagatggaagtctttgtttcatgaagctaccaaactttaaaaagaatgtcacccttttttttgtttgttatggaaaccagagattgtaaaatggaaaaagaatcgtttttttgttgactttttgatgctggcacgaggtttttgtccacttttttcatatatctgtgtataaaaaaattgttgtttactatggaattagtattacattttgaggtaaacaaaagaatttgtattgcttgataaatattagcttgtaaatttaaagtttctttacttcaattaacttaaaggaccaataaacccataaaagatgctttctttaaaaaaaaaaa

SEQ ID NO: 145 - DNA, 4711 bp, Homo sapiens
agtgagctatggggacactactgcactgtagcctgggcaacagagcaagaccttgtctcaaaaatgtatatatattttgggctttttttcctaaaacgggaactacaacagcatatttgcgagctgatgagagtgacccagcagagagggaaatggatcagctctgttgaagatgcactggacaccagaacacgcccagcccctcaaccagtggccagagcagcacctggacgtctcctccaccaccccgtcgccggcccacaagttggagttgccccctgggggtcgccaacgctgccactacgcttgggcacacgacgacatctcagccctcactgcctccaacctcctaaagcgctatgcagagaagtactctggggtcttggattctccctacgagcgtccggccctgggcgggtacagcgacgcctccttcctcaacggcgccaaaggggatcccgagccctggccagggccggagccaccctaccccttggcctcactccacgaaggcctcccaggaaccaaatcgggcggtggcggcggttccggggccctggggggctccccagttttagccgggaacctccctgaacccctctacgccggcaatgcgtgcgggggcccatcggcggcgcccgagtacgcggccggctacggcggggggtacctggcgccgggttactgcgcgcagacgggcgccgcgctgcccccgccgcccccggccgcgctcctgcagcccccaccgcctccggggtacgggccctcagcgccgctgtacaactatcccgcagggggctacgcagcgcagcccggctatggcgcgctcccgccgcccccaggcccacccccggccccctacctgaccccgggcctgcccgcgcccacgcccctgcccgcgccggcaccgcccaccgcctatggcttccccacggccgcgccgggtgccgaatccgggctgtcgctgaagcgcaaggccgccgacgaggggcccgagggccgctaccgcaagtacgcgtacgagcccgccaaggcccccgtggctgacggagcctcctaccccgccgcggacaacggcgaatgtcggggcaacgggttccgggccaagccgccaggagccgcggaggaggcgtcgggcaagtacggtggcggcgtccccctcaaggtcctgggctcccccgtctacggcccgcaactggagccctttgaaaagttcccggagcgggccccggctcctcgtggggggttcgccgtgccgtcgggggagactcccaaaggcgtggaccctggggccctggagctggtgacgagcaagatggtggactgcgggcccccggtgcagtgggcggatgtggcgggccagggcgcgctcaaggcggcgctggaggaggagctggtgtggcccctgctcaggccgcccgcctacccgggcagcctgcgcccgccgcggaccgtcctgctctttgggccgcggggcgcgggcaaagcgctgctgggccgctgcctcgccacgcagctgggcgccacgctgttgcgcctgcgcggcgcgaccctggctgcgcccggcgccgccgagggcgcgcgcctcctccaggccgccttcgcggccgcgcgctgccgcccaccctccgtactcctcatcagcgagctagaggcgctgctccccgcccgggacgacggcgcggcggcagggggcgcgctgcaggtgccgctcctggcctgcctggacgggggctgcggcgcgggggctgacggcgtgctggttgtgggcaccacctcgcggcccgcggctctggacgaggcgacccgccggcgcttctctctccgcttctacgtggcgctgcccgacagcccggcccgcgggcagatcctgcagcgggcgctggcccagcagggctgcgcgctcagtgagcgggaactggcggcgctggtgcagggcacgcagggcttctctgggggcgagctggggcagctgtgccagcaggcggcggccggggcgggcctcccggggctgcagcgccccctctcctacaaggacctggaggcggcgctggccaaggtgggccctagggcctctgccaaggaactggactcgttcgtggagtgggacaaaatgtacggctccggacactgacggcgcgcgggggaggccgcgggagccgcagtccctccgtccccgccgcctccgcgtgggagggatgtcactgactaaacccggctggcaggggctggagtggtgaatgtgggatcggggacaggaggggtctgccggtggatattttttttttcgtgggaaggaaaatgcttctgccaggcagatgccatatgcgccgtgtactcaggtttttcctatttattgtggactggaagctcgccatctccgcccggcagaccgggcagatccggcatgggctggcacccggggccttaagaactcctgctctcttgccacaacgcttttgtctcctcgctatctgaatggcaccctccttctccctcactctctccatcccattctctgcattctcttggttttctctcccttttgctttgtcgctgacacccctgcccaccccatgctggccctgtttctctcctgcccctccctccccagctctccatccctcaccctctgtgcttctgtctccatccctggctctccagcgtccctggccttttggtccctgagctttaatgcctttccctgccttctgttcttatttggactgcagtggccctttgcaggagctctggaggcccaggggctgaggaggagggttacccctctacccatctgaaacctagggtctagggggatcaaggaaaaaaagtccccaaagaaggggaattttttgtttgtttttgaggggagatcccagaaatgtagcttgtttcatattttagtcttcttatttttgtaaaatgtgtagaatttgctgtttttctttttcttttgacaactcaggaagaaactgacctcagaaagaatgttagactttggctgctctcctgtgtgcccctcacacctgccccctcccccccactccatccaggggaccaaattctcccagacactcaaaaaatgagacttacggggaaggggagaggaagacccagaggcctcagtgaaaccccagctattcctggtcagaagcagaatgtattcctaagggcttcctccccagggccgaggcctaggcatgaatgtggggagtgggctgtggggtttgagagaagggaggccttattcctctcctgctgctccccaccccctgccccacccaacccctccgctgagtgttttctgtgaagggctatccagagttaggatgcccttgcccaattccttcctgagacccagaaggtagggtgggagggcccaaatgggaaggtgacctaagcagaaagtctccagaaaggtcatgtcccctggccctgccttggcagaggtccccagtgacttatgctaggaggattccatctgggtagacagtctggccacaaaatcagctactggacctcagccatctctgctggaggctctgaggaggagtgagcatccctcacttgtgggggctctgtgaggaaatgtgccttccccattcccccggagtcctaggtctggagctccagggctgggagagggtgagggagatgggcaggggtgttttctctgaccttgggggcttagtctcagtcctgcctgaactttccactaggcttggaacccttccaagaaccatatttctctccttcccaccaattttcccttgatgaggctttagcagtttgctcccaccacccccagcccatttcacaactctgatcttagtccaaagcaggggacacgcccccccaccaccactttttctctctcccatctcagcctcctgtgcagttccttgcctgcccgtgcatttcctagagtctactgcctcccccctggctgggagggtgtctgggggggatctttcaggggccctggcacccagggcctgtgctggcctaggagtgctgaccagaaggctgctctgttcccccccacccccgttgctttctggccccctctttggagccagccacccacagggctttggtgcctcagaagcagtgggctgccgggtcacagccgcaggctgcaaaagaccctcggagggagcatggagtgaggggttctctctcaggtgtgtatgtattggggggtgggggtgggtggagggtgtcagggaagttggggtgggatcccagccttcccttcaagaggcagggagctctgggaggtggagtccccaccgctttctctactaggctcctcctgttccccaggcttggggagctttgcacaaggagactgcccccagcctagtggcacctacctcatgggctctggggcaggtaggggaagggccagtccagctctggtaatgctggggggaggcataccaaagaatccaggggcagggagtggggagggtgacttccgagctggcctctccccttcctctacccagactggggctgggatcctctcctcccgctgtaaccatttctacctcattttgctgcgtgttgtacatggacgtatttatctcctgtctgacgatgctctgcagttgtggtctgtctacctcagaagagactgtattttaaaagaaagtattacacagtattaaagcgatgacatgtggtttgcaaaaaaaaaaaaaaaaaa

SEQ ID NO: 146 - DNA, 2062 bp, Homo sapiens
gtctgggggccgcgcccagctgggtcgggacgcgctccctgagctgcccgagctccgcggggactcgggccgggatcctcgggcggctgcattggccggggccggggccgggagcgggccatgatgggccggcggcgcgccttcgccgtggacggccgggatggggctggcgagggcctggcacggggctgcatagtgcctggagtcaccagcacctacagacggatccccgacgctgcccacgggtgctcatcctgggagagaggtgacaagttcagaggtgtcggcagggaggcactctttctcaaactggcctcccgggactcaggagtggagatggcagttggggacagccccctggccgccttaccgggcctttctcaggactccctggactttgaatcctcagggagttctgagccccccgcccaggtaggccgactcctggccagccagaagctgggggaggtgttggagcggtcccgccggctcccaacagctcccaccagcttgtcaggacaacaccgctccctgcggctggcaagcaagcctgagcgtgaagtgccccttggagcagggcaacaggagtccatggaggcagacacagacctagaggcaggcctggaagaagaggcggtggggggcctggggcctggagcctgggcctgcctccccgggcagggtcttcgctatctggaacacctgtgcctggtgctggagcagatggcaaggctccagcagctctacctgcagctgcggatccagaggcccccaggggatcccggcgaggaggagtcgacccgagcccctttaccgtccccgttacacaccccaggcaatcgggggcaggggccatgggagctgctaagccagacagagcacacaggagcaaaggctgcttcacccccaaaggtggaggtgcccagtgccaaccctcccaggctgccagaaaccccagtggagccaacgtaccacttgccatcctcccagggacacaagcgggatatctcccactgggacaaggtcaaggtcctgctcaaccggatctgccggagaagccaccaccaccctgagccccctgcccctcctgatggctctgaccccaggatcgagtccagggacctccctgaaaggcctcagtgccgcccccaccggaagacctttatgccatcattagtggttaagaagcaacgagcaaaaaacctttctgtaggctgagacctctcggtgcacctggtgaccctgggtggaggggacttgctgtgaagtcttcctcgccctctgccctcttgctgcttctccacattgccaggaaaagctgctgacgcctgccctcctctcttgagtcgagggctgaatctttctcctctaagcagtctggtcaggaaccttggtttcttgagaggcccccaagatgccgcagctccagggctcttcctcctcaccagaaatccctgggcttccacaatgtgaactcactcattgtcaggtgtccgtggagtgtttttggcatggtgacctgtctgggcccagcatgttgcagatgtgtatttatgcgcaatggtatgcatatctctgtgtgactgtcagtgttgcaagctggctggatccaaccatctcttctgaaataatgcatccaaagggttgatattctgggggaggtcactgcagaaggatggaactgacctttattccccagtgggcagttactgagctttcctcctcagagccatgctggcagccctgggacagagaacggtgtggctttggctgcctctgcatggaatcttgccccggactcctgaagactgcacaaggaatgaggaagatcagggacaacctgggaactgaataactttcaaagccagtgctcagcttctctgctccgtactagcgtttacaggtcttaattcaaaccagatgcctgtactagtttttagaccccaagtcaacctttctgagccacagcttcccgctgggaataatgatgcctgccctatctacctcacagacttgttatgaggataaagtgagattaaactgcctcaaagtgctttgtaaa

SEQ ID NO: 147 - DNA, 3046 bp, Homo sapiens
gaaggccggggccggccagaagcgggcggcgcgggggagatgcataagcttaaatcgtctcagaaggacaaggtccgccagtttatggcgtgcactcaggctggcgagagaactgctatctactgcttaacgcagaatgagtggagactagacgaggccacggacagcttcttccaaaacccagactcgctccacagggagtccatgcggaacgctgtggacaagaagaagctggagcggctgtacggcaggtacaaagatccacaagatgaaaacaaaattggagtcgatgggattcaacagttttgtgatgatctgagcctggatcctgccagtatcagtgtattggtcatagcgtggaagttcagggcagcaactcagtgtgaatttagcagaaaggaatttctagatggcatgacagaacttgggtgtgacagcatggagaagctaaaggctcttctgccaagactggagcaggagctgaaggacacagccaagtttaaagatttttatcagtttaccttcaccttcgctaagaacccagggcagaaaggtttagacttagaaatggctgttgcgtattggaaattagtgttatctggaaggtttaaatttttagatctctggaacacattcttaatggaacatcacaaaagatcaattccaagggacacctggaacctcctgctggactttggaaacatgattgcggatgatatgtctaactacgatgaagaaggagcttggcccgttcttatagatgattttgtagaatatgcacggccagtagtcacaggtggaaaacgcagccttttctaggcagcaagttaagcaggagtaagattatgaaatgatttgtatcctgcaaggagattgcagtcagttcctgggtgcattgtcgctgattccagaagtcattcttgaccagccatgaaaccagaggcgccatcccattctgccggaggacagccagcggctgctttgtggacaccgcaggaagttcctcgggacacggctgctttgggatgtttggagatttgtcatcatagcttttgcgttaggaaatttctgcatgattttttaatatttacaaaatactaaggtagagccatagcgccgcctgtgggaccgcagagcatgctgcgtagctcgcgcgtcaggcgaaccagcgtccggcagcgtcccgccgaatgacgttgcggtggcactggcaacacggcatgtgtcctctgcagggcgctgcgtttttatacacgtcaaagctgttaagaatgtgccctaagggagaggatcttgtcgtagagtctaatgttttttaaaattggtgccagcaattcacgatttatattttttgaattaccaaatatctagatttaccagctctatttttgttttcattttctctagacattcatctgaaaatcattttatggttctcaatccccatgtagctttgcatagcaacggcacacgtggcacgattccagcagagtttatctcacaccgtttatatatcactgggcctctcttacttaaatattatttgacctgcctgagaagcttcataaagtatgtttttttaaaatatattttaattacatttaaaaagacatttttccatgaaaaacatttattttatgagtgatgaattatagattttaaaatcaaggccgggcgtggtggctcacacctgtaatcccagcattttgggaggccgaggcaggtggatcacctgaggtcaggagtttgagaccagcctggccaacatggtgaaaccctgtctctactaaaaatacaaaaattagccgggcatggtggcacatgcctgtaatcccagctactcaggaggctgaggcaggagattcgcttgaactcaggagacggaggttacagtgagtcgagatcgcgccactgcactccagcctggacgacagagtgagattctgtctcaaaataaatacatacatacatacaataaaaccgaatgagctggttctttccatcctcttgtggtacccgtagtgcccagcatccagacctttgtgcccctgtgcacatttggaagctaaaatgtacatcgttgtctgaaaaaacccaaccccaaaaccttcatctgattggtgagctgaagtctgtccttgcaccatgttatcatctgtttctcgtgtccgcctggttgaggaggacccacgagtgctgccgaggtgtggagggctggtattgagttgtggacatcactgttgaccctacctcacgtgccgagactctcatgtcacaggcgtgccttgctgcccccctgcagcactgtgcaggacgtggaccagctggagctgctgcccagcacagaggagagtcgccgcagatgacctagctgcggtgtgagagagcatggcccagacaagcagctgggttggcttctgagaacaggacttaccctgggcttcaggaacatctgatggctgaggttagtgtgcttggaggctgcaggacgaactgtcgatgtttcttagcagagatggtcacagagggcagcagggacaggactggaagggacctgcagcctgcagaccccgcctggcccccgctggcttctggctggtccagtgatgggcaagtgacagaccttccccaggctctgcttccagaactctaatgggaaactgggcctgtctacctttagaagtcttcgattctcagagagcatttgtctaatacaataaaaactggcattaatacaaacctcaaaaacgtgagcgtatcttccaggcttcatggattcttgacatgtaattgttttgttcagaaaagtttatagaattcacataattctgtataaactatggagatccacagtacttttttgtttttgagatttaaagttctaagggattgtcaatagatatcaaaatattaatcattggacaaaggcttttccaaaaattgtgggtttttttcttctgttgtatccatttgagtcctgcatgctgtgaaatgctgagaacagaagcattaaattggtttttctcgggaaaaaaaaaaaaaaaaa

SEQ ID NO: 148 - DNA, 7512 bp, Homo sapiens
aaagaccgataaactttgagcggaccgggacagaaaaaaaaatctctctttgtcttgagggggctgttgagtggtcgcggacctgggctctgtgcgttgggaaagggaagtggaggtctctgaaagaagatgaatttggctgagatttgtgataatgcaaagaaaggaagagaatatgcccttcttggaaattacgactcatcaatggtatattaccagggggtgatgcagcagattcagagacattgccagtcagtcagagatccagctatcaaaggcaaatggcaacaggttcggcaggaattattggaggaatatgaacaagttaaaagtattgtcagcactttagaaagttttaaaattgacaagcctccagatttccctgtgtcctgtcaagatgaaccatttagagatcctgctgtttggccaccccctgttcctgcagaacacagagctccacctcagatcaggcgtcccaatcgagaagtaagacctctgaggaaagaaatggcaggagtaggagcccggggacctgtaggccgagcacatcctatatcaaagagtgaaaagccttctacaagtagggacaaggactatagagcaagagggagagatgacaagggaaggaagaatatgcaagatggtgcaagtgatggtgaaatgccaaaatttgatggtgctggttatgataaggatctggtggaagcccttgaaagagacattgtatccaggaatcctagcattcattgggatgacatagcagatctggaagaagctaagaagttgctaagggaagctgttgttcttccaatgtggatgcctgactttttcaaagggattagaaggccatggaagggtgtactgatggttggacccccaggcactggtaaaactatgctagctaaagctgttgccactgaatgtggtacaacattcttcaacgtttcgtcttctacactgacatctaaatacagaggtgaatctgagaagttagttcgtctgttgtttgagatggctagattttatgcccctaccacgatcttcattgatgagatagattctatctgcagtcgaagaggaacctctgatgaacatgaggcaagtcgcagggtcaagtctgaactgctcattcagatggatggagttggaggagctttagaaaatgatgatccttccaaaatggttatggtattggctgctactaatttcccgtgggacattgatgaagctttgcgaagaaggttagaaaaaaggatatatatacctctcccaacagcaaaaggaagagctgagcttctgaagatcaaccttcgtgaggtcgaattagatcctgatattcaactggaagatatagccgagaagattgagggctattctggtgctgacatcactaatgtttgcagggatgcctctttaatggcaatgagacggcgtatcaatggcttaagtccagaagaaatccgtgcactttctaaagaggaacttcagatgcctgttaccaaaggagactttgaattggccctaaagaaaattgctaagtctgtctctgctgcagacttggagaagtatgaaaaatggatggttgaatttggatctgcttgaatttctgtcagctctttaatttctggtatttttgttgataaaatacgaagaaattcctgcaatttttaaaaaacaagtttggaatttttttcagtggagtggttttcgcttaaaggaaaaaaaaatctaaaactgcgaagaatactaaatgtagttgagaaataattgatggcgagagtttgctagtctccctccccggctttgtgctggtattccacgtattcctgcattaatattgcacacccaaaccagtctatcagggaggctgaagcaagggcgcagtgtgatattttaggaatacagaagatttagaaatacccctatttctcatttgcagtttttttttccaattctgtgctctgtcaacatgagggacctatctatgtatgttgacttttaacatcaaaattggatttgtgtcaaacattcattgttaagagaagaatgacagtatattttggaggaaataatgaatttactaattaaacctttagaatttatgacttactgttagagtctgtcatatggttagaatttttacttccgctacccctgccatttcttctgctagctacttcataatatcttgagctttactgaggaatattctcacgctctgtggtatttgaatcattttgccaggtcatttctctgtctttagtattttttgctggtgcttcttacatttaatatggaaaggtgggaagaatattactgcattagatgtaattcttcattctagacttccaagtttgttttcacttttttgtgtgtgcgtgaaggagtctgtgtcacccaggctgtgtagtgcagtggttgatcttggctcactgcaacctctgcctcctagattcaagcaattctcctgtctcagcctcccaagtagctgggattacaggtgcgcaccaccatgcctggctgtgttttcacttttctttcaacatgttcaaccagatatatagccattatttttctcagctccagcattgtttgatttttcttgagtttgattttagtatttgagataaatacttttacattctaaacaagtccactctctgtggctaacgcaaaacaaatgaaatctttattgttttccaaacagctagtttaacaaaacagcatcatacatagtgaatgatgttcattggaaaattctaaaatttgtccttgtctaggttgagaacttttacacacactaagataaagatagaaatctgacatgctcactcaattcagcaggaattacacattagaaagaagccagaaaaataaatggcatatatccaatcacaagtaaatgatcctggcgttagtttttatgattacatgtgtctcattaggcaatttatgctttaatggtcaagcttttaaaaatttgtatttgataacatcctgaattctcagtttcgaatagtgcctactggtttaaaactaaaaataatacagctttttggacatttaaccaagatactaagaaggttttttttaaaaaaagagatttgattatttttccctgctaaaaactgtaaatgccttatgttcttttcagataacttaagtctgacctaaactccagtattcatctgatgctgtaaattgcccttctttctgagacacagattataagatgccagatcataagacatcatgattttattgtaattgaattcttcctaaaaattgagaggtttccttttattaacttttaaaataaagaaataagtagtttcattacgattattttgcaaactattgccagtcagaaatgcactttttttttccctgaagttttaggagccgtcactaaaacattagtcttgtgattgttaaaacttgtttgtaatgggttggtgcaaaagtaattgtggtttttccattactttcaatggcaaaaaccgcaattacttttgcaccagcctaacaatagttgattagttagaccttttctgggttttgtattgattatcttggtgtgcatttaattatttttctgaattcttcatggataatgacatagtaattgtgattcttttaataccagttaagcagtatttggcaacttaaacttcctgggagcctaactttactatgttaagtgagtcaggtgtgctttttatttcccttgtttctcattttgccctgtcagtggatggtagatgctttgtatatcttaaatcccttaaaggatcttaaagacatccctcaggtgttctatttaacttttattttattttattttatttatttatttattttgagactgagtcttgctctgtcgcccaggctggagtgcagtggcatgatctcggctcactgcaacttctgcctcccaggttcaagccattctcctgcctcggcctcctgagtagctgggattacagttgccgccacacccggcttatttttttgtatttttagtagaggcagagtttcaccatgttggccaggctagtctcgaactcctgacctcagatgatccgcccacattggcctcccaaagtgctgggattacaggtgtgatccaccgcacctggccctaacttttaatatacaacacacacacacacacacacacacacacacacacacacacacacacacacacacacactatttcagaagacagtgtgttgccttacccagaatgagtgctaggattacaggcgtgagacagacacacatacacacacatacacacacacagagtctttattgcagaagacagtgtgttgccttataggcgtgagacacacacacacacacacacacacacacacacacacacagtctttattgcagaagacagtgtgttgccttaccagaatgagtgcttggattacaggcgtgagccactgtgcccagccctaacttttaatgtacatcacacacacactcacactcacatacacacacacacacacactctgactgtctttattgcagaagacagtgtgttgccttacccagaatgagattgaattgttttgcttcgttttgttttgttattcagtgttgcggtagcagatgcattatcaaaggaaaaatatttggctcctttaattcctctgaaaacatgagtattttgagttctgcagcacaatgactgtaggactaagctaagtctgctttgcagatatctgatcagatagtcccttcattctgtagacgtgtattggttggtccaagacacagtgagtaggagctctgtggaccaagacaaagctggactagagagtacagttcaaacttggcagtttctctaacgactctgtatagcttctggcttctactactgaaacaagagtttagatcactgatggagaggcatagtaatctgtttgtgctttggaaaaatatataaaagtttttttcccctattttttgcactttaaatctgttttgaaattagaactgatatacatttatttgaataatgtgtaactattatggatctattttaatgaacaatttttaccatttcccaagctgcctgtttattataagcatgacatgtttactataaaccttttgcccccataatttctttttttaaaggaaattaatattagtaaaataaacacctctttaatggaagctgcaaccttctagtgatccaagtagacaatagatggtggcatcacagactttatctacacactttcgggtctgaccactacctcccacaatacctagccattttggaaggggaaaacatgcggtggtctagctgtatagctcagggcttaatttcagcttctgagattgtgatgtcatatttcactctcaaaacataggctgaaagcacgaattactcaaaaagtaagcaaaccaatacctggtgaatctatggacagtcatacacatacatcaggggaaaatgtgtgtgtacaacccaaatttacagtatgattgtcattctttgactttgttttgtatagcctgactctgttgaacatgaaattattagtactctaggttttggacagcttgagttcatttgaattccttccttaggaataagtttttatatacactgctaaatgtgtgatgagaatcataaaacactaaccagctgaggtagctgtgattcactttccccccaccctaacttgagataaaatgaaggactaggcaagtatttcatgttgtgtgagtggacttcggttccttcagtattgtctaggttattgagtctttctttgcctaatagtggattcccactcttaagataacttttattagtgataaatcagtttagggtatattctgtatgacaggcataaaatgttaagggtgaatgctggccttttccaagaaaaggccaccttaacttgtatgaggaaaaaatcctaactattctcttttttgtatctttttttccgtaactgttttgattgtatattttaaagaaaccacttaatttgtgatgcacgtaatatttgtgtgaacctgagaatatgtcacaataggaaaaagcagaaattatacttaggggacatgttaggggggtaaaaatatttaagcctcgaatgttttactgtcatctccactaactatttttacagaaaaagctaaaaactctgttgtaattattgtaagtttacttatttatacttttaaattaggcttttcatacttaaatttttttgacatttgcttttaatatttgtttcttaatgtggaaattgtgtattttaataatcaaattattaggataatagatatatttttaaacattcacctcattaacaaatagatctttgaatttttattaggttttttggctccagacaactgtttagctttaatgatatttctaaattcccagtgacttattaataaaaacaggaaaaatatttaggtaatgtcataaaatttattttacctttctcattttctgagaaaataaatgaaaaaaaccctagatattgctttattaccaacagtgtgtaggtttttgtacatatggaaatttgacacaaaaaaatagggaatttgtatagagaagtttccctcttataaaaggactcccatttgattgttcgaaactataaaatgcacttttactttaccatatctgaaatgacaaaatatcgccctttggaaaacctgactctttgcacgtgtaattcccagagtctacctcagttaaccaggcttagttttaggcaggaatgaattgaattaaattcagttcatcatctatgcagatttgtttcttttaagcacatccttccctcctgctgttgccctcctcccattaacttttctttttaatcttgaaattgtttaaaatattccatctttctttctctagcaaagtgtttgtattccaaataaggcctctgtgaaatgtctgaattacttttcccgtctttgttatggtcagcttcattatttggatgtattgcattcaaagcagcagttccaaacataacacacatctattttcttagagttttgtaaatacaaactaacctgatgacattaaaaattgtggatcctacatgttcctatgttcattctctaaaaacctgagtaactttatgaaaacacacaaacctggaaaaacatcacatttttgtcacatttttactgacaaatgtatattcatatgatggtacggcagcagggagtggcccccagttaacatggctgtgagtggacacagtgtctcgcaggatcactgcatgttatgatggcttgtaagtgcgttgttaagacttttgtttcagtgtttgtctcccagtatttgaacctaatttaaagaaaaagacgtttccaagttgtatttattaaatgtgtttttccttaccttttgtgctgctactttgctaatctcattagcttagctgtgtttgtgcataggttatatttggtaataaatttatagagtgttggttgtca

SEQ ID NO: 149 - DNA, 2358 bp, Homo sapiens
gcgcaggcgctttgagagacggtgaagccggtggccggtggccgggcgggaccaacaaagatggcggcggcccctgcggcgggagcgatctgggcaacggctgcggctaaagctgcagccgggcccacgggggggctgcacgggggtagtagggggtggccctgaactggggcctggccctggctggcctctcccgccgcctcactgggggacaggtactggggatacgatggctgattcgatagatctggttcctgccctcagtgcgtatactgctccccactttcgttgatgtggtagtggtgatgactgagccaaccacctaatgtggaaatgagaggacagcaagattgtgggtccagcctgtggtgtccacaatgccccaggcctctgagcaccgcctgggccgtacccgagagccacctgttaatatccagccccgagtgggatccaagctaccatttgcccccagggcccgcagcaaggagcgcagaaacccagcctctgggccaaaccccatgttacgacctctgcctccccggccaggtctgcctgatgaacggctcaagaaactggagctgggacggggacggacctcaggccctcgtcccagaggcccccttcgagcagatcatggggttcccctgcctggctcaccacccccaacagtggctttgcctctcccatctcggaccaacttagcccgttccaagtctgtgagcagtggggacttgcgtccaatggggattgccttgggagggcaccgtggcaccggagagcttggggctgcactgagccgcttggccctccggcctgagccacccactttgagacgtagcacttctctccgccgcctagggggctttcctggaccccctaccctgttcagcatacggacagagccccctgcttcccatggctccttccacatgatatccgcccggtcctctgagcctttctactctgatgacaagatggctcatcacacactccttctgggctctggtcatgttggccttcgaaacctgggaaacacgtgcttcctgaatgctgtgctgcagtgtctgagcagcactcgacctcttcgggacttctgtctgagaagggacttccggcaagaggtgcctggaggaggccgagcccaagagctcactgaagcctttgcagatgtgattggtgccctctggcaccctgactcctgcgaagctgtgaatcctactcgattccgagctgtcttccagaaatatgttccctccttctctggatacagccagcaggatgcccaagagttcctgaagctcctcatggagcggctacaccttgaaatcaaccgccgaggccgccgggctccaccgatacttgccaatggtccagttccctctccaccccgccgaggaggggctctgctagaagaacctgagttaagtgatgatgaccgagccaacctaatgtggaaacgttacctggagcgagaggacagcaagattgtggacctgtttgtgggccagttgaaaagttgtctcaagtgccaggcctgtgggtatcgctccacgaccttcgaggttttttgtgacctgtccctgcccatccccaagaaaggatttgctgggggcaaggtgtctctgcgggattgtttcaaccttttcactaaggaagaagagctagagtcggagaatgccccagtgtgtgaccgatgtcggcagaaaactcgaagtaccaaaaagttgacagtacaaagattccctcgaatcctcgtgctccatctgaatcgattttctgcctcccgaggctccatcaaaaaaagttcagtaggtgtagactttccactgcagcgactgagcctaggggactttgccagtgacaaagccggaagtcctgtataccagctgtatgccctttgcaaccactcaggcagcgtccactatggccactacacagccctgtgccggtgccagactggttggcatgtctacaatgactctcgtgtctcccctgtcagtgaaaaccaggtggcatccagcgagggctacgtgctgttctaccaactgatgcaggagccaccccggtgcctgtgacacctctaagctctggcacctgtgaagccctttaaacacccttaagccccaggctccccgtttacctcagagacgtctatttttgtgtctttttaatcggggaggggggagggggtggttgtagctccattattttttttattaaaaaatacccttccacctggaggctcccttgtctcccagccccatgtacaaagctcaccaagcccctgcccatgtacagcccccagaccctctgcaatatcactttttgtgaataaatttattaagaaaaaatgaaaaa

SEQ ID NO: 150 - DNA, 1726 bp, Homo sapiens
gtcactgtggcgcgccgcttccggtctgcagccttgtagtggggctggagcagagcctgccgcgaacccccggagcccacgatccctcgtgccatccctcgaatccaccagcacgagcgtcccacccgcgcctgggaccatggccactgactcatgggccctggcggtggacgagcaggaagctgcggctgagtcgaggacagagctgcccagtccttactcaacaagctgatcagaagcaaccttgttgataacacaaaccaagtggaagtcctgcagcgggatccaaactcccctctgtactcggtgaagtcttttgaagagcttcggctgaaaccacagcttctccaaggagtctatgccatgggtttcaatcgtccatccaagatacaagagaacgcattgccactgatgcttgctgagcccccacagaacttaattgcccaatctcagtctggtactggtaaaacagctgccttcgtgctggccatgcttagccaagtagaacctgcaaacaaatacccccagtgtctatgtctctccccaacgtatgagctcgccctccaaacaggaaaagtgattgaacaaatgggcaaattttaccctgaactgaagctagcttatgctgttcgaggcaataaattggaaagaggccagaagatcagtgagcagattgtcattggcacccctgggactgtgctggactggtgctccaagctcaagttcattgatcccaagaaaatcaaggtgtttgttctggatgaggctgatgtcatgatagccactcagggccaccaagatcagagcatccgcatccagaggatgctgcccaggaactgccagatgctgcttttctccgccacctttgaagactctgtgtggaagtttgcccagaaagtggtcccagacccaaacgttatcaaactgaagcgtgaggaagagaccctggacaccatcaagcagtactatgtcctgtgcagcagcagagacgagaagttccaggccttgtgtaacctctacggggccatcaccattgctcaagccatgatcttctgccatactcgcaaaacagctagttggctggcagcagagctctcaaaagaaggccaccaggtggctctgctgagtggggagatgatggtggaacagagggctgcagtgattgagcgcttccgagagggcaaagagaaggttttggtgaccaccaacgtgtgtgcccgcggcattgatgttgaacaagtgtctgtcgtcatcaactttgatcttcccgtggacaaggacgggaatcctgacaatgagacctacctgcaccggatcgggcgcacgggccgctttggcaagaggggcctggcagtgaacatggtggacagcaagcacagcatgaacatcctgaacagaatccaggagcattttaataagaagatagaaagattggacacagatgatttggacgagattgagaaaatagccaactgagaagctccaccagccactgatgccagccctggcactgcccctgcacaggagacaagtgcgttcagggcacaggccccgacatcaccccaaggacaacggcacaagtagagagaaactacctacctcacttcaaattatgtttggacttgacaaaaatgtatgcaaatgatgggggatggtagaaaaaaattatttacacaaccttggaagattaggcatgaatacacagagatttaccttttggaagttt

SEQ ID NO: 151 - DNA, 2208 bp, Homo sapiens
cgggagattcccggccggactggcggacgagcgtcgagagacagaagccgaggagaggaggctaagccgggcggcgcggggagcgcactgagcaggcaaagtcgcagggccgccagcatgttctcccgaaaccaccggagccgggtcaccgtggccaggggctccgccctggagatggagttcaaacgcggccgcttccgactcagcctcttcagcgacctgcccgaggacacggagttgcagaggaagctagaccatgagatccggatgagggaaggggcctgtaagctgctggcagcctgctcccagcgagagcaggctctggaggccaccaagagcctgctagtgtgcaacagccgcatcctcagctacatgggcgagctgcagcggcgcaaggaggcgcaggtgctggggaagacaagccggcggccttctgacagtggcccgcccgctgagcgctccccctgccgcggccgggtctgcatctctgacctccggattccactcatgtggaaggacacagaatatttcaagaacaaaggtgacttgcaccgctgggctgtgttcctgctgctgcagctgggggaacacatccaggacacagagatgatcctagtggacaggaccctcacagacatctcctttcagagcaatgtgctcttcgctgaggcggggccagactttgaactgcggttagagctgtatggggcctgtgtggaagaagagggggccctgactggcggccccaagaggcttgccaccaaactcagcagctccctgggccgctcctcagggaggcgtgtccgggcatcgctggacagtgctgggggttcagggagcagtcccatcttgctccccaccccagttgttggtggtcctcgttaccacctcttggctcacaccacactcaccctggcagcagtgcaagatggattccgcacacatgacctcacccttgccagtcatgaggagaaccctgcctggctgcccctttatggtagcgtgtgttgccgtctggcagctcagcctctctgcatgactcagcccactgcaagtggtaccctcagggtgcagcaagctggggagatgcagaactgggcacaagtgcatggagttctgaaaggcacaaacctcttctgttaccggcaacctgaggatgcagacactggggaagagccgctgcttactattgctgtcaacaaggagactcgagtccgggcaggggagctggaccaggctctaggacggcccttcaccctaagcatcagtaaccagtatggggatgatgaggtgacacacacccttcagacagaaagtcgggaagcactgcagagctggatggaggctctgtggcagcttttctttgacatgagccaatggaagcagtgctgtgatgaaatcatgaaaattgaaactcctgctccccggaaaccaccccaagcactggcaaagcaggggtccttgtaccatgagatggctattgagccgctggatgacatcgcagcggtgacagacatcctgacccagcgggagggcgcaaggctggagacacccccaccctggctggcaatgtttacagaccagcctgccctgcctaacccctgctcgcctgcctcagtggccccagccccagactggacccaccccctgccctgggggagaccccgaaccttttccctggatgctgtccccccagaccactcccctagggctcgctcggttgcccccctcccacctcagcgatccccacggaccagaggcctctgcagcaaaggccaacctcgcacttggctccagtcaccagtgtgagagagaaaggtgctggcataggatctgcccagaagagaaaatgacccatgcgcagttgggctctggatacggcgctgtctatagcaagttggccagtctggcctcctgttcctctgctggacctggggtaggctgcaggggtgggcagaagcccctcttaaattgtggttgccatggtaccgagggactcattcctggggctcgctgggacctccctaaacccttcctggaagaaaactggaaccaactctgccctacctccctgcactaaccagctttgaggatggcactgaagaacccttggagcaaacatacctcccttgtgactcccacatcaaccattaaagttatttaacagcagccttcacctggctcctgaggaaaaaaaaaaaaaaaaaa

SEQ ID NO: 152 - DNA, 4616 bp, Homo sapiens
acgcatgcgcagcgggggcaggctgggaggtgggactgactgagtcttccgtgtgtcgccgccgttgccgcctcagcttcagcctcgttactcctgcggttctgtgactgtgctgctggcgttaacggcgcgaggtgaagggaggtgacggagtgtgcccgcgcgcgcgggggtcccctcagtcccagcagttcccttcgtgcgcggggggcggcgagggtcttcagcagtcgggagaggcccttgacggcgccatgtcggcgggcggtccatgcccagcagcagccggagggggcccagggggcgcctcctgctccgtgggggcccctggcggggtatccatgttccggtggctggaggtgctggagaaggagttcgacaaagcttttgtggatgtggatctgctcctgggagagatcgatccagaccaagcggacatcacttatgaggggcgacagaagatgaccagcctgagctcctgctttgcacagctttgccacaaagcccagtctgtgtctcaaatcaaccacaagctggaggcacagttggtggatctgaaatctgaactgacagaaacccaagcagagaaagttgttttggagaaagaagtacatgatcagcttttacagctgcactctattcagctgcagcttcatgctaaaactggtcaaagtgctgactctggtaccattaaggcaaaattggaaagagagcttgaggcaaacaaaaaagaaaaaatgaaagaagcacaacttgaagctgaagtgaaattgttgagaaaagagaatgaagcccttcgtagacatatagctgttctccaggctgaagtatatggggcgagactagctgccaagtacttggataaggaactggcaggaagggtccaacagatacaattgctaggacgagatatgaagggacctgctcatgataagctttggaaccaattagaagctgaaatacatttgcatcgtcacaaaactgtgatccgagcctgcagaggacgtaatgacttgaaacgaccaatgcaagcaccaccaggccatgatcaagattccctaaagaaaagccaaggtgttggtccaattagaaaagttctcctccttaaggaagatcatgaaggccttggcatttcaattacaggtgggaaagaacatggtgttccaatcctcatctctgagatccatccggggcaacctgctgatagatgcggagggctgcacgttggggatgctattttggcagtcaacggagttaacctaagggacacaaagcataaagaagctgtaactattctttctcagcagagaggagagattgaatttgaagtagtttatgtggctcctgaagtggattctgatgatgaaaacgtagagtatgaagatgagagtggacatcgttaccgtttgtaccttgatgagttagaaggaggtggtaaccctggtgctagttgcaaagacacaagtggggaaatcaaagtattacaaggatttaataagaaggcagtaactgacacacatgaaaatggagacctgggcactgcaagtgaaactccgctagatgacggtgcttcaaaattagatgatctgcacactctgtatcataaaaaatcttattaaattgaccatatctccagacaagattgttaatcagactattctgaatttggggcactggggaagatggtgacaaagactacaaaatcaggggaggctgtttgttgcctaaatgaaaggcgggtacctcagggcttcatgtgaacaattctcaatgcataaaacaccctgttttctgtggtagaccataattagctattgcatgtaaagcaattttgattttcttgaacttgtaagcaccaaagcatgtgtttcccaaaggggtattactgggctcttaagtaccaaatgaaaccctactgttttacttggttccttttccctttagtaggaggacagtgctaactggaattttataaggagtaccctttaaaatacagagagtaagtgaattcatattttatattctagaatgttaactgtggtatttcagaagacagagcttgactcaatgaattgtagaaatataggcttgacttaatttttgtaactgaaaggctttagacttaaaaaaatttattgtgcatcctaaaatctaaaccaattattaatgatcatttattgtaatgagtttgcatttcagctttattcaatgcagtacaaaatagttttctttaagcagtcttttatcaatcaatgctgcactagaaatagattctcaaaagttactaaacattttactttttttgttttttaaaagaaatgcagatgagtgtaaaacatctgttctcaattatgttgatctgtgtgcgcagtactggagcatttacccattcatgttgagcctcaaatgcttgttttctggggtccacaaaagacagttttatacattttgagttgttcataaagtttgtcttgtgatagtcctggcacttaaagacaaatttttctggtagtaaaagttcagatttattactatgtcatgaaacacagtacattcaaatcaaacggcagttttctttctaagtaaatgatttccagtcatctaaaaggtgggcaagatgagataaagacattttgatacagtaattgttttggttgggttttcatgtcagtttatgtttgactaaagctctcttcatatgcaggtttataaatttgttaggtctgttgtcccatgattaaacatggagtgcctcctctctgatttaatattctgcaggtcattgtaacctgctaggcaaagtcacaacattgcattaaagaggtgatagctttgctaatatcactgttttaaaggacgtacagttaaaggaatattaagtgggagaaagcctacaaggcttttagaatattatcagtatcttcatttctggtattcagatgttatgtgataaaacacattttttttggctttcccagatacactatatatttgttcaagggtaaatctataaaatgtatatactttattttgtggttttgctatttataaatttaatgttttaactgttgctcatttatggtttgttttgggtggtggtgttcatctgtatatcaccatgttaatttgtaatggaagtgcacttcgtagtgtatattgttactgacattaaaatactttatagcattgtctctgagcaaaagctagtatttaattgtacaaatgaataagcaagttacatgttattgtttgctcttgacagggtaggcctcttaaaagaaaaaaaacaacttgttttttctttatgaatcccctatgccaaacacataccttccatgcatgacatgagatctgcaaactggattttagccaccgtatttatttagtcaaaaaaattgtccattgtagcagacccgaaaacctttttgctgtgacatgaaaccatgttattcttatcttcttaaaacacagcctgggatggaatggccatggcatttttttcagagaacatcctttatctgctatgactgaatccttaggaaatgtaagctataaccctttgattttcaagaactaccgaataagtgtatgaagaggtggttttttaaaacttcaagttggaatttttatgaggtcactgtgtaatttgaagaattgtgtgagattgtcatgatataaattccttttaaggactgataaatagaatgaaaagtttccaggtagtttaaaactccacaggtcagtttccttttcattcctgcttcactgtggtttataagcctacgggagagcaccgttgctcagatgctactgtgagcttcctgtccggtgttagaaagtaactagttaaaagttcattttagaatgtatggtttttggggatgaactaagaattagttattagttccaaaggactgagaaccaattttaatattttcacatttataggaaagaaattcatatgtccctgaaacttctaggacaaaaccaaacaagtaaggagggaactgttgcaaagccatttcatcgagaaggggacagaaggagaaatacacacatgtatacacaaacagaatggttgagaaaacgttttaataaaatgtgagggttgtatgtgtgcgtgtatatatttacacttaacctctaaaattctcttctacagtatctctgttatgaatatgatggaaaagcaacattttggtggtgagactattgttaaaataaatttgagaaagacgaaaattttgtgagtcttgataattacaagtcaacagctatcgaaagttagcacagcttgtctgtggtgctgtttttttccccactgcagtggacttatgctgttttcatgtttagaaacaaaaaggtttcatgtgattcatgtgtaagatgcacagtatttgacatcctgattatgtaatccctattccatctatccagtcttacacttatggttggcctcaaatctattgcatttatgataatgtattatatctagttgagtttaatatttttttattagcctgtaaataaagatggcatcttctacattaaaatgatattgatctcatttttttaaataaacattttgtttccttgacgttaaaaaaaaaaaaaaa

SEQ ID NO: 153 - DNA, 9510 bp, Homo sapiens
cggcggcaaggccctgggggatccgctggggaggagctggggaggaggccggagctgcatggagtttctagggcgcgcaactccagcggggcctcggccactgggctccggggcgcagcgaggcagccgcgcacatgggctgaacccgcgcggccagcgggagcgggaggggtagaggagcgcgcggtgcagggggtgcggggcacacgtccccagacgagagcagaggacaaggacagggaggcacgcgcccagatcgcgctccgagtcgacgagggggctcgtgcaggtcccggcgcgcgcgtggggagcggcccgggggcgccgagggagccggcggcagcgaggatgccggcacggggacgcggctgcctgctgggggtgtgagcgagaggctgagcgctgcccgctcggcgcatccattccgcaccgccccctccctgcgggcctcggaggaagccccccgcgctgtgcggaggcgcctcggctgccgggctgcggagccccggcccagcaagagggaaaagatgccgttccaccatgtgaccgccggcttgttgtacaaggggaattacctcaaccgatcgctctctgctggcagtgacagcgaacagctggctaatatctccgtggaggagctcgatgaaatccgagaggcctttcgggttctggaccgggatgggaacggcttcatctccaagcaggagctgggcatggccatgcgctctttggggtacatgccaagcgaggtggagctggccatcatcatgcagcgcttggacatggacggggatggccaggtggattttgatgaattcatgaccattcttggccccaaactggtgtcttcagaaggtcgcgatggttttcttgggaacacgatagacagcatattctggcagtttgacatgcaaaggataactctggaagagttgaagcacattctctatcatgccttccgagaccacctaacgatgaaggacattgagaacatcattatcaatgaggaagagagcctgaatgagacctcggggaactgccaaacagagtttgaaggagtgcattcccagaagcagaacagacagacctgcgtccggaagagcctcatatgcgcctttgctatggccttcatcatcagtgtcatgctgattgcagccaaccagatactccggagcggcatggagtagcagcctcccgccagccacactgtgttgcagctcaccgcgcatgtgcatgccgtgcgggcagactcttcctccacacagcagacacggacctatggactatggatggatgcggacgatggaaccgttcagtaaagaacccaaggttgagtgcaactggggttgcacttcagcttcatctccttggcagggacactaaagggctgtcttcagtgctttaatggttttgttttctaatgcaataaatcgccaggatttccaaattattgcttcaaccatcagtcataactctagagaaaaacttcatcttcatctcggaattccagcagccatccaggtataatggtgagagagcaagagagaggcatgaacacacagtcacctccactccccattctttcaacccaagggtcaacaggagactctctgctgaggtcaaccctcagttccaagaggctgacttcagggttgccacagaagagggggctttccatcccaccctggcttccttcctccacccagtggagacccccccaaggcatgaggggaaagccattaagtggggtgcagccctggcggtcttcagctgcacccctcaccgcttccgttcttactgccttttctagaggactgccattggtagagctggggtgctctcagtttccgtcggcacttggctttctgttcctagagcccatcccgcaccagcattttggaacctgcagagagcctttctcccagctttgccgcctgtgctgccattagagaaaaaaagaagcataatcgtgggcatctctataacatagacagatatatatatttggcttcttcgtgtgtgatgtcattcttccctaatcgcttacacctaatataagcttgtcctccctcccacactcatccctgcttctttggggcaggggtgaggcaggttgaggggggaggggactgggactggcggtgaggttttgatacccacacccagccatctggagtcatggagacccaccacgtctctatgccggatgacctttgtaagttaaggtccttgtgcatcttacctttcccttaccttggagtttgctttgttagtcttccccagctaaaaagagaaatgcaatccaaaatggaaagatggagagatcaaacgactgtattttcacataagatcttctggccttcagattctgcaactgactcattttcaggaggttgggggaaaagatgtttatgagtttagccaacagaacaggtaatttactcctgcctgcagaatacttttcgttggggaagagaactgaatccaaggatctgttttcaacaccattccaagtctgtaatttcctgacttttcctagatgtcagccactactatgaattcaagcttgtgtagtcagattagccagtaatctctagatgtaatagttccctttgtacttttccaagctcaggtctttattttgtaatggaattaccttgctcctacttcttttgattacatcctaaaactacatgcttccccccttccagtagcgagccaccagaagctttcttgtctctatgcagtgggtaggattttttggtgcgttgtgtgttcctgatctccctccctgtcttcctgctcagctttctccctactgccttttcagacttggagcacccaaggtctccaatgaaagttttctcattcacctctgcaagtgctactggcaacagcctgagggcagctgtagaaactttccctctgtgggagactatgaatattcctgatgagcacaagtaaaactaaggcttcagccataatatggaggagggagcagatgtaagctcccaagagcctgggggatcacaggtccctctgcaaaacttcctggagttcagcccagcaaggccagaccaaggaggcagcaacctgcctttcccccttacctgccctgctgcctgcacactgcatgcctgccccttctgctgctcctgttggctgactcaccactgtccccttaggattggaattctcaactagaaccggtccaaatgcagaatattaatacatcgaacaacttcatccttaatctctgccctgggcagtttgccctctcccatctggacttagatgggagggcatagcagatcttgaagggatatactttcctgtttttccctgacccccgaaccacccaaccacatccataggggtgcaggaccctaagtagactgggtagaaaccccagggatgattcttcaaagccccctcctccatgagaggggactgaaatgctgcagctgaggctggtcttcagggcagaaaatgagtacttctttgaaggtggcttttctgcgagttcttctgcctcctgctggagaacagagacccttcaagaggtgagggttagatttcattggcagagagattagccactgtgcaggagtagggaggaaaaggagttctggagaggcgccgccatcctgttttctggaaaggctgcaggattcctttcctaacggtgaccttcttcttgctcccagtgacctggaagcaagcccaccctccccaggggaaaatctaggagaatgcattcctctgcagactgctagagagagatggcaagaaggaagacacagaattctttctgacagcctaggagttatcttcccactgtggtaaccccccatgtggcacccagggactgaaggacacagtgcgtggagacggccctgagctagcggcattccttagacttcaggagctcagagtttgtcccggtgacttgcaccctggctgctttgcttggacagtttgtcttgggtatagggaagccttccttgtcaggcagccaactcccagccctgttcacacaaattttatgctagggccccatgccagtcagtgtccccatcatggtggctatgaagctcacggctgaagattccagaaggtcctggtctcccatgcccaagggatgccatgtagccccagctggaagtgacttccgcaggaattgagagggaatagctcacccctcattctgtcctccggacttaggaaccagtgaccttggctgcccaactgtgtggaggctgagtgattgacaaacacaggttggctcattcttgctgcaagagcaggtaccccccgccgcccccctggaaagcacaagtgatgagcaagaaggcattttccttgggagagaaggggaaatggaccctgacccccttgatccccaaagaagctgcgccccacctttccagatacccacaaagcccccagacagaatctagcatcgggactattagcaatggcttccagaatgtgcttgggtcccacgtgactgatctgacaaaaaaaaaagagggatattaccatggcaacccttgcattccaccctgagtttgccaaggcacacaaaaatagggaacattttcttaaagaacactccaattcagcctgagtgcaacctgactctctgcatctgtatcctgctgggagaggcaattacccttaaagaatctgggtggtatctctgcctttttgtctggcatttgaacttgtccttctatttactcaggagagcaggagctacctgtaagccctggtatctccccatccctactcccagccccttctcccagggtccagagccaggaccccttaatctaggtaaattgacagaaatatcatcttggaaggcaaacaagatattaagcctccaatctttaaaagtatcggtttgcctgttgagcacactcctgcaagccaaacacgtgaactttggtgaactgaggtttaggtgtggtcttaggcaaacccagtggtttcagaaatgtctgggtgttttatttgcagagaacaagatgtgtcttatgagtcttctttctcaatacctgccctgtctcaaatctcacttgacaaatggtctacgatcttgcagttatccaaaagagcctatgaaaaatggacagctgcttttgacaataatgcccctcccaacttcccattcatagaatcataaagcgatatgtttcagaactgagagagaaaagtttaccttttattccaaatgcctcgtactcggtttaagtccagactcaggtcataaatcaaagacagttttgcacgttgctcttcacctaaatctagcagtttccctgaggccctatgagggcatggacagaaaatgaaggatgcaaccacccaggacagctccctggtttgggctggcctggccacgtgtggtcacatgtcctgggatctgtgtttactgtgtccttgctctccttccttgcagaagctgctaagctctgctcctcctaactgcaggtctcaaaccctattgggtcattttgccacactatttctccaaaggcccatagtcattacattttttaccatttcaccaagataacagggggggtctggaattcccctgctaggaagggccccttttcctatatcaccgtgatggtacagatgaactgagatgaaacttttagacttcagcacgtcacacatcctggttgtataaccaggaggtctgcagagctgcaacccctgaagaacatctgtcttaaaagacctcaaatcagaacattctcattggcctcttcagtgatccccatggagctaagagtccgtaacctaaaggccttaccatagccatcttccctccacacctgattgctcaactgccccagaaggggagaatctatctgaaatagaaaagaagcattaaggaccaggtgcggtggctcacacctataatcccagcactttgggaggccaaggcaggtggatcacttaagatcaggagttcaagaccagcctggccaacgtggtgaaaccccatctctactaaaaaaaaaaaatacaaaaattagccaagcatggtgtcgggcacctgtaatcctagctactctggaggctgaggagggagaatcacttgaaccctggaggcggaggctgcagtgagctgagatcgcgccactgcactccagcctgggcaacagagcaaaacttcatctcaaaaaataattttaaaaaagaaacattattcaccagctaagacttttcaatttaaattatttaaagtgacagcaacatagaggagaatttgggctgcctcttaccgacccagtctccatgataatttgagtgtcacaactgttcagcttcacttcatacttgctttgactaagtcactcgggattgtcctcaattttttggccctgccataaataggtgtatgttagtccgttttgcattgctataaaggaataccttaacactgggtaatttataaagaaaagaggtttatttggctcgcagttctgcaggctgtttgagcaaggtatcaacatctgcttggcttctggtgagacctcagaaagctttgacccatggtggaaggtgaagggggagcaggcacgtcacacagcaagaacaggagcaagagagaggagaagaggtgccagtctccttttcttaacaacccgcaattgcatgaactaataaagtaagaattcactcattactacagggagggcaccgagtcattcatgaggaatctgtccctatgacccaaatatctcccagcaggccccacctccagcactggagatcaacatgaaatttggggggaacaaatatccagcctctatgattggtttggagcaatgagatcaattacaccaacaagccaagcatttctcttagtatcctatggtcattgctaatgcatatggtcattttgacagctgtggtttctccttcatattcatttgggactcttcatagggtctcgagagacatgacaatactgttcaaaacgtctccaaggcaaaattaattttattccgttgactggaaatatatcacaaagaatgaggtttttccagtcccacccacaagacagtcctctgaaagtggaaaagcttgcccggccacctgcccctaccctgaccttggggtagttcatcagttgagcacaacccccatgccgggcatagactcacccatctcttttcctcaggtgtgatgggttggctttcaaactagtgtttctcgcactgttagaagttattgtccaagtggaaaggatgcagaggctggaattttccagtgggatagaagagcaggctaattaggaaggaatattccagggaatgcaaggtgcaactgcgatattgctccatccctggacctgagggagacaaagaaagttcttaaagggctgcagatgctgtcctctgaaggtcttctctggatcgctggcctactttggaaacatgcaggccattgagtgccatggggctgcccatcagtctgatccacacgaaaggctctgtgcatttcaagagcaggctggtagctcgccattcctgggaggatgctgacatctgtcaagcccagaatgcctctctcagggctctcagacctgttaaactgaggccaggagagcagaagaaagaactcaaagtgtggacggtactaccagctggagaaagcccaggagccaggactcttccacccactatctaggttatgttgagtgacattcctccctggcttcaggtttctctaaagccagaggaaaagtaaaccagacaagccctcccatctattttgtctgaaacaagatggagtgaatgctccctactgagagggtctggatttcacccatgaattgcactaggaactgggagctcctttttgaacacaagtcccaagaggcagttgtgataaagtctctcttttggtgtccgctgtctgtaaatgaaacaatgcaaattggtgtatgttaaatgtgtcacagcttgcaggcaagaggttttgtttattctctaaggacttgctgactcgagggagcatcaaagatgagctttctgtctgtcttggcaagtgtgaaaataaagggagtcagtcacctccccaaaggtcatgtgaatcagaattcaggagaaagttggaggaaacaatggcagattccaagaagagatgcttgtttctccatttgagaaagccttactgaaagctactgaataaagagcacaatttccagttatttctttctttgcttttttttttttctggccactataacagcacttccagtatatgttgatagtagcttgtaattattcctaataccccagaaagaagagagtcgtgatctttggtgattgtgaggaattagattaacagtcgcgggggaccggctacctgcgacagccctttaaatggctaatgagggatgctgagtgctgagcggtgcctgcttttgatgtggcccacccatgaccagggagagagggcaggaagagagcagctgcaggatccacaagtctctaacccttctgccccaggcaacataaaaccctagattcttgttctttttccctcttcctaaagtagactgacgtcccagtaattgtttttctaacaagccctgttgttctccctgggaaagacctagattggccaagaaaggatcctgtcagctcctggtggagagttgcacaagccagtggctctcaactctctccaaggaaaattaaagcatattttctctttcttagctcaaaatcagctttcaggggtccttattggggtctgattttcttccccagttctgaatccaggaagaagctttttctccaaggaccaaccaaaaacaatgactttggagaaaaattagactcagaaagtctgtccaggcattgggttggtgaactgtcaactgttggatggggaggaggggtcgctgtgatcgtagcggtcattagacttgggacgtgagttgtctctcaaagcacagtagtaaatgactgtattttgtatattgcccccaatatgttgggtgtaaatagaagcacagctggggattgatcatggccaggacgattggagcttggcagctctcatatccagaataagccactaagacggaactcatcaatcaccatcttcccatttacctcattagcatcccattttctctcattcagtattagttgatgatttctgctattaagtgatgagaaagtcagcagactagtcaaaaaagaatctttatataaaatgtacatattaatataaattaacttagcatgcaacttaccgatcaaatgaagtatatattattaatatgttatcttagtgtataaaggaaaactgccatatttaccagatgttttctttaaccgaacttgtctgtaaatatataatctgtataaaaagagtctaatttaccattatttatgcaatagaaaaaataaaagtttttttttcttttgaaaaaaaaaaaaaaaaaaaaaaaaaaaaaaaaaaaaaaaa

SEQ ID NO: 154 - DNA, 2906 bp, Homo sapiens
aagaagcgacgtgtcccactgtcctggctccgtgggtccagtgagattgggcctgggcgctggagctgctgtggctcccgccgcggcggctgccatggaggccatgccagagcccagaactcacgccgggggaggccgagacagccggcggtactcatagatgaggcagcggcggcggcggcggcggcggcagcccgggctctccatgagcaggcggcggcggcgacgggtgcggcggcaccggcagttttcggtccccagggaggatgaagacactgtttgaagagatcaaagcatcaattaaaaataactataaccaagatcgatcattttgtaggcctgttcttccttgggggggtgtttttactatcaaagctggccgcaaagcagtatcctgtacaccactctatgttgaaataagactgaaaaatacctgcaccatagatggattcttgatgttattatatgtcattcttaatgaaaatgaaaacttccctagggaactctctcttcattttggtagagagtttgtagactgttttctttacttaatggacacctacagttttacaactgtgaagctactttggatttgggacaagatggaaaaacagcaatacaaatctgaagtccataaagcttcattaataattgatttgtttgggaatgagcatgataattttacaaaaaatcttgaaaatctcatgtctaccattcaagagagttactgttccaactggcgatgcccaactcgagtgcaggaggatcagcagcgcacaattaatataaatcctccccaagaaattccacatggaaacttgataagactggctgtgaatgagttattctgttccaagattgaactgtgtgaagagcatgggtgtggtggcttaagagaattttcccaacgaattttctgccatggggcacccccttttgttgtcttaaatatgcaacattggaaatctgaagatctggcgtatgtaccctattacttggatttgtctgatcacaagtatttgttggaaggtgccacattatttaacaaagaggaacatcattattctgcagctttccagattggtggacattggatgcactatgatgggctcagaaatgtgaatttaattttgttaaataaacccccagagtttctcctcttgtcatcattggtttatattcgagcaacagagaaataaatatagattgatgctaaaagttgttttccctcctgcccatgctctcccagatgaagggcttttattttgtgtatacttggtatccaagaaaatagttcaactatactagtttcagaagtgtattttcagtgtttaaccccaggtaaatgttttatatagaggatctgtgcaaaaatgtttgtaatttttttatatttcctgagttatttttatatgagcatattttatgttggaataaaatatatcttgtggcctttgtattttttatttatatgtacctcaaagatttttacaattctgtctttgaattcaagaaatactttgtcatctgaattctaaatttttctttttggatattcgagtaaaacctaggtaaaagtattttaagtttatataatttaacagttcaaaatatatctgactgtatttctttgccctacctcactataatccaaagtgcactatttgatctagtatggatttgaatgtacaatttatcgatggcttagtttattagttcgatttgcctagtatccctgcagcaattttttaaaatgtctgagaaatttttcagagcttaaactatttctttataatggcaaattacttttaactacttcctaaagtattataaacctgccagtggattttaagtgatagctaagcttccaagcttaattcacgttattacaaataaattatataactatcttaaatgtttatcttataattaaatgtaatttgaaatgctctaatgtattttgcagataaaacaactataaacaatattaggcaactggatgtttactagtgtcggactagcaatagaaatgcactttaaatatatatttaaggggaaatgcgtgcctggaaatacttcttttcctagtgaagttttatattgacacagagaaaagaatacttaaaattttgagtgatgtctactggcttccttgtaagtagtgattgatagcatgcggctttgacttgcaatacaaatcattacgattttatagttatcagaacattacgtttctttataaagaccctaaggtcactcttctttttgcaacttaagggaaaaaatattctcaagggaaaatactttttgaaatttatcaccattttagtgtttacatttcaataaatagttcacttcaggtttgggattgagattagttgcaatatatttagaagctcctacatgacagcacagatcactgccatctgctgaactgctaaagtgcttggtgccatgttgagaaaacttacccaagaatggataaatatgggtgaaacattactgagaatgcctcacgttagcaaatactatgaaaattcttgtttatatatcaaactgatttattttacaaaaaaaaaaaattcaccccaagatttatttagtttcccaagtgtatctgattaggatttaatttagagtaaacttttctggggacacctgattgcatgaactgaagtatacaataacacaaatattacagtaaacataaatggtgtcattaacaaaattattcctaatgcagatttattctttcaggaaatgcactttatttggaatactagtttatcatgaaacaatgacttacctacctcacagggttgttgtgaggattaagatgtttgttaaaatcttgactaccttgaacatgctaataaaaaaacatttttctacctcttttatttgca

SEQ ID NO: 155 - DNA, 1962 bp, Homo sapiens
actgacgcacgcatggccacgagagggcgggggaggagtgaagaggttgaggcgccccgcccagtcagcaaggttgcgcgtgccctgtgagaccgccaagatggtggtgggcgcgttccctatggcgaagctgctatacttgggcatccggcaggtcagcaagccgcttgccaaccgtattaaggaggccgcccgccgaagcgagttcttcaagacctatatctgcctcccgccggctcaactgtaccactggctggagatgcggaccaaaatgcgcatcatgggtttcaatgccgctgccatcaagccgctgaacgagggtgcagccgccgagctgggcgcggagctgctgggcgagggcatcatcttcatcaccgcctgcagctgcctgatgctggagtattggcgccaccagttgcagcagcgccgcaaggaaaaggagcgacgtgttgccagggaggcgctgcggggcgaggtgggccacttggggctggcgctcgaggagttgcaggcgcaggtgcaggcgacgtcgacgcagctcgccctggaggagctgcgcgctcagctgcaggaggtgcgagcccacctctgcctccgagacccgccgcctgcacccccagttgcgccggcgtccgagaaataggaggtctcggggccctggtcttggaggtgactgctgtctggactgcgaagtctctgtcttggcctattctccgcactgtcccatcctggaccggcccagctgacaccacccagtccttcgggggcgccggagagatcctgggctggagctgatcgaacctccctactaacctgcccagtggtaccttccactgggactctccgcctcctgcaggtggaacgttccaagaaggaccccgccctatcccaccccgcccctgccagcgcatttgttgagcactttggaaagacagcgtcttttatcagaccccacctccctaccgctaggtaggccagcaggacgtccacctcttttggcaaaacaaaattctgcacccggatttagccacctctcattctgtcacccgcaccctcactcacctgagtggacccttcccctaggacgctcatcctttgcaccgaacaccacctacctcctcctcattggtacagaccattgtaaagatgcacaaagttcctacggacttcccgacccgcccccttccatctacctcagtcttagggggaaaggtgggggtgaatcctggactgcgttagctccaatgagtcaccaccctgcggctcctgaccttaatccatcttagtacctgtcattgacatcctcccctccctgagtggatcgatccaacataacccccctcttcttccacctatggcgcaccccactggcatggctatgctgggtcttccagggaaacgcctcccagcccggcattctgtggtctgttccagcaggacgtggccttttgggaggaaaaaccggtcttgaccagggctagtccattctggctttcaggctcagtcacttggtcaccagtccccagtcctggacctactgctactgtccttttatccggtcctccctcgctgtcctcttcagttgcctttgctagggaccggcctgtccctttactacctaagtcatcgtcagttcgcccaacttccctccaaatctgcccctcacggtacgcagggatcgcccttccttcctgcctttggactggtccaggtcctcctccgccctccttcacgcaaaggcctcctccagggggactacctgtccctcagcccagaggtccccctgtccaagcggggtattccaccaggccatatgacctacccacccgacaactgaagggggcgtggatgagctctgtgactctgaatgctactttataaatcgactgtcagcgttttctaattaaaggagctctggggtaaagatcttaaaaaaaaaaaaaaaaaaaaaaaaaaaaaaaa

SEQ ID NO: 156 - DNA, 2587 bp, Homo sapiens
cgcgcctctgatcgcgttccgggacacacaggcggcggctgcgggcgcagagcggagatgcagcggcttggggccaccctgctgtgcctgctgctggcggcggcggtccccacggcccccgcgcccgctccgacggcgacctcggctccagtcaagcccggcccggctctcagctacccgcaggaggaggccaccctcaatgagatgttccgcgaggttgaggaactgatggaggacacgcagcacaaattgcgcagcgcggtggaagagatggaggcagaagaagctgctgctaaagcatcatcagaagtgaacctggcaaacttacctcccagctatcacaatgagaccaacacagacacgaaggttggaaataataccatccatgtgcaccgagaaattcacaagataaccaacaaccagactggacaaatggtcttttcagagacagttatcacatctgtgggagacgaagaaggcagaaggagccacgagtgcatcatcgacgaggactgtgggcccagcatgtactgccagtttgccagcttccagtacacctgccagccatgccggggccagaggatgctctgcacccgggacagtgagtgctgtggagaccagctgtgtgtctggggtcactgcaccaaaatggccaccaggggcagcaatgggaccatctgtgacaaccagagggactgccagccggggctgtgctgtgccttccagagaggcctgctgttccctgtgtgcacacccctgcccgtggagggcgagctttgccatgaccccgccagccggcttctggacctcatcacctgggagctagagcctgatggagccttggaccgatgcccttgtgccagtggcctcctctgccagccccacagccacagcctggtgtatgtgtgcaagccgaccttcgtggggagccgtgaccaagatggggagatcctgctgcccagagaggtccccgatgagtatgaagttggcagcttcatggaggaggtgcgccaggagctggaggacctggagaggagcctgactgaagagatggcgctgagggagcctgcggctgccgccgctgcactgctgggaggggaagagatttagatctggaccaggctgtgggtagatgtgcaatagaaatagctaatttatttccccaggtgtgtgctttaggcgtgggctgaccaggcttcttcctacatcttcttcccagtaagtttcccctctggcttgacagcatgaggtgttgtgcatttgttcagctcccccaggctgttctccaggcttcacagtctggtgcttgggagagtcaggcagggttaaactgcaggagcagtttgccacccctgtccagattattggctgctttgcctctaccagttggcagacagccgtttgttctacatggctttgataattgtttgaggggaggagatggaaacaatgtggagtctccctctgattggttttggggaaatgtggagaagagtgccctgctttgcaaacatcaacctggcaaaaatgcaacaaatgaattttccacgcagttctttccatgggcataggtaagctgtgccttcagctgttgcagatgaaatgttctgttcaccctgcattacatgtgtttattcatccagcagtgttgctcagctcctacctctgtgccagggcagcattttcatatccaagatcaattccctctctcagcacagcctggggagggggtcattgttctcctcgtccatcagggatctcagaggctcagagactgcaagctgcttgcccaagtcacacagctagtgaagaccagagcagtttcatctggttgtgactctaagctcagtgctctctccactaccccacaccagccttggtgccaccaaaagtgctccccaaaaggaaggagaatgggatttttcttttgaggcatgcacatctggaattaaggtcaaactaattctcacatccctctaaaagtaaactactgttaggaacagcagtgttctcacagtgtggggcagccgtccttctaatgaagacaatgatattgacactgtccctctttggcagttgcattagtaactttgaaaggtatatgactgagcgtagcatacaggttaacctgcagaaacagtacttaggtaattgtagggcgaggattataaatgaaatttgcaaaatcacttagcagcaactgaagacaattatcaaccacgtggagaaaatcaaaccgagcagggctgtgtgaaacatggttgtaatatgcgactgcgaacactgaactctacgccactccacaaatgatgttttcaggtgtcatggactgttgccaccatgtattcatccagagttcttaaagtttaaagttgcacatgattgtataagcatgctttctttgagttttaaattatgtataaacataagttgcatttagaaatcaagcataaatcacttcaactgctcttctgtagttcttggatttcttttcccttttgactttgaataaatgtaaaatcctttcagccagaaaaagtaaaatagaaacaacctgtattaaaaatcttccatagaaaaaaaaaaa

SEQ ID NO: 157 - DNA, 3048 bp, Homo sapiens
agcgagctgtgaacaactcgtgtccaaataagtggctgagaggtggtcctaagtaagcacaagtttagtagtagagtactcgtaacacagaactggctgaaaccccgccctcttgtctacgggcgttctttcagggcgactttgtcagtaccccaaactgtccccgcatgaggtcactctgcacggtcacgtgctcgagcccgcgggagcgccacatcgccagccgcacccctccacccccaacctgcccacgtgacccggcctagtttctccaggcccgtccctacgtctcactcgggaagccccgccccacgctgagcgctccgcctgcgaccctccgccacttacccaccccggctcaagcacgacccgtggatccacgtgctttttcttgtccaatgggagccggctcccgggcgcgaaggggcggggaggaaaggaacgactgtgctacgttgccagaaggggcgggacctgcaacgtccgacagaacgaggggacgtaacggaggcaggttggagccgctgccgtcgccatgacccgcggtaaccagcgtgagctcgcccgccagaagaatatgaaaaagcagagcgactcggttaagggaaagcgccgagatgacgggctttctgctgccgcccgcaagcagagggactcggagatcatgcagcagaagcagaaaaaggcaaacgagaagaaggaggaacccaagtagctttgtggcttcgtgtccaaccctcttgcccttcgcctgtgtgcctggagccagtcccaccacgctcgcgtttcctcctgtagtgctcacaggtcccagcaccgatggcattccctttgccctgagtctgcagcgggtcccttttgtgcttccttcccctcaggtagcctctctccccctgggccactcccgggggtgagggggttaccccttcccagtgttttttattcctgtggggctcaccccaaagtattaaaagtagctttgtaattccttgagcgcctggtttgactggggacttggggggatggggttggaagaatgactgccctttcccaccaaaaaagggagaactctttagattcagattgtgggtatgtagacttaataagtgaaacatcacagaagaagcctttattatacaatgacaaccaaacaagtactccggatatgcagtagaggaatcctctaagaaccatagagacttcttttctgtgatttttgttccccacccttgaacaccatctctaggatggagttggcctaagagtgaatgctgcaagatctgtgtttatgcctcttttcctcattcttcctcagtttgttcgtctgcttgaaagttggccaaaaaatcctgctgctcaccgacttcccgtggtcagctgctgtcaagcgttcactttctcttctgtcattcctcatggaatgagggtggttttgtcttcccgcttcccttgacctcaaaatcaggattaaaacctggggtagcctctgtgctcctttcttctatgccctggtttgttctgtggttctgggcttcttatatccgtgtgcccagggctgaactccttattttcctttctccaagggcagagccgagtcttcagtccctgttggtctttccccacccccacttccagcccaagagccaggaaagggctggtgccacactgtctgctgggatcagcggtggttctttgagctgctgatttgggtgttaggctcttgagctgggatgcagatgtaacagtagctccagtgagtcagacactctgcccagcacattagactgtgtttgaccacttcttccagttcatagtattgacttcagcccaaacggagataactccctgtgtgtccttgaggtattgagctgggctggacagctccccttgagccaactctaggagtacaatgtcaggggaaccccagtttgtgaaaaggacttagactggaggatatttgttatctggggatatgatgcggtggcggcggcgcctcaagataaggggctggggtttctgggtggggggccaacagagtggtgccagtaacagccccagatagaggagtacgcaggcccagcatgaggcaaccttgacccagaaggtggcccagctacccttgatgaaggtcttttccagttctgctccctcatagctgtgtaaccaaaggctctggttagagaatatgaagggccttagcttttagacctgttctacctcctcaccaaatataatggcagacccatgtgtgtctggaatggccttgaattgctctttccttaaaatagctagctcttcaggagagtatctaaggcccactccatcttacctgaaccagttggtaagggtaaccatgacatagagtgaggcaaggaagaagacgaagtggaaggcagaatagttgtaggaaagatgctggacttggactggaggagctggaggggtttcttggtcagctggcctcgcagccccacccctttgccctggagagaggaaatggctgctgggagcagagctgctgaaacacctcttcccctctcccccaactacctttgttaaggctcttgagggttcttatggcactccacagagatctaccacttcttatggttcctcacttggcactcacctttgtctgcctccactgtttcagggcagcagaaacacagtgagggcttctgcaaaacagaacgcaggttttggaatggtcttaaaagatgtgagggtgttaatctaggaaacttcccccgtgaaaagattggtctagtattaaaaagtggaggcacacctgggttcaaattctagctccagcatataagtggctgtgcagactttggtaagatgtttaatcttttgtgcctcgatttctccatttgtaaaatggagcaaatacctacctcacagggttgttgtgagggttaaattaaatgagattatgtaaaagtatctagcacagttgcctagcacattgtgggtactcaataaaaggtaacagcagctataatctgagcattctgggtagaggttggtaaaaaaaaaaaaaaaaaa

SEQ ID NO: 158 - DNA, 2594 bp, Homo sapiens
cgcctccaggccccttcccgcgtcgcgacgcacgctgccccggaaggccgcggcgctgtagtgcggcgtgggagccccaggttctttagtggaagaacgcgaagcgaggatgagtgatccgtggaggcagtaacaggcgcggcgagggagaagtgattcccgaagaatcaaggctgggccggacccggtggcctggcaacagggtaataagagaaatgaagccaacaggtacagacccaaggatcttatctatagctgctgaagttgcaaaaagccctgagcagaatgtccctgttatactgttgaagttaaaagaaataataaacatcacacctttaggaagctcagagttgaagaaaatcaaacaagatatatattgttatgatctcattcaatattgcctcttggtcctcagtcaagattattctcgaatccagggtggttggactacaatttcccagcttacacagatattaagccattgctgtgtgggcttggagccaggagaagatgcagaggaattttacaatgaattacttccatcagctgcagaaaattttctagttttggggagacaattacaaacatgttttatcaatgcagctaaggctgaagaaaaagatgaattactacactttttccaaattgtgactgattctctcttctggcttttgggaggccatgttgaacttattcagaatgtactacaaagtgatcatttcttacatttactgcaagctgacaatgtccaaataggatctgcagtcatgatgatgctacagaatatactacagatcaacagtggtgatttactcagaataggaagaaaagccctgtattcaattttagatgaagttattttcaagcttttttcaactcctagtccagttataagaagtactgctacaaaactcctactgttgatggctgaatcccatcaggaaattttgattttactgagacaaagtacctgctacaaaggactcagacgtctactaagtaaacaggaaactgggactgaattcagtcaagaacttagacagcttgttggccttttaagcccaatggtctatcaggaagtagaagagcagaaactacatcaagcagcatgcttgattcaagcctattggaagggttttcagacaagaaagagattaaagaagcttccatctgctgtgattgctttgcagaggagtttcagatccaaacgatcaaagatgttgctggagataaataggcagaaggaagaagaggacctcaaattacaattgcaacttcaaagacagagagccatgagactttcccgagaattgcagctgagtatgctcgaaatagttcatccaggtcaggtggagaaacactatcgggaaatggaagagaaatcagcactgattatccagaaacattggagagggtacagggaaaggaaaaattttcaccaacagaggcagtctctcatagagtataaagcagctgtcacacttcaaagagcagcgcttaaattcctagcgaagtgccgtaagaaaaagaaactatttgctccttggcgaggactccaagaactcactgatgcacgccgagttgaactgaagaaacgagtggatgactatgtcagaagacatttgggctctccaatgtcagatgtggtcagtagggagctccatgcccaagctcaagaacgactgcaacactactttatgggcagggccctagaagagcgagcccagcagcacagagaagctctgatagcacagatcagcaccaacgttgaacagctaatgaaggcaccaagtctgaaggaggcagaagggaaagaacctgagctcttcctaagtagatccaggcctgtggcagccaaggccaagcaggcccatctcacaaccctgaagcacatacaagcaccctggtggaagaagcttggagaagaatctggagatgagattgatgttccaaaggatgagcttagtatagaattagaaaatttattcattggtggaaccaaaccaccttagtgagtaaccctaagaattgacacaaatctcatattttaggagattatattggttctgcctctggcatgctggtagactagggccatcctaacttattattttccagaggttctcctccagacaagacctgcagtaagcaaagagttatattctacctctctctcaattttctttttcttttctctgtatcctcatcgttagccacacacagatttgtgtggcttttattgtagaactaaacttagcatagtgttctgttgtttacatgaagtgtgtttttctttggtttcttctgttttccaactaaatatttttttctaaataaatattttcaacaattgatttgaaaaatttgtcaggattatttcaacttttcacatttgttatctgaaattcctatttcctgttaacataggaggtgtgtgcagactttattaatgtgaggaaaagaaatgctcaattgaaggacatttccctgttttctataaagcaatggttgaactcattttctattttgttatttctaaaaggaactgcataccaaaaaaatgcattctttctattaaactgtgagaactacat

SEQ ID NO: 159 - DNA, 5010 bp, Homo sapiens
agccgcgatgccgcgatggagcgcagcccgggcgggcgccggggccggggcccgagcgccaggcggagcgcgagctggagccgcagccggagcccgggccaggccgggggccgggagcgcagggccgggctgctcgtagcggcggcgaccgagccccccagcggctgaggggcttccagcgcccgccggtggccgggacccactaaagcccccgcagccgaggagtgcggggagcccccttccacatccaggatccggcgagcctcggggaagagggggggccctcccggatccgacaccgagcgactcccctgcggggaaagcggagacttcctcggtatttagaagacagcaagccccctacggcaccgcaaggactccccctcctcagtctgggcccccgccccaagacctagaacgcagtgcccccaggccgggattgcgagaaccccctcccaagatccggtcattacaactccacacctcaagacaagaagacccagctcagaacgcccctagatcaggggatcccaattccccccaactccggtacatagaaatcccaaatctaggcagccggggacagcaagagacactctcaccagcaagaagcctcggggatcccccccctaaagctccaggacttgggcgactgagcccctggcggcaccgcttgcaccccggtccatggtcgtggcgccctgagcccccggggccgggcagacgaagaccgcgacggcgcccaggccccctgccgcggcgtccccgcggccccagcccagggagaagatgagcgtgggctgcccagagcctgagccgccccgctccctgacctgctgtgggccggggactgcccctgggcctggtgccggtgtgccccttctcactgaagacatgcaggccctgactctccgcacactggccgccagcgacgtcaccaagcactacgaactagtccgggagctgggcaaaggcacctatgggaaggttgacctggtggtctacaagggcacaggcacaaaaatggcactgaagtttgtgaacaagagcaaaaccaagctgaagaacttcctacgggaggtgagcatcaccaacagcctctcctccagccccttcatcatcaaggtctttgacgtggtctttgagacagaggactgctacgtctttgcccaggagtacgcacctgctggggacctgtttgacatcatccctccccaggtggggctccctgaggacacggtgaagcgctgtgtgcagcagctgggcctggcgctggacttcatgcacgggcggcagctggtgcaccgcgacatcaagcccgagaacgtgctgctgttcgaccgcgagtgccgccgcgtaaagctggccgacttcggcatgacgcgccgcgtgggctgccgcgtcaagcgcgtgagcggcaccatcccttacacggcgcctgaggtgtgccaggcgggccgcgccgacgggctggcggtggacacgggcgtggacgtgtgggccttcggcgtgctcatcttctgcgtgctcaccggcaacttcccgtgggaggcggcgtcgggcgccgacgccttcttcgaggagttcgtgcgctggcagcggggccgcctgccggggctgccttcgcagtggcgccgcttcaccgagcccgcgctgcgcatgttccagcgcttactggccctggagcccgagcgccgcggcccagccaaggaggtgttccgcttcctcaagcacgagctcacgtccgagctgcgccgccggccctcgcaccgcgcgcgcaagccccccggggaccgcccgcccgccgccgggccactgcgcctcgaggcgcctgggccgctcaagcggacggtgctgaccgagagcggcagcggctcccggcccgcgccccccgccgtcgggtcggtgcccttgcccgtgccggtgccggtgccagtgcccgtgccggtgcctgtgcccgagcccggcctagctccccaggggccccccggccggaccgacggccgcgcggacaagagcaaagggcaggtggtgctggccacggccatcgagatctgcgtctgagtcgcctccgccgccctcggacccgggagcagcccgggcccgccccgagccggtgcccggtgcggcggtagggaatggagccacctcgccgcggggcagggggcgcagcggtagactaggcaggacgcggcccggcacctggtccgtccccggcgggctggtgagggggccaccaaagacccctagcgcggcctggtgagcgggggcttggcccagaggagccaagccgcacagacccgagaattcggaggccaccacacaacacacacacacacacacacacacacacacacacacacacacacacacacacacacgccaggagcaagggagctttcgggccacactcccagacgcctccctgagccctggaacccggactcgttgctcctggccttccataccccctggcagatcatcctgcggtcccaccccagatcccctcctcctcgccatcccattctgccccctccccaccctgggtacagaaagggactgaagtgttgggcagagagggggcttaaggcccctgggcacaggctgggatcagggcagtgagcgaagggcagctgtgtcctgccctcccttctggaggctggaggggagaggccaagcccttggaaaatgtagcaaatgtctggatgtcgcataagtgcgtgtatgtgcgggacaggccccgagaagctagtgactcctgcacacccccattgcacaaatgaaatcacagcccaggagggagggtagcttggcactggctgagaaatagagctctctccccgcccctccccctaaccacaagggattgtcctgacaacttgtggggatagaagggctcacagggcaggggtctcagctgcccccatccttagggcaggggagttagtgtggagccgagagcaggtcccagctccccctgccagccgcactgtcccaggcccagggacctctgccgggtcctcccagcccttgccacacagcctagacgtagtagcctgggcttccagcaggtggcgagctggttcgtgctggaaatttctcctgggtttcttggggtcaaacatgccaacctccaagaccccatcctcacgtctcccacttttctggcgctggagtgtgcagggcgtaggacctgcatgtgtgggtgtgagaatgggggcggtggacaccagggggcgagtgtgtgactaggtgtgtgtgcacatgtgtagggtgcagacgcatgggtgccatcctttgcgttcagtgactgtgcgtccagacccctcaccagcggcccccccaccacaccctggtcctcccaggcagctgtcccagggcgcccaggcctgccttgcaccacagccctcaggaaatccggcaaggaggcccctgcaggttggttcaggcccccaggtagcaaaacagagacaacagcagccccgcctgaccccctgcccctctctgtggaggcccgggacccccgcaataagcaccacatgggtgaggctgtccctgtcagggtcccctgccagggtccctcctggggttctgggccatttgaggggctctttgatgggccaggccggccagagtgaactccgagcactttctggctggtgccccaacctctccactccccactcattcccaccttgaaaaagggctataggtcccctgccctgcccgggtccagtttacaaacagtgtggggtggccccagggcctggccccactctccctgctgtgcccactcctctccagactccacctccccagtgggtatgggccctccacatgccaggtaagtagcaaacccccactccctccaaggaccaggtctcagagaaggccctggtcactgcccccggcccacctggagcccatcggggctgcctctcccagccgcgacttctccttttgccttaggcctcgcgacatcctgatctctcctgcaataactaggaatcgagattccacagtagacgtcccttgccgtgctcgctctctctctcgcgcgcgctctctctctccctctctctctctctctctctctctctctctctctctctctctctctctcctctctttctctctctccctctctctgttaagatcctgttcgggagtttccccagccgttgtagtatctagtatgttagagttgggaggggaccatagttatgtagcccagccccctcattcccagaggcacccagagggccagcctccagcctgaccccagagcagaaccggaacaccaggttggggccctggtgctgccacctcctctgctggtcgggctgggaccctttgccccttaggagaggtgttggtcacagatgtttacctcagtttatgtcactgtcgaagaaacaaaaaataatagcaaaaaataacactgtagacatgaagacttagaagacaaaaaaaaaaaaatcacacaaaaaatctcccttgttgcgattcttctgtgaaggtacagtgtgtatgtgtgtatgtgtgtatgtgtgtgcgtgtctctgtcccagaccctgtgtcccccacactgccccctgtccttcggtgcttcccagagacccctctgagctggcctgtggggcacgggaagccccctggatgggaggcggggccacaggtcggctagagggtctccaccaggcccactgaacagaaccccacggctgccagaatgttccctgagcccacactgtggccagtgggacagtcctggtggctgacatcagcgtccatgcttggctcagggcctggggcggggtcctgggtagagtcctagccccagagccccagcccctcatgtcttgccgcccttcctccatgtgtttgtaaatactctggcatcctttggccctgagaaggtttttaaatgtgttatttacttctctaaacatgacgattgctataaaaataaacaaaagtttagaaaaatgaaaaaaaaaaaaaaaaaaa

SEQ ID NO: 160 - DNA, 3419 bp, Homo sapiens
ccggcctcagggacgcaccggagccgcctttccgggcctcaggcggattctccggcgcggcccgccccgcccctcggactccccgggccgcccccggcccccattcgggccgggcctcgctgcggcggcgactgagccaggctgggccgcgtccctgagtcccagagtcggcgcggcgcggcaggggcagccttccaccacggggagcccagctgtcagccgcctcacaggaagatgctgcgtcggcggggcagccctggcatgggtgtgcatgtgggtgcagccctgggagcactgtggttctgcctcacaggagccctggaggtccaggtccctgaagacccagtggtggcactggtgggcaccgatgccaccctgtgctgctccttctcccctgagcctggcttcagcctggcacagctcaacctcatctggcagctgacagataccaaacagctggtgcacagctttgctgagggccaggaccagggcagcgcctatgccaaccgcacggccctcttcccggacctgctggcacagggcaacgcatccctgaggctgcagcgcgtgcgtgtggcggacgagggcagcttcacctgcttcgtgagcatccgggatttcggcagcgctgccgtcagcctgcaggtggccgctccctactcgaagcccagcatgaccctggagcccaacaaggacctgcggccaggggacacggtgaccatcacgtgctccagctaccagggctaccctgaggctgaggtgttctggcaggatgggcagggtgtgcccctgactggcaacgtgaccacgtcgcagatggccaacgagcagggcttgtttgatgtgcacagcatcctgcgggtggtgctgggtgcaaatggcacctacagctgcctggtgcgcaaccccgtgctgcagcaggatgcgcacagctctgtcaccatcacaccccagagaagccccacaggagccgtggaggtccaggtccctgaggacccggtggtggccctagtgggcaccgatgccaccctgcgctgctccttctcccccgagcctggcttcagcctggcacagctcaacctcatctggcagctgacagacaccaaacagctggtgcacagtttcaccgaaggccgggaccagggcagcgcctatgccaaccgcacggccctcttcccggacctgctggcacaaggcaatgcatccctgaggctgcagcgcgtgcgtgtggcggacgagggcagcttcacctgcttcgtgagcatccgggatttcggcagcgctgccgtcagcctgcaggtggccgctccctactcgaagcccagcatgaccctggagcccaacaaggacctgcggccaggggacacggtgaccatcacgtgctccagctaccggggctaccctgaggctgaggtgttctggcaggatgggcagggtgtgcccctgactggcaacgtgaccacgtcgcagatggccaacgagcagggcttgtttgatgtgcacagcgtcctgcgggtggtgctgggtgcgaatggcacctacagctgcctggtgcgcaaccccgtgctgcagcaggatgcgcacggctctgtcaccatcacagggcagcctatgacattccccccagaggccctgtgggtgaccgtggggctgtctgtctgtctcattgcactgctggtggccctggctttcgtgtgctggagaaagatcaaacagagctgtgaggaggagaatgcaggagctgaggaccaggatggggagggagaaggctccaagacagccctgcagcctctgaaacactctgacagcaaagaagatgatggacaagaaatagcctgaccatgaggaccagggagctgctacccctccctacagctcctaccctctggctgcaatggggctgcactgtgagccctgcccccaacagatgcatcctgctctgacaggtgggctccttctccaaaggatgcgatacacagaccactgtgcagccttatttctccaatggacatgattcccaagtcatcctgctgccttttttcttatagacacaatgaacagaccacccacaaccttagttctctaagtcatcctgcctgctgccttatttcacagtacatacatttcttagggacacagtacactgaccacatcaccaccctcttcttccagtgctgcgtggaccatctggctgccttttttctccaaaagatgcaatattcagactgactgaccccctgccttatttcaccaaagacacgatgcatagtcaccccggccttgtttctccaatggccgtgatacactagtgatcatgttcagccctgcttccacctgcatagaatcttttcttctcagacagggacagtgcggcctcaacatctcctggagtctagaagctgtttcctttcccctccttcctcctcttgctctagccttaatactggccttttccctccctgccccaagtgaagacagggcactctgcgcccaccacatgcacagctgtgcatggagacctgcaggtgcacgtgctggaacacgtgtggttcccccctggcccagcctcctctgcagtgcccctctcccctgcccatcctccccacggaagcatgtgctggtcacactggttctccaggggtctgtgatggggcccctgggggtcagcttctgtccctctgccttctcacctctttgttcctttcttttcatgtatccattcagttgatgtttattgagcaactacagatgtcagcactgtgttaggtgctgggggccctgcgtgggaagataaagttcctccctcaaggactccccatccagctgggagacagacaactaactacactgcaccctgcggtttgcagggggctcctgcctggctccctgctccacacctcctctgtggctcaaggcttcctggatacctcacccccatcccacccataattcttacccagagcatggggttggggcggaaacctggagagagggacatagcccctcgccacggctagagaatctggtggtgtccaaaatgtctgtccaggtgtgggcaggtgggcaggcaccaaggccctctggacctttcatagcagcagaaaaggcagagcctggggcagggcagggccaggaatgctttggggacaccgaggggactgccccccacccccaccatggtgctattctggggctggggcagtcttttcctggcttgcctctggccagctcctggcctctggtagagtgagacttcagacgttctgatgccttccggatgtcatctctccctgccccaggaatggaagatgtgaggacttctaatttaaatgtgggactcggagggattttgtaaactgggggtatattttggggaaaataaatgtctttgtaaaaagcttaaaaaaaaaaaaaaaaaa

SEQ ID NO: 161 - DNA, 3651 bp, Homo sapiens
tgtgagtgtgtgcgtgtgagagtgcgagtgtctgtgcgcgagtgagtgagcggcgggcgggcgcgagtgtggccgccgcggagcgcgagcaggacccggcgggcgcgctccccagcctccgtctccccgccggaaccatgtcgggcaggtcggttcgagccgagacgaggagccgggccaaagatgatatcaagagggtcatggcggcgatcgagaaagtgcgcaaatgggagaagaaatgggtgaccgttggtgacacatccctacgaatctacaaatgggtccctgtgacggagcccaaggttgatgacaaaaacaagaataagaaaaaaggcaaggacgagaagtgtggctcagaggtgaccactccggagaacagttcctccccagggatgatggacatgcatgacgataacagcaaccagagctccatcgcagatgcctcccccatcaaacaggagaacagcagcaactccagccccgctccagagcccaactcggctgtgcccagcgacggcaccgaggccaaggtggatgaggcccaggctgatgggaaggagcacccaggagctgaagatgcttctgatgagcagaattcacagtcctcgatggaacattcgatgaacagctcagagaaagtagatcggcagccgtctggagactcgggtctggccgcagagacgtctgcaatctctcaggatctggaaggagtgccaccctctaaaaagatgaaactggaggcctctcaacaaaactccgaagagatgtagacgatgctttaaagcctccgatccatgttccatggaaggtacatcagcaattaattctagagcaactttgccccagcgattcctcttgggtgcgaacagaactactaacgtttcaagtttaccaagtgcaaatccaagaagacccagaacggcgtcacttctcagacactgaagaactctgctgtgaagcaaaacactcaaacctttaagggactgtccttggggaggcaggcggggctgacagctcaggagtgtctgcacactgtctcggaagccaggattccatttgtgttgctgctgtattttccccccacttctctatgtaacgatataagctatcggagggtggtaccgatcaggaacgctttttggcggggctttccactgttcaaccgattccttccgctttctttttttgtgccttgtgcccttgaggtgacctctggcatgtatcctggtggttcttacatccccctctgcaaagtgccctcttggtttggttcgggcggcggctgccaccctactcaccgctctcctccctgccccaggacttcatcggagcaggcagggtggagcgaaggagctccttagcccacctggtttgcaggtgcagggggaccttaggcacgccccaagcaccaggcaccagggcccaaggacgcgcaggtgttggggcacagtccccaagggctcggccccttggatcaggctgggcactcgctgtgctctcccctccttggggcgtttaggactgggcgtctccaagcccaccatggcccagatggacgtgcaaagcccttggaattttctggcacttcctctctattgcccccaccaccaccacccccatcactgctttctcccagacctccgaatacgaaatggcttctctggctgactgcaaggctgtctccttaaggcactgagtgggcgggggaggctgggagccggcggcaggattagctggtgctgaactttctctcataggacgtcgcttggatttcaaatccacggtcacctgctgccctttgcctcccccgacgccccagcctgtgccccggagaggcaggatcgcagtggtcagaatccacgtgctttcctattctcaggctgttctgactctgagccaacagctggaccgtgtctcatccccagaacatgccgtctgtccccaccggggagtgggccttgatggccgggcctcgaaggccacaaacaaggcgtcgaggaattggaaagatttgcacaccctccagaaaggagagacgcaatctcccctccctcccatcccccaccttcgctggaacagcttcctctcactgaacggagacgcccccttggacgaactgcctaatcgtttggttctgaggcctggtttgctcttaattaatatatgaactcctcagaccttaaaccttttcctaagctttctttactgcactggagttctgactccctttgagttgtgtgttactgggggtggggtggggtcatgggttttgttgtttttgggggctaattggtgcatattcaggtaccacctttgacgtgtggctctttctcctgaccatcatgggaagtgtctgctggattccattttctaagagtttctgagggtgaggctcttatttttttttttaagggatcctgtctatttcctgcacttcgagaagaatcaaaatgttcctgaatttcaaatacctcatgcaaaatgtctcctgaaataagggaaaaaaaaaaaaccacaactttgaaaatcttaatgttgaagttagcaatgccgaaaggtttctgtcttaaaaaaaaaaatccttgtacttatcaattttgccccttaggcagtcagttttgttgagaactgtgtcctgcatcctggcgcagaacctacctgatgcggttcctctccacgcatctcgaggcggcgttacctccagattccgtagagttagagtcacatttttctttgcagcgaaactccatcttggtgagagatgaatttggatatttatttccttctctgtttttgggaaatgagaggctacaaccaagacagctgaaggagaatgaaacacacacatccacagaaacagagaggcgtaggtggccctgccgttgaccgcagcctctctggacaggcaaggggagttggcgcaggtgaggactcagacgacgtccaccgtcccaaggctgtcactagtatttctctgaagtgcctgaaggtaggaatgggccggcgattgggaccagctgggccccaccacggccacgccaggcaaagcgccagcagccctgcactccacgctggccaagaaggccttccacgcagaatgacaagactgcaaaaatccgatgtgcttccttccctggcgcagtcgctcctcgagccgctgccccccacccaccctgcacccctcgccctccccccaccacagaatctaagacctttcagcttcgagccagggggcgggggatcccgagcaaaagccttccgtggacatcaggccccgtggcctcaagggctcccagggcaaacctaattccccccaaaacgtgaagtcggggaagctgcggctacacattccacaaagtgctggcacttacacccacaacccggaaggctgtggaccgattcctctagggtggtgacctcccattagcaaacggtgtcatggtttggaatgttcattatcgccaagaacctggttagaggcataaagaccttttttcaccgttacctaattttttcccctttcaagaattttttttttttttggtgtgttgtacagcagtataatttttcacttatttattccatcagtagatatggtttgtacaatgtacaattgtttcatttcagaaaataaaaatttcaaatcatgaa

SEQ ID NO: 162 - DNA, 3396 bp, Homo sapiens
gcgctggccgctcgcggagggagaggctgcagagcgagggcaggaggactacttccagcaacccagtctcctgccatgtccgaccccatcacgctgaacgtcggggggaagctctatacaacctcactggcgaccctgaccagcttccctgactccatgctaggcgccatgttcagcgggaagatgcccaccaagagggacagccagggcaactgcttcattgaccgtgacggcaaagtgttccgctatatcctcaacttcctgcggacctcccaccttgacctgcctgaggacttccaggagatggggctgctccgcagggaggccgacttctaccaggtgcagcccctgattgaggccctgcaggagaaggaagtggagctctccaaggccgagaagaatgccatgctcaacatcacactgaaccagcgtgtgcagacggtccacttcactgtgcgcgaggcaccccagatctacagcctctcctcttccagcatggaggtcttcaacgccaacatcttcagcacctcctgcctcttcctcaagctccttggctctaagctcttctactgctccaatggcaatctctcctccatcaccagccacttgcaggaccccaaccacctgactctggactgggtggccaatgtggagggcctgccagaggaggagtacaccaagcagaacctcaagaggctctgggtggtgcccgccaacaagcagatcaacagcttccaggtcttcgtggaagaggtactgaaaatcgctctgagcgatggcttctgcatcgattcttctcacccacatgctctggattttatgaacaataagattattcgattaatacggtacaggtaaaaggaccccaacaacactggagatggggagtcccaagaagctcatgtcagccaggtcttggagggcatctcgccagtggtgcgaggcaggggactatactaatctgtattaattgtgtagcaggacttgattccccccatgatgaagtccaccttttggaatccagtgtcctctgaacagaaccaccttttttcttgccattttgagctgcagacaggcggtttattatgacaagtgaagagtcagctgatgtgtactaaaggaggccataggaggattttccagccaggacaaaagagcagcagttttctcctgggctccatctctctgtaccgctagccagtgccgcatttatccatctgtaagaaggccctggtggagaggatgggatgagaacaagaggctacctccagttaaccaggacataaagtccccagcggttcctgtcacacctgctcctccctccccagggtgcatccatgatcgtggatgtttgcccaggggtgaccatgtttggctggcttggaatgctgtgcattctcagagctctgttagtgtcccctcttgggggtcagagatgaggtgtggcagggtctagaggaatgagtgtccaggcagagttcagaaggtaggaatgtccctcttgatagggctgaatcaagggattcctggctttagaaagggtctgctatctttgcaaaaatgtgcaagtatctgtagccagtgtaatgaaatcacttccaaatccagcctgttacctgacttttgtcattgttttcccaaaaatttgaggtatcattgaaacaggtcattttaaacaaatctattacggattctcagggttggaaataattcgatgattgcttagtcctcccccacccctagaacaccccagcacatctgaagatgagcgcctctccctgggtacctgcaagtgatcaccttggcctgcttgcataccttggctgataggaagcgcgccatccccaaggcagctcctgctgaggttggacagtgctgactgttagagagttcttccctatattgagccaaaatctgtcctgccacttgctggatcttggttgcagaccttcccattcacccagttatatatctttgctttcaaaatagtcaccttgagagaccagacatttttctgaaaacatcattactcagaattcagattcccctctgggatctgtcttcagaatcaaagttagctcttttctatcccctgtaagtcagtccccttttgttgtagcttcacctcgttcgtgacccccacttcacccaccttccccaccatctgtggctccatatacctttcgaccattttctgctggaagaggaagattcacggcccctgaggagatccagaggaaagagacggtctccaagggtgctgtgcagcaaggagcccaggagtggtatgaaccgtaacagtgcccttagagtaaatgtgcggcccctaagaccctgccctcaggaaggcggccttcccctgcagtcctgtgtcccacccctgggtctctgtagggtgccatccagggcaagcaacccaagcactgcttcccaccgggtgatgagccatgcaggcctccaaactgcacgtcatgattcatccctaaagtgagtttggccttgagagtccccagggtcctcccccactgggcaggggtcctcaaagccaaggaagcctggtgacacaggcacccatgggaggtgggcccagaaaggggcttcccatagataggccctgtgagtagggagcttgtacactgggccatgggcagcgccagttcccttgagcagtaaaggcccttttccccctacggtgggacccaggagtctctctgacagcttttctgccaggcacagtggctcatgcctgtaatcccaacactctgggaggccgaggcgggaagatcacttgaggtcaggagttcaagaccagcctggccaacatggtgaaacgtcgtctctgctaaaaatacaaaaattagctgggtgtggtgacaggcgcctataaccccagctatttgggaggctgaggcagtagaatcgcttgaacccagatagcagaggttgcagtgagctgagagtgtgccattgcagagagactccatcccaaaaaaagacagctgtcccaggccaagggtacttgggagagcccctcatggagaacctagtttagaccaagtagcagaagctgtggtcataacaaaacaatttgaggaagaaatcttacaaatcaccactgccctttctccttttccataaaactgtccatcttttcggtgctccctaatccaagcagcttgactttagagaagttgcagaagcagtgaagccactaacatgctgtgtgactttatgcaagtcactcacctcactgagccacctccatttcttcatctgtgaaataggcataacagtaatacataaccctacctacctcacagggctgttgtgaggatcaaatgaaataatgtaacgtgagaatacagtataaatgataaaagaaaaaaaaaaaaaaaa

SEQ ID NO: 163 - DNA, 3783 bp, Homo sapiens
gtattctgaggcgcgtggtagtgatggcggcgctcagtgagactttcctgtcactggctactactactcccaaccctcctcaaagccgccggagcaacccccaggtctttactttacaatcggcaatttgacttgctctgctgcatgtctggagggaccaaggaaagtgtggagacgctccaaggattaggtgatcggagcttgaaaagaaaaaaagccaaacaaataaacaaaacccacccaccctaacaaatatgaggctgctggagagaatgaggaaagactggttcatggtcggaatagtgctggcgatcgctggagctaaactggagccgtccataggggtgaatgggggaccactgaagccagaaataactgtatcctacattgctgttgcaacaatattctttaacagtggactatcattgaaaacagaggagctgaccagtgctttggtgcatctaaaactgcatctttttattcagatctttactcttgcattcttcccagcaacaatatggctttttcttcagcttttatcaatcacacccatcaacgaatggcttttaaaaggtttgcagacagtaggttgcatgcctccgcctgtgtcttctgcagtgattttaaccaaggcagttggtggaaatgaggcagctgcaatatttaattcagcctttggaagttttttgggcatcgttataacacccctgctcctgctgctttttcttggttcatcttcttctgtgcctttcacatctattttttctcagctttttatgactgttgtggttcctctcatcattggacagattgtccgaagatacatcaaggattggcttgagagaaagaagcctccttttggtgctatcagcagcagtgtactcctcatgatcatctacacaacattctgtgacacgttctctaacccaaatattgacctggataaattcagccttgttctcatactgttcataatattttctatccagctgagttttatgcttttaactttcatcttttcaacaaggaataattcgggtttcacaccagcagacacagtggctatcattttctgttctacacacaaatcccttacattgggaattccgatgctgaagatcgtgtttgcaggccatgagcatctctctttaatatctgtacccttgctcatctaccacccagctcagatccttctgggaagtgtgttggtgccaacaatcaagtcttggatggtatcaaggcagaagggagtgaagctgacaaggccgacagtataacaaaggaggtggactttctgtagcaatgtatatatgtacaggattgtacatactagcaattctgaagacttgtacttgtgaatgttgcctcaatgcatattttatttttttacacaaaaatatgagatcctgtttaagtgccttaaaatgtatttgacaagagcgttatttccaaaatatgctttgttgattactgccaggggtggtacaatatttgggggttaattttgctttcctaatgcaggaatcagtcatggtaagtgacaaaaagcaaacatgctttccctgcagcacctttgtgcaatacaaccctatagtagttactgtaatgtttgaaatgaggtcacaccatcaggaaaatgcccttctgatgacagtgaaaatttccaaagtcttattcatgcatactttgatttactgtgtgattctttttttctacgactgtgacatgcctcttccttatcaactcagcaggggtcatagatcgaatagatgctgaaaagcgtaagatatatgcattccttgacatcatttttaaagacattccttcaaatagtttccacacagaaattcctcactcccattatgagagattgtggttatatgtcttaaatttattataagctgcttcaaagaaagggtctgaatgtttgaattatgagtgaaatcatgtgaaattttgagttaaactctgtgatttgattttcagggtctttaaaatatatcttaatatcttcttcctctttattcaataatttctgtcttgcacttacacactcataacagccaaatatgaggcacaaaaatgttacaatcagtttgaaagcagcatcaattaatggtagattctattcacattccacaacccagaccaaatttttttcctattacgcagatgtgctgagcactttccagattgcccctgttggccaaaagcagcctgttacatcctggaattaagcacacttaaggtatttgagacaatttattaatgaaaatttccttggcagatttgacaaatgttggcaatatttttttagaagttaaatcatattgctttcatgaataaatgaaaatataaaggtcatggatgcaaacaaatgttacatatacacattctgtctctccagatgaaaagaacatgcaaaaccatttaataaccaaaatatcaagtaaaattagttcccaacggggcagcagctttcaaatgagtgtccaatatttgcttctgctatagctgcaagaactgtaactggacccaagtagagaatgaagccacgtatagaactacgagaacacttttctgtgtttcccccatgccgtcctgtcacatcctcttacacgtcctctcttgatttgatagacaatattggcatcctgggtctcactgaggccgtgctatgtcctcagcagctgtttttgttgtttcgttattatgcccacaacaaaaaatcattccttagaaactcaccaagtttatctactgtgtaaatttatattattgttactaccaggtctcatcttttgtcaatgtcattgaataaatttcataagagttattctcagtgtgaattttaaggctaatgccagatcctgcaaaaatctatgctaaccaggctgtagtacacactgttataaagaattttacttgtgtctaaaactacagtaattttgcttaggtaattgtgcttacctatggagcacaggaaggctcttaggttttgttcctacaagtttctttgaattttggagtaaatggaagtgtctgtctgtctgtcatctatctgccctatcataaaaatctttctccctaacattaaaatactgatccccgcccccaacttatctacctctattgtctaacacctatagtaggtgtgatcatgggataaaattcaactgaaaatgctatgataacattttatcgtttgctttaaaaatgtgctttgttttcaaataatctttacatagtgaactttggtggcgttagtgatatgtttatgcctatttcttttttttacacaaattccttggcatattttttcataaagaacaaaaaataaaatcaaaatttatttttaattcatgcttattgggatttaattattcagagcttaaaatattttgttatgtttatacactgtaaagctatctgttttatgcatttgttttgtctaaatgtatttatgaaagaaatacattagattatatttatgtttactcatttttccacctggattttttttaatggttgttacaaaattagattttttaatgggtaataatgttggtattttcatgttttttcttagtattaaaatttttgtgggttttttaaaatttttccctattctgttaaaaattaacacacctctagctaatgttcagtgtttgtgctaaataccaaattttttcaaaaggattggttaagtcataaagtggattatttatgatgactggaagatgaaaataattatatgattaaacaaagaatgtttcagaaatc

SEQ ID NO: 164 - DNA, 4042 bp, Homo sapiens
gatttccgcccaatggagggcggtctgagcttcgctcacgaaaggagccgggaggcgctggcggctccaagagtctctgtgtccctggcagcggacctcatcttccctcacgccggagccccgatctctgcgccccggcccgacccagctgcgctctgtccgtctaagacgcgcggaaactacaactcccagagctcatctcgccgagatccggccccacgagtcaggtggcggaggtcagattgctttggagacgctgagagaacctttgcgagagcgccggttgacgtgcggagtgcggggctccgggggactgagcagcacgagaccccatcctcccctccgggttttcacactgggcgaagggaggactcctgagctctgcctcttccagtaacattgaggattactgtgttttgtgagagctcgctaggcgccctaagcaacagagttctgagaaatcgagaaacatgataaggaattggctgactatttttatcctttttcccctgaagctcgtagagaaatgtgagtcaagcgtcagcctcactgttcctcctgtcgtaaagctggagaacggcagctcgaccaacgtcagcctcaccctgcggccaccattaaatgcaaccctggtgatcacttttgaaatcacatttcgttccaaaaatattactatccttgagctccccgatgaagttgtggtgcctcctggagtgacaaactcctcttttcaagtgacatctcaaaatgttggacaacttactgtttatctacatggaaatcactccaatcagaccggcccgaggatacgctttcttgtgatccgcagcagcgccattagcatcataaaccaggtgattggctggatctactttgtggcctggtccatctccttctaccctcaggtgatcatgaattggaggcggaaaagtgtcattggtctgagcttcgacttcgtggctctgaacctgacgggcttcgtggcctacagtgtattcaacatcggcctcctctgggtgccctacatcaaggagcagtttctcctcaaataccccaacggagtgaaccccgtgaacagcaacgacgtcttcttcagcctgcacgcggttgtcctcacgctgatcatcatcgtgcagtgctgcctgtatgagcgcggtggccagcgcgtgtcctggcctgccatcggcttcctggtgctcgcgtggctcttcgcatttgtcaccatgatcgtggctgcagtgggagtgaccacgtggctgcagtttctcttctgcttctcctacatcaagctcgcagtcacgctggtcaagtattttccacaggcctacatgaacttttactacaaaagcactgagggctggagcattggcaacgtgctcctggacttcaccgggggcagcttcagcctcctgcagatgttcctccagtcctacaacaacgaccagtggacgctgatcttcggagacccaaccaagtttggactcggggtcttctccatcgtcttcgacgtcgtcttcttcatccagcacttctgtttgtacagaaagagaccggggcttcaggcagcgcgcacaggctctggcagccgtctcaggcaggactgggcaccaagcttgcagccgaaggccttgccccaaactaccagcgtttctgcaagcagcttgaagggctgaccttgcagccgggtgagccaagggcactttgctgccaccgctgcattcccagagatcaagcagcccggtgccgtggccagtgaactcagaggtgctggtggacgggctaggactttggggttaggccatggggctctttctctgaaggccactttcctgacgtactctctgtacataactcagcgtccgtgactgcagtaacagccagccctacccagagtatttctgagccatgaggggcccaccagattggttctgaattggattcatgcccagcgcattagcatagtaactcctttcagattttttggagggacgtttggaagtggcttactctcttctgccctctctcctacctccaccttctcagattagccccatctgagcacatccagctgctccttacccagcatctggagtacaggacatagctctctcctgctaccagtctgtgccttagaggtctgttaggcctgccaaacggcgaccagctcccctggagcgagggcaggccccttccctctctttccccagacacctacttgagactcaccaatttctggcctgttcaggagcctcagataagtatttgtacttgagaccacctcacacaatctgtatgggcccaaccctgatctcaaacctccttccctctgcccaaagctgtccttcctatggcaggaggggtgggggtcccaggacgtgcctcatacatgacttgagcttgtcagtccactgagtttccttctacgagatcaacgcgaggggcctgtatcttgaattaaaacctactcgcttcctttctgcactctgtgtgctcgatacagaaggcaggtgtgctggccttcagagccaggtgccctgctcccctcgtgtaaggaagcgcataaggttgtgaaggtcactgacccgagagcgctgcgtgctgaccccacacttcactggggagccctcttgggtagcgcgagacgcctacccgcccagggccaggtcagtctcccaggctccgtgtcttcacggttaccagggcacgccactcaatctggatgtgagccggggtggatgaggttctgaagggcacaccagcactgggagcgggggcagtgggggtcttattctccagacgcttcctctatctagttgtaacaaacgtcaaagaatgtcaggtcttgtttctgcagagcagactttggcctgacggggtccacagacctgtttcacttgcaacacccagtaaatgtgttactgggtgccctactttaaaaatcagagatttcaaatgattgacttttccggctgagtgcggtggctcacgcctgtaatcccagcactttgggaggccaaggcagatggatcacctgacatcaggagttcgagaccagcctagccaacattgcaaaaccccatctctactaaagatacaaaaattagctgggcatggtggcgggcacctgtaatcccagctacttggttggctgaggcaggagaattacttgaacccaggaggcggaggttgcagtgagcgaagatcacgccattgcactccagcctgggcaacaagaacgaaactccatctcaaaaaaaaaaaaaaattattgacttttctttaaaatctgatttggcagtgctaggtaggtccaggagtgctaacaccttcccagaggtggtacgcaggtagtcaggtgctctctgactcacccccatctggccagatcacggcccccagcaacacgtggggttgtgtccctcgctgggatacacggagtgcccttataggcagggagtcttataggcaggggtctctcccaggcacctctgggtgtccctacggcccctcccaggtgggagctgaggctaggttgcaaaaaggaggttgggagcaagtaggggcttcacagtaacacccaagaaagcacacgcaccccagggtcccaccccagtgctcccagacactcccacagatgtggttctggtcaggcgcagtgcagctgctgcggctccaccagccccgggctttcaggcaggtgggcctgggagtagttgagctttgtcccagaacagtgggggatggggccatcattaaaaccacagctctggccccaatatcccaccgccacccccaccccgatatcccagcccatgcctcagcaaagccccctgtgaattccagcatttttattgagcgcaccacatcggggaggggcggcagtggtttccacggtaaccaaagtaaggcttgtgcacttgctgagcttccagatgcgaattagtaaaagctaaattcaaaagtagaatgggcatctccaaagagtacgataaaaacattttgtatcaaacttgtgattaaaaaaatacaaaagttaaaccca

SEQ ID NO: 165 - DNA, 6997 bp, Homo sapiens
tccagcaggcctgcttctggagttgggagatgtcagcctgctgggagggggtggggggaggaggaagaggtggggctctactctgattaattaccttaggcattcaggggtggggcttccttcagccatctgcctgagatatgggagggagctggagaaagaaggagggggagagactgccagagaggaagagaaaagaaaggaagaaacattagaaagaaaaaggaaggaaaacggtataaagagagatcaattacccacccttaaatagctagattggggggggaggggggtggaaaagaaagctgtggaggtgtgccccagcacggctgctttgaaaggtttatcatctatccgtttggtttatggagaaaaagaaaatggtaactcagggtaaccaggagccgacaacaactcctgacgcaatggttcagccttttactaccatcccatttccaccacctccgcagaatggaattcccacagagtatggggtgccacacactcaagactatgccggccagaccggtgagcataacctgacactctacggaagtacgcaagcccacggggagcagagcagcaactcacccagcacacaaaatggatctcttacgacagaaggtggagcacagacagacggccagcagtcacagacacaaagtagtgaaaattcagagagtaaatctaccccgaaacggctgcatgtctctaatattcctttccgcttccgggaccctgacctccggcagatgtttgggcagtttggcaaaatcctagatgtagaaataatctttaatgaacgtggctctaagggattcgggttcgtaactttcgagaatagtgctgatgcagacagggccagggagaaattacacggcaccgtggtagagggccgtaaaatcgaggtgaataatgctacagcacgtgtaatgaccaataagaagatggtcacaccatatgcaaatggttggaaattaagcccagtagttggagctgtatatggtccggagttatatgcagcatccagctttcaagcagatgtgtccctaggcaatgatgcagcagtgcccctatcaggaagagggggtatcaacacttacattcctttaatcagtctccctttagttcctggcttcccttaccctactgcagccaccacggcagccgctttcagaggagcccatttgaggggcagagggcggacagtatatggtgcagtccgagcggtacctccaacagccatccccgcctatccaggtgtggtttaccaggacggattttacggtgctgacctctatggtggatatgcagcctacagatatgcacagcctgctactgcaaccgcagccaccgctgctgcagccgctgcagccgcttacagtgacggttatggcagggtgtacacagccgacccctaccatgcccttgcccctgccgctagctatggagttggcgctgtggcgagtttataccgaggtggctacagccgatttgccccctactgaagtgacgtgagacccctgcaaatgggacagccccccagttcatgaggcctggctattgcaatatttactagtagaggaactctatagcaagatgaagaggaaaaacaaacaaacaaacaaaaaaaaacacaaaaaaagaaagaatacttttttatacctcactatgttctttgaatatgtatttttcctttaaatttctgcctttaattcttttgttccaaagattgtgcatttttttctttttttttttaaactgtggtaaaaaaaaaaaaaataatgcatttccatgtctgtatgtccgtgcttagcttattctatcaatcacggaagaggcagtcaaggaggaaggagagacattaggagccgataaatgcatctgatcagaaatcagcagacagaattaccaaagtgtatctggtgctgaatgactgggggacaagcagaagtggaagagatctttctgcaacaggatattcttctagtcttctgagtttctggtctttgacaggcaattctggttggctgtggctggaatccacatgctgatagataggaatttgtgcttacaaagcaggagaattaaaaagacgctttcctctcctcttccctcctgtcttctccgttctttttacaatcatcttacacgcacagcctgagacagctggcatagtttttggaattatagtattgatatttccaaacgtgctctcagacagtggataataaacacctcattaggaaaccgatctcagaatgaactctggagtatgaaaaagatcatttctttttgttcctgtaacctagcattccttctaggcttcttctcctttaattgaaccacagcttagctcatgtattcttttattaacaccctgctctcatgtccataagattcaggaatttaggacccagggacagaaaagtgaataagccagtgaccagatttcccccagatgtcttgaggattagaagtacaaattgttgacagccattaaagagggtgaggaagggaaaaggaatattagaagatctggtatttcttacttttttcttgcctcagaaagtacaaagtttaaaaaatagaataaagaatctgctggggaaagatagagtaccaggtcctaggtcagtagtccctggaagttttggtgatgaggacatggaagggcaggcagaggcactttgtacttgctccaaagccataggaattttcatcttccagagcctttatgagtcacttctctatccacagtcttgagcctgtggctatcccgctgagcttctcactgtcctccaaaaacaccccgctgagcacccggaccactttgtacacattaacactacaggacataaaatgcagaggccctgagattgctgccctcccatattggaaggagggtctgcgatggcaagggtcttctatatcaccagaaagagtcgcgcagtgagtcactgccgttgccatctggctgtaattttctatgttatcaaggtaggagggagtgtttctcttctagctgttagatagaactgataaaagcaagtgtcctacagcatttcccaaatgaaggcattaggaaatagaaaagcacggtctttttggctccctggtctagtcacattggtactagggtgacctttcacccaagggacagctgctaaagggagtaattcagagacatggagcttctggttatgggtttgttttgggtttgtttttaactcctgcctccacacatgttcttgactgataactgactcatgtccctgaattaaaatgactgacctatgacagcatcaagcattctttgtaagcagagtgatatatctgagagggcgttgacctgttgtgtagaatacatatcctttcccccttcagaatcctgtctcgcctcgtaactgggagagaggctgtgcctgaaactaggggcgatgtcaaggaagctagaggcctcgatgcaattattactgactctggggaggaagacagagaataaggggacaccaactgcccagtccactggccatttttaagggtccccccaccccaagccaaagtttggtttgttgctgttaagacaatttttgttgtatgtatataaatattttagttagaggagcggggaatgggatgcgggctttcacagttctagggaatgggggcagggaggattttgcttttgcttttgctttgagggagaactttagctgactaaaaaaacagaagtttggggtcatgatcacaaaggggccattcccaaaagatggcaagccacgtattcagtggagactaggccaaattctaaatggttttatccatagcaggggagaataggagaatgagtttaagagtttttctcttcttttttcctagaaagaggtaaggataatgggaaaggtagagaaggcggctcccacagaccttttaagagaggcagaatcttgagcttgaggcaccttgagtgcatctcagttcagctggttctggctgaggcctccaaaggcaagctctgtgctttccagtggtttctgctgcatttccagggatggtgtttaacaccgcttcctccagctcccttttctaagaaagaataaatggagttctgctttttatgaaagggtctttggttttcagtgtcaacactgagaattggggctcttgcaagcatctggatttcacagtatcaacctccccgtcaccttttgaactttgagactccgtacggtcaacttcaccagaggcaggttgctcgaagcagcactgcttgtctgttcctgactctggttctcactgtattaaaaaagagagtcagaggagtctggcatttcgtgagtttgttagaggatgctggctgataattccagaaaacttactgatgctaaatcacagtacatgcatgattctttttcagctttactatagttcatgacctggactttctgtactcttggaagctgggctccttaaaggaggcctctagtgaacacctttatctccatgtccctcttagagcccagagagctgcccataggcattttccagaattcctcatgtcacctagttcaatttccattaactcagatcagccattgtgattcaccatttgtcaggctctcaggtttaacaaaacctactatcaccatcatccttcaacagccacagtctgaattgagccaacatttttttttctttgagaaagaagtggactggggcacaacttttagtctgaggggagctagtggaaatctagacaatagaagtcatcgatagcagcttttcctcaaatgtgtgactcctcaggggctaaactgctcttagcttagaattatgctttactagagatctagcagataagtgggttaatcactaccatcctgtaactagttatatagcttccagacatgagggagacatcaaacagggatggaagcaaccccaaggatatgcaagaagggcatgatgaacccccttccctctggcaggagaacaaggccaaccaagggacagactggaaagcacttagatgtttaaggaggagaaaggggaagctttgaccagtccttgccttttgccaagttcagccagttctccgctgcttgcaacctctagcgcagtaacatttgcagaattgcagattttcccccagatactaggaggaaagggactttggggggtggggaaggggtcgtggtgttttaaaagcataagttacctgtttgcactgttttaagataggaaaaaaaaatagtgggcaaggtgaacatcagacgtaaatttgtgtgtttttattttgtcatgctcttgaaaatgtttgaccatttgtagtatacacagtgaaacttgattctctgttgcataaaacactatatttttttggaaatgttactgtccaaaagcctcttccctccctttccttttcctatgtacttccttcatacttgctttactgatcagccaggcaatagccatccaagagctagagcatgaaacagggccctttccaagtaggctctgggtgtcctaagccagcgtgtgccctctggtttagtgagtgtaatagagtccctggcacctttctttgcaaatgaggctaacagaccagactgcagcaagttatcagattcctcaatcagatgcactaggagtgaggagcccagggatggagggggttcctgaagtattgcagttggctgtagtagctgagttcttttccatgttaccgaaactgtagccagttacagtttactcaggaaaacggtagatcaattcagccatggtagtgctggttggcagggattggtaacggagagaactgctcatcagccaaaactcaagccttgccttttaggaggccaccagcagagggacttggtcctccttgtctggtacttgtgtacatgccggtgacctgaggactccactcacactggcgagcaaaaagggagcagtgattctcttttctctccccaccccctgccctttgttaccaacaccagtttcccagggggtacatgagtttctgaatttttaaaaaatgtttttggtttggtttttctggggactgataagtgctttaagcaatgtccataccccgtcaagactcccagcttagtcattttcttgtatttttctgttcacagtatttgtgtgtgtgcttgttttggcagctcattttggctgtattatatattgagtgatgaattgatcctcttttttccctaagggatatgaattgtttttcttgtgttatattctgcttgtgaatagctggagcaaacctggggctgacacgcgtaagctagggctgcaaagcgagaagagagccggtggagtgtacttgtccctgacaggctgacctacctgagtctctgagcttttcagtccaaatctttgcaaggctcaaaatgccacagaacctctcctcttctccccactccccatggcagggaccggaccatccctacatgcaacatgctgttcctccagcccctcccattgccatggcaaaacaggtacctttggggcatgggggcattacatgggatgcttgtgtaatcgaccacctagccttctctctcccctcccgtcctcccccagaatcacttcctaggacacccgagctgcttgcccagggtcctgtttccctgctaactccagagaagcatcccagggctttgtgacagtctctaattcccttcccttctcgttaagaatcatattgtatagtagctttcagaccatacagtattcattgggttactcctattattatcaagtagctggaattgtgaaggtcggagtagttagatctttagcttttattccttatttttttgtattactctccatgtgtataaattattgatcatgttgctggcttttataaactctaagcgaaggaggagcactgcctcagcctttgcacatggtaatgaagcactgtttttaaataaaagagagaaacaccaaaaaaaaaaaaaaaaaaaaa

SEQ ID NO: 166 - DNA, 2200 bp, Homo sapiens
gcatcctctcaccgccggaagctgaactgactcgtccgcggccgctctaccccaacaggccgccaccagcgagagtgcggccataaccatcacgtgaccgcccaccgacaccagcgagagtgcagtcgtaaccgtcacgtgaccgcccaccgtcggcccggcgctcccctccgcccgaagctagcaagcggcgcggccaatgagaaaggcgcatgcctggcccccgccggcctgcagtctagccgtagtgcgcctgcgcgcggctaggaggggccgtcaggcggggatacagcctggaaggtaatgcatgtccatggtacacaaattcacaagtttggagaccctgacacacccaccttctcacctgggctctgcgtatcccccagccttgagggaagatgaagcctaaactgatgtaccaggagctgaaggtgcctgcagaggagcccgccaatgagctgcccatgaatgagattgaggcgtggaaggctgcggaaaagaaagcccgctgggtcctgctggtcctcattctggcggttgtgggcttcggagccctgatgactcagctgtttctatgggaatacggcgacttgcatctctttgggcccaaccagcgcccagccccctgctatgacccttgcgaagcagtgctggtggaaagcattcctgagggcctggacttccccaatgcctccacggggaacccttccaccagccaggcctggctgggcctgctcgccggtgcgcacagcagcctggacatcgcctccttctactggaccctcaccaacaatgacacccacacgcaggagccctctgcccagcagggtgaggaggtcctccggcagctgcagaccctggcaccaaagggcgtgaacgtccgcatcgctgtgagcaagcccagcgggccccagccacaggcggacctgcaggctctgctgcagagcggtgcccaggtccgcatggtggacatgcagaagctgacccatggcgtcctgcataccaagttctgggtggtggaccagacccacttctacctgggcagtgccaacatggactggcgttcactgacccaggtcaaggagctgggcgtggtcatgtacaactgcagctgcctggctcgagacctgaccaagatctttgaggcctactggttcctgggccaggcaggcagctccatcccatcaacttggccccggttctatgacacccgctacaaccaagagacaccaatggagatctgcctcaatggaacccctgctctggcctacctggcgagtgcgcccccacccctgtgtccaagtggccgcactccagacctgaaggctctactcaacgtggtggacaatgcccggagtttcatctacgtcgctgtcatgaactacctgcccactctggagttctcccaccctcacaggttctggcctgccattgacgatgggctgcggcgggccacctacgagcgtggcgtcaaggtgcgcctgctcatcagctgctggggacactcggagccatccatgcgggccttcctgctctctctggctgccctgcgtgacaaccatacccactctgacatccaggtgaaactctttgtggtccccgcggatgaggcccaggctcgaatcccatatgcccgtgtcaaccacaacaagtacatggtgactgaacgcgccacctacatcggaacctccaactggtctggcaactacttcacggagacggcgggcacctcgctgctggtgacgcagaatgggaggggcggcctgcggagccagctggaggccattttcctgagggactgggactccccttacagccatgaccttgacacctcagctgacagcgtgggcaacgcctgccgcctgctctgaggcccgatccagtgggcaggccaaggcctgctgggcccccgcggacccaggtgctctgggtcacggtccctgtccccgcgcccccgcttctgtctgccccattgtggctcctcaggctctctcccctgctctcccacctctacctccacccccaccggcctgacgctgtggccccgggacccagcagagctgggggagggatcagcccccaaagaaatgggggtgcatgctgggcctggccccctggcccacccccactttccagggcaaaaagggcccagggttataataagtaaataacttgtctgtaaaaaaaaaaaaaaaaaaaa

SEQ ID NO: 167 - DNA, 2949 bp, Homo sapiens
gggcggcgcccaatgggctgcgcggagcgtcacttcccggcagcgggaggcgagtggcgagtggcgagtggcgagtgtcaggggggcggccggcgggggcggggcggccggaggaggcgttggcagcgggctcggacccacgcggcgccgcggcccgcctggcctgcagcgctcccacccccggcggcggcacgatgccctttgacttcaggaggtttgacatctacaggaaggtgcccaaggaccttacgcagccaacgtacaccggggccattatctccatctgctgctgcctcttcatcctcttcctcttcctctcggagctcaccggatttataacgacagaagttgtgaacgagctctatgtcgatgacccagacaaggacagcggtggcaagatcgacgtcagtctgaacatcagtttacccaatctgcactgcgagttggttgggcttgacattcaggatgagatgggcaggcacgaagtgggccacatcgacaactccatgaagatcccgctgaacaatggggcaggctgccgcttcgaggggcagttcagcatcaacaaggtccccggcaacttccacgtgtccacacacagtgccacagcccagccacagaacccagacatgacgcatgtcatccacaagctctcctttggggacacgctacaggtccagaacatccacggagctttcaatgctctcgggggagcagacagactcacctccaaccccctggcctcccacgactacatcctgaagattgtgcccacggtttatgaggacaagagtggcaagcagcggtactcctaccagtacacggtggccaacaaggaatacgtcgcctacagccacacgggccgcatcatccctgcaatctggttccgctacgacctcagccccatcacggtcaagtacacagagagacggcagccgctgtacagattcatcaccacgatctgtgccatcattggcgggaccttcaccgtcgccggcatcctggactcatgcatcttcacagcctctgaggcctggaagaagatccagctgggcaagatgcattgacgccacacccagcctaatggccgaggaccctgggcatcgccagccttgcctccagtgccctgtctcctttggccctcaatctggtcccaaatctggctgtgtcccaaagggtgtgtgggaagtggggggaaagtagaggatggctcgatgttttgcagctacctcttttccccgtgtttctttttagacaaattacactgcctgaagttgcagttcccctttccctggggagccccaagaacagagtcaggcaaggggtggggagtccagggatcttggggacccctcctaggagagctgcagtctcttccctcaggggaacatcccagaatgcatatcgatcagctctcagccaggcttcgacaatctcgcagcccccactaggtggacacattaatgatttggtttctcccctgggcagccaacctgccccagaggcaccagacctgggctttcagctttgggaccaggctgcccaaaggtactcctttatacacccggcaccttccacgaaagatggtacttcccaagcaagcccctatgatttgtcactatagatggaaccctgacttctgccccatcccttcctgcccaacctagaacccaggcctcaagtctttaccccacccctttcttgttcttccaagaagcagatgcccagttgctcagcagcagcggtagagacttgaatctgcccaccagtcacaaggcgggtcacagattcctcttcctctcttctcctcgttcctctgaaccctccaccaatgtgcctcagcctgtgtgctgtgtggcaacagcattctggttcccactgccaagatctcccaccactctgctgggatctgcagtggcagggagtgggggttgtgtaaaggggaagtcatcttttgagatccagatagacatggtttgtgcacttacgtccagatgggaagcatccttcctgcaaccctaaaataatcatgcagcctctcagacggacgccatcggtcccaaggccttaggtggaggaagcaaagcaggccaggcctgtcctgtccgtggacctctaccttctggactccctacgggtgcagagcacttgggtttctctacagccatcgtggcccacttgacactgtgctcctccatcagctggtcacatgccaacacgttcccagcccctgaggcagctccagggtgccccacctgctcctgaggtgggtccctaccctgctgctcctcttcatcctttcccttttgtcctgaaagggaggagcaatggtccaggcattaattccacccagggaattttagctatgccctcatgtcccagggagagagccacacgcctgttttccatttatagcaagattgtttgcatacttttgtaatgaaggggagtgtccagtggaaggatttttaaaattatcttatggatagctcaagtctctgccatttgtaatttttggctctaagctccgattggagacgcttctccttgtgcatgtgagttgactgatgttgtgagtgtaaatgcatttggttatttctggtatcggtggccacttggatggatttttttacattctgttccccagttacaggaaggagtccctttggtgtgtgaatatgtgtgcctgtagagggtggggcagggtggggtggggatggaaatgtgtggcatgcacatgagttgaaattcttttatgcatttttttgaagaaaaaaaaaaaaacaactctgaggacataggggatgtcagtttcctatggaagagacacctctgacccgttattcttataatcaaaatctgaagggaaaaaaatgttttagttctttccccactcgttgggttcaactagattaaaaggctgattttcagaaataaaaaaaaaaaaaa

SEQ ID NO: 168 - DNA, 4186 bp, Homo sapiens
gttcttggggcgtgggcgaagcaggctgctcgcctcctgcctgtagtgtgtgggctggggttggtgcgagcttccagcttggccgcagttggttcgtagttcggctctggggtcttttgtgtccgggtctggcttggctttgtgtccgcgagtttttgttccgctccgcagcgctcttcccgggcaggagccgtgaggctcggaggcggcagcgcggtccccggccaggagcaagcgcgccggcgtgagcggcggcggcaaaggctgtggggagggggcttcgcagatccccgagatgccggagttcctggaagacccctcggtcctgacaaaagacaagttgaagagtgagttggtcgccaacaatgtgacgctgccggccggggagcagcgcaaagacgtgtacgtccagctctacctgcagcacctcacggctcgcaaccggccgccgctccccgccggcaccaacagcaaggggcccccggacttctccagtgacgaagagcgcgagcccaccccggtcctcggctctggggccgccgccgcgggccggagccgagcagccgtcggcaggaaagccacaaaaaaaactgataaacccagacaagaagataaagatgatctagatgtaacagagctcactaatgaagatcttttggatcagcttgtgaaatacggagtgaatcctggtcctattgtgggaacaaccaggaagctatatgagaaaaagcttttgaaactgagggaacaaggaacagaatcaagatcttctactcctctgccaacaatttcttcttcagcagaaaatacaaggcagaatggaagtaatgattctgacagatacagtgacaatgaagaagactctaaaatagagctcaagcttgagaagagagaaccactaaagggcagagcaaagactccagtaacactcaagcaaagaagagttgagcacaatcagagctattctcaagctggaataactgagactgaatggacaagtggatcttcaaaaggcggacctctgcaggcattaactagggaatctacaagagggtcaagaagaactccaaggaaaagggtggaaacttcagaacattttcgtatagatggtccagtaatttcagagagtactcccatagctgaaactataatggcttcaagcaacgaatccttagttgtcaatagggtgactggaaatttcaagcatgcatctcctattctgccaatcactgaattctcagacatacccagaagagcaccaaagaaaccattgacaagagctgaagtgggagaaaaaacagaggaaagaagagtagaaagggatattcttaaggaaatgttcccctatgaagcatctacaccaacaggaattagtgctagttgccgcagaccaatcaaaggggctgcaggccggccattagaactcagtgatttcaggatggaggagtctttttcatctaaatatgttcctaagtatgttcccttggcagatgtcaagtcagaaaagacaaaaaagggacgctccattcccgtatggataaaaattttgctgtttgttgttgtggcagtttttttgtttttggtctatcaagctatggaaaccaaccaagtaaatcccttctctaattttcttcatgttgaccctagaaaatccaactgaatggtatctctttggcacgttcaacttggtctcctattttcaataactgttgaaaaacatttgtgtacacttgttgactccaagaactaaaaataatgtgatttcgcctcaataaatgtagtatttcattgaaaagcaaacaaaatatatataaatggacttcattaaaatgtttttgaactttggactagtaggagatcactttgtgccatatgaataatcttttttagctctggaactttttgtaggctttatttttttaatgtgggcatcttatttcatttttgaaaaaatgtatatgttttttgtgtatttgggaaacgaagggtgaaacatggtagtataatgtgaagctacacatttaaatacttagaattcttacagaaaagattttaagaattattctctgctgaataaaaactgcaaatatgtgaaacataatgaaattcagtaagaggaaaagtaacttggttgtactttttgtaactgcaacaaagtttgatggtgtttatgaggaaaagtacagcaataatctcttctgtaacctttattaatagtaatgttgttgtagccctatcatactcactttttaagacacagtatcatgaaagtcctatttcagtaagacccatttacatacagtagatttttagcagagatcttttagtgtaacatacatattttagagaattgttggctagctgtacatgttttgaaaagctgtttagctagctataaggctataattggaaatttgtattttttatttacagcaaaacatttattcagtcatccagtttgctaccaaaatatgttttagataagtgtgtgtatgtttgtttagaagttagaaattgtaaacactggtcttatgtttcatttggattcattattgcattgtcttgttaccagaaacaaattttgccgagctttttttgccctatatttcccagcataatttgattagaaagtacaaaaagggccaggcgcggtggcttacgcctgtaatcccagcactttgggaggccagggcgggtggatcacgaggtcaagagatcaagaccatcctggccaacatggtgaaaccccgtctctactaaaaatacaaaaaaattagctgggcgtgatgatgtgcgcctgtagtcctgtctactagggagactgaggcaggagaatcgtttgaacccaggaggcagaggttgcagtgagcagagattacgtcactgcactgtagcctggcgacagagcaagactccatctcaaaaaaaataaaaaagtacaaaaagtacttgcttttatattacatcataagcagtagttaataaagttgtatactcttaagaggtgggcattatgattattttttatttttttattttttatgagatggagtctcactcttgtcacccagactgtagtgcagtggcacgatctgggctcgatgcaacctctgcctcccaggttcaagcaattttcctgcctcggcagagacggggtttcaccatgttggccaggctggtctcgaacccctgacctcaagtgatcagcccacctcagcttcccaaagtgctgggattacaggtgtgatccactgcacccggccggcattatgattttgtgtactcttgaaatggttatctttgtggatgatttttttttttaagctgaaacttacctcatgaataacttgattaaagtagtaggtgattaaaatttcaatagaatcaaatgagacaaaaattttaaactgactcatttgagtttcaactttacagtcattgaccataaagcacactaaaaatgtaagttatttttaaatacatctgaaataaaaatacttactaaaaaggaagaagccgaagatgtatatttagaccagcacacaattttgatttcaattagccttattctaatatttagcttttagatctttcatacacattttcacgtactttgcaattgagaccagaaagacttgtaggtctttctgcagaatgagtgggtccttgcaaagtgagtgggaaacttactcctagatcagaaatgtttgcctctctgagtaaaatgtttctttcagatgagccatagagggggcaccttttactcaacttttctttgttttgaaactttgtttcccatactgttttcagccttttgtttataattagaaattgtgagaagcttcatttagtgtttaaaaatgtggggagataaatcagacttaacatgtatgtaagatcaattcacttaaaagtatggtccaaatagcaaaaataggaccaggtgaaacatgtagtcattttttaaaaacatgtacttggtcttttgtgtgtgtctgttttattccattagaataaatgtgtccttgatgtaaatgcaaagcatttcttcctgattaaattgtagatgtagactttacaatataattcaataataaaaagtaattaacctctagttttgtcgttgcaataaatggttttcagatagcacaaactgtgatttctggataacatttcttatgaaaaa

SEQ ID NO: 169 - DNA, 4624 bp, Homo sapiens
tcggcgctcgcgggctcggcgggctgtgcgcgcccactccggctccagcggccagcgcgcgcgggcccaggccgcccggctccagcccagcagtagcggcagcagcggcggcggcggcagtgcgcgcgaggccctgcgcccccagcagctcctccctggcgccgtgcatggagacgcggcccgccacccgccgctgagcccccgccgcccggccgggacccgccagggctggggtggcctcgggctccggccggccccgccgcccgagggctgcgcgcggcccgcgggcctcgccgccccgcgcggatcgtcgcggcccggccgtcccgtcccaggaagtggccgtcctgagcgccatggctcactccccggtgcagtcgggcctgcccggcatgcagaacctaaaggcagacccagaagagctttttacaaaactagagaaaattgggaagggctcctttggagaggtgttcaaaggcattgacaatcggactcagaaagtggttgccataaagatcattgatctggaagaagctgaagatgagatagaggacattcaacaagaaatcacagtgctgagtcagtgtgacagtccatatgtaaccaaatattatggatcctatctgaaggatacaaaattatggataataatggaatatcttggtggaggctccgcactagatctattagaacctggcccattagatgaaacccagatcgctactatattaagagaaatactgaaaggactcgattatctccattcggagaagaaaatccacagagacattaaagcggccaacgtcctgctgtctgagcatggcgaggtgaagctggcggactttggcgtggctggccagctgacagacacccagatcaaaaggaacaccttcgtgggcaccccattctggatggcacccgaggtcatcaaacagtcggcctatgactcgaaggcagacatctggtccctgggcataacagctattgaacttgcaagaggggaaccacctcattccgagctgcaccccatgaaagttttattcctcattccaaagaacaacccaccgacgttggaaggaaactacagtaaacccctcaaggagtttgtggaggcctgtttgaataaggagccgagctttagacccactgctaaggagttattgaagcacaagtttatactacgcaatgcaaagaaaacttcctacttgaccgagctcatcgacaggtacaagagatggaaggccgagcagagccatgacgactcgagctccgaggattccgacgcggaaacagatggccaagcctcggggggcagtgattctggggactggatcttcacaatccgagaaaaagatcccaagaatctcgagaatggagctcttcagccatcggacttggacagaaataagatgaaagacatcccaaagaggcctttctctcagtgtttatctacaattatttctcctctgtttgcagagttgaaggagaagagccaggcgtgcggagggaacttggggtccattgaagagctgcgaggggccatctacctagcggaggaggcgtgccctggcatctccgacaccatggtggcccagctcgtgcagcggctccagagatactctctaagtggtggaggaacttcatcccactgaaattcctttggcatttggggttttgtttttccttttttccttcttcatcctcctccttttttaaaagtcaacgagagccttcgctgactccaccgaagaggtgcgccactgggagccaccccagcgccaggcgcccgtccagggacacacacagtcttcactgtgctgcagccagatgaagtctctcagatgggtggggagggtcagctccttccagcgatcattttattttattttattacttttgtttttaattttaaccatagtgcacatattccaggaaagtgtctttaaaaacaaaaacaaaccctgaaatgtatatttgggattatgataaggcaactaaagacatgaaacctcaggtatcctgctttaagttgataactccctctgggagctggagaatcgctctggtggatgggtgtacagatttgtatataatgtcatttttacggaaaccctttcggcgtgcataaggaatcactgtgtacaaactggccaagtgcttctgtagataacgtcagtggagtaaatattcgacaggccataacttgagtctattgccttgcctttattacatgtacattttgaattctgtgaccagtgatttgggttttattttgtatttgcagggtttgtcattaataattaatgcccctctcttacagaacactcctatttgtacctcaacaaatgcaaattttccccgtttgccctacgccccttttggtacacctagaggttgatttcctttttcatcgatggtactatttcttagtgttttaaattggaacatatcttgcctcatgaagctttaaattataattttcagtttctccccatgaagcgctctcgtctgacatttgtttggaatcgtgccactgctggtctgcgccagatgtaccgtcctttccaatacgattttctgttgcaccttgtagtggattctgcatatcatctttcccacctaaaaatgtctgaatgcttacacaaataaattttataacacgcttattttgcatactccttgaaatgtgactcttcagaggacagggcacctgctgtgtatgtgtggccgtgcgtgtgtactcgtggctgtgtgtgtgtgatgagacactttggaagactccagggagaagtccccaggcctggagctgccgagtgcccaggtcagcgccctggactgcttgcgcacttgctcaccgagatgatgcagttggaggttgctgatctgtgcgattgctgtagcggttgccggggaccttaagagttattttgcttctctggaaggggcctatgcttgctaggcaggcagccagtgtgtctgtttttcttggtttgctgtgggaccttgcttggcgagggggaaaatctctgggtttctggagtgggagggttcgtgcagcagctgttgactggtacatgaagcattcttttatgtttgttgaagctgatgattgacatctcccgtgggtgtgccagttcttgtggagttaagacaggatttttggaagcaaggaagttagtgggtgagcttggggatgtagctcagctatctgctggtctagtggcctctaagctatagggaggggacagagccctgagctacagatgcttgagtgggttattgtgtcggtttgctagtgcagtctggtttttaagctctaaaattgaggtattttattagaagtggatttgggttgaactcttaatttgtataagggatatattttggttggggaaatagaactgagttgctaattcttattgtactcattactccatacaagaatgttatgttgaataataaaattggagaagatttcattttgtgtttccagggagtattctgtgtggggaactgtttccttacgtgaggccggcggcataagtcaaagatgagttttgtccttgcgaatcacacagattgagtctgtgttccccagggtgtgccgttacctgatttttaagtgagccagggcggacagcagcttttctgatttacagagttcttcagatttacaaatggacaatgacatcacagtttttagcactgaagccagtctcatgctagtaacagtgggtgagccgctcgagggactgggttctaatgaatactggtatgaacggggagtctctgcagtcgccagacaaatcatactcagccccttcccccgtagagcaacaagtggttcttttagagttgactggcagcatttcctgtcgggggaggtggggtttgatggagttagaaagctcgcctctgtgtacattctctcctgggctgttactttctgtagacgcacaaaatcagccccaatgtttttaagggcatcttagccaaggaagctggcttttgtgtcgccacttccaggcctgcattaagagagagcccaggcaccagggctaccactggaacctgcctcagcgtcaactgctgctggtctgtagccaggcccagcctttgagacgggtttactgtcaccagtagcctctcagtgccagccctgagctgctcctggctcagctgcccagagcctgcagcctggggaggtactcagcctctgggagacgagggccgtggactgggtggctggtagctcctgcgtttttgagctgtgtcctggctggctgctgccaatgaggtggacaccagtgtggtttggggtgcactggccacttcttgctgggttctgattttcttggaagtgcatctgccttccttatccaatagttttatccctgcattgctcttgtgaagtggctggtttggttctgtatgtagcattttgtacctttcctctggcaaaacactgtcagtttataaacattttttatatttccctcctttaaaaacagcttgtgtatttctgctataaaatgtgtcagcaaaggcagagtgacctaatagggcatgttcttaagcacagggactgtatcatgcaggggccaataaagctcaagaaaacgag

SEQ ID NO: 170 - DNA, 3624 bp, Homo sapiens
aatgcgcctgcagctcgcgctcccgcgccgatcccgagagcgtccgggccgccgtgcgcgagcgagggagggcgcgcgcgcggggggggcgcgcttgtgagtgcgggccgcgctctcggcggcgcgcatgtgcgtgtgtgctggctgccgggctgccccgagccggcggggagccggtccgctccaggtggcgggcggctggagcgaggtgaggctgcgggtggccagggcacgggcgcgggtcccgcggtgcgggctggctgcaggctgccttctgggcacggcgcgcccccgcccggccccgccgggccctgggagctgcgctccgggcggcgctggcaaagtttgctttgaactcgctgcccacagtcgggtccgcgcgctgcgattggcttcccctaccactctgacccggggcccggcttcccgggacgcgaggactgggcgcaggctgcaagctggtggggttggggaggaacgagagcccggcagccgactgtgccgagggacccggggacacctccttcgcccggccggcacccggtcagcacgtccccccttccctcccgcagggagcggacatggactacgactcgtaccagcactatttctacgactatgactgcggggaggatttctaccgctccacggcgcccagcgaggacatctggaagaaattcgagctggtgccatcgccccccacgtcgccgccctggggcttgggtcccggcgcaggggacccggcccccgggattggtcccccggagccgtggcccggagggtgcaccggagacgaagcggaatcccggggccactcgaaaggctggggcaggaactacgcctccatcatacgccgtgactgcatgtggagcggcttctcggcccgggaacggctggagagagctgtgagcgaccggctcgctcctggcgcgccccgggggaacccgcccaaggcgtccgccgccccggactgcactcccagcctcgaagccggcaacccggcgcccgccgccccctgtccgctgggcgaacccaagacccaggcctgctccgggtccgagagcccaagcgactcggagaatgaagaaattgatgttgtgacagtagagaagaggcagtctctgggtattcggaagccggtcaccatcacggtgcgagcagaccccctggatccctgcatgaagcatttccacatctccatccatcagcaacagcacaactatgctgcccgttttcctccagaaagctgctcccaagaagaggcttcagagaggggtccccaagaagaggttctggagagagatgctgcaggggaaaaggaagatgaggaggatgaagagattgtgagtcccccacctgtagaaagtgaggctgcccagtcctgccaccccaaacctgtcagttctgatactgaggatgtgaccaagaggaagaatcacaacttcctggagcgcaagaggcggaatgacctgcgttcgcgattcttggcgctgagggaccaggtgcccaccctggccagctgctccaaggcccccaaagtagtgatcctaagcaaggccttggaatacttgcaagccctggtgggggctgagaagaggatggctacagagaaaagacagctccgatgccggcagcagcagttgcagaaaagaattgcatacctcactggctactaactgaccaaaaagcctgacagttctgtcttacgaagacacaagtttattttttaacctccctctcccctttagtaatttgcacattttggttatggtgggacagtctggacagtagatcccagaatgcattgcagccggtgcacacacaataaaggcttgcattcttggaaaccttgaaacccagctctccctcttccctgactcatgggagtgctgtatgttctctggcgcctttggcttcccagcaggcagctgactgaggagccttggggtctgcctagctcactagctctgaagaaaaggctgacagatgctatgcaacaggtggtggatgttgtcaggggctccagcctgcatgaaatctcacactctgcatgagctttaggctaggaaaggatgctcccaactggtgtctctggggtgatgcaaggacagctgggcctggatgctctccctgaggctcctttttccagaagacacacgagctgtcttgggtgaagacaagcttgcagacttgatcaacattgaccattacctcactgtcagacactttacagtagccaaggagttggaaacctttatatattatgatgttagctgacccccttcctcccactcccaatgctgcgaccctgggaacacttaaaaagcttggcctctagattctttgtctcagagccctctgggctctctcctctgagggagggacctttctttcctcacaagggacttttttgttccattatgccttgttatgcaatgggctctacagcaccctttcccacaggtcagaaatatttccccaagacacagggaaatcggtcctagcctggggcctggggatagcttggagtcctggcccatgaacttgatccctgcccaggtgttttccgaggggcacttgaggcccagtcttttctcaaggcaggtgtaagacacctcagagggagaactgtactgctgcctctttcccacctgcctcatctcaatccttgagcggcaagtttgaagttcttctggaaccatgcaaatctgtcctcctcatgcaattccaaggagcttgctggctctgcagccacccttgggccccttccagcctgccatgaatcagatatctttcccagaatctgggcgtttctgaagttttggggagagctgttgggactcatccagtgctccagaaggtggacttgcttctggtgggttttaaaggagcctccaggagatatgcttagccaaccatgatggattttaccccagctggactcggcagctccaagtggaatccacgtgcagcttctagtctgggaaagtcacccaacctagcagttgtcatgtgggtaacctcaggcacctctaagcctgtcctggaagaaggaccagcagcccctccagaactctgcccaggacagcaggtgcctgctggctctgggtttggaagttggggtgggtagggggtggtaagtactatatatggctctggaaaaccagctgctacttccaaatctattgtccataatggtttctttctgaggttgcttcttggcctcagaggaccccaggggatgtttggaaatagcctctctacccttctggagcatggtttacaaaagccagctgacttctggaattgtctatggaggacagtttgggtgtaggttactgatgtctcaactgaatagcttgtgttttataagctgctgttggctattatgctgggggagtcttttttttttatattgtatttttgtatgccttttgcaaagtggtgttaactgtttttgtacaaggaaaaaaactcttggggcaatttcctgttgcaagggtctgatttattttgaaaggcaagttcacctgaaattttgtatttagttgtgattactgattgcctgattttaaaatgttgccttctgggacatcttctaataaaagatttctcaaacatgtc

SEQ ID NO: 171 - DNA, 8905 bp, Homo sapiens
agcagtgggggagagctcagccagccctgcagggcgagcagtccagccttgtgttcaccggagcttaagcgttgcagcaggaaaacttccatctcgctctcctggctttgatcctcactggacatcagaccagaggcaccgaagggagggaggatgcgagatgaccggccctttggcaacctgaccatcgacttagcagagccttcaaaagcaagccaggggctggctgcacgaccaaagaggcgccgcgcctctcgtggatgtgtgtgtgtgagtgatccagcgagtgtgtgtgcgtgtgagggtgtgtgtgtgtatgcctgtgtgcacagcacaactgtgtgcgtgtcccggtgagtgtgcctgtgcatgcgtgagtgtgtgtacgtgtgcatgtgtgtgtgagtgcgcttggttattactattattattatttttggaagaaaaatctttgaaaatctggggcaggttactgtgctcctagggtgattcttcttttgcaagaggagctgaccagggcaagctactagagccatttctcggcaagtaaagagatttttccttccagaaggagaaggatttttctccctgctctgcagccaagtgaaagagattagtccctaaacctgtgaaatcgaccagagctgtgtgattaccagggcttgagagaggactcgaaaagaaaaggagaaataaatcaaacagcctgtcagttcctttggccacgtcagaagatgtcatctcaaactaagttcaagaaagacaaagagatcattgctgaatatgaagcccaaataaaagagatccgcacgcagctggtggagcagttcaaatgtctggagcagcaatcagagtcgcgactgcagctgcttcaagacctccaggagtttttccgccggaaagctgagattgagctcgagtactcccgcagcctggagaagctggctgagcgcttctcctccaaaatccgcagctcccgggagcaccagttcaagaaggaccagtacctcctctcgcctgtgaactgttggtatctggttctgcatcagacccggcgggagagccgagaccatgccaccctcaatgacatcttcatgaacaatgtcatcgtccgcctctcccagatcagtgaggatgtcatcagactcttcaaaaagagcaaggagattggcctgcagatgcacgaggagctcctgaaggtgaccaatgagctctacacagtcatgaaaacctaccacatgtaccatgcagagagcatcagtgcggaaagcaagctgaaggaggctgagaagcaggaggagaagcagttcaataagtcaggagacctcagcatgaacctgctccggcacgaggaccggccccagcgccgcagctctgtgaagaagattgagaagatgaaggagaagaggcaggccaagtactctgagaacaagctgaaatgcacaaaggcccggaatgactacttgctcaatctggcagccaccaacgcagctataagcaaatactacatccatgatgtctctgatctgatcgattgctgtgatttgggcttccatgccagcctggcccgcaccttccggacctatctctcagctgaatacaacctggagacctctcgccacgaagggctggatgtcattgagaatgcagtggacaacctggattcccgaagtgacaagcacacagtcatggacatgtgcaatcaagtcttctgccctccactcaagttcgagttccagccccacatgggggatgaggtctgccaggtcagcgctcagcagcccgtccagacagaactgctcatgcgttatcaccagctgcagtccagactggccaccctcaagatagagaatgaggaggttaggaaaaccctggatgccaccatgcagacattacaggacatgctgactgtggaggactttgatgtctccgatgccttccaacacagtcgatcgacagagtccgtcaagtcggctgcctctgagacctacatgagcaagatcaacattgccaagaggagagccaaccagcaggaaacagaaatgttttattttacaaaatttaaagagtatgtgaatggcagtaacctcatcaccaagctgcaggccaagcacgatttactcaagcagaccctgggcgaaggggaaagagcagaatgcggcaccaccagaggaagaagaaatgctcgaaccaggaaccaggattcaggacaagctataccgcttgtagtcgagagctgcatccgttacatcaatttatatggactccagcagcaggggatcttcagagtgccaggatctcaggtggaagtcaatgacatcaaaaattcctttgagagaggtgaagacccccttgtggacgatcaaaatgaacgagatatcaattcagtcgctggtgttttaaaactgtatttccgaggactggaaaacccactctttcctaaggaaaggtttcaagatttgatatctactattaaactggagaacccagccgagagggtgcaccagatccaacaaatcctcgtcacccttccccgcgtggtcattgtggtcatgagatacctcttcgctttcctcaaccacctctcccagtatagcgacgagaacatgatggatccctacaacctggccatctgcttcgggcctaccctcatgcacatccctgatgggcaggaccctgtgtcctgccaggcacacatcaatgaagtcatcaaaaccatcatcatccatcatgaagccatcttccccagcccccgggagctagagggacctgtgtatgaaaaatgcatggctggaggggaagaatattgtgacagcccacacagcgagccaggggccatcgatgaagttgaccatgacaatggcactgagcctcataccagcgatgaagaagtggagcagatcgaggctattgccaagtttgactacatggggcggtccccgcgtgagctatccttcaagaagggggcctcgctgctcctgtaccaccgcgcctcggaggactggtgggagggccggcacaacggcgtggatggactcatcccccatcagtacatagttgtacaggacatggatgatgccttctccgacagcctgagccagaaggctgacagcgaggccagcagtgggccattgctggatgacaaggcctcttccaaaaacgacctccagtcccccacggagcacatctcggattacggctttgggggggtgatgggccgagtgcggttacgatctgatggagcagccatccccagacgccgaagcgggggcgacacacacagcccgccccggggcctgggccccagcatagacacaccaccccgggctgctgcctgccccagcagcccccacaaaatccccctcacccgggggaggatcgagagccctgagaagcggaggatggcgacgttcgggagcgctggcagcatcaactaccctgacaagaaggcgctctccgaagggcactcgatgaggtcgacctgcggttccaccaggcacagcagcctaggggaccacaagtccctggaggccgaggccctggcagaagacatcgagaagaccatgagcacggctctgcacgagttgcgggaactcgagaggcagaacacggtcaagcaggcgccagatgtggtgctggacaccctggagcccctgaagaacccgccaggccccgtcagctcggagcccgccagtccccttcacaccatcgtcatccgcgaccccgatgccgccatgcgccgcagcagcagctcctccaccgagatgatgaccaccttcaagccagccctgtccgcccgcctggctggcgcccagctccgcccgccccccatgcggcccgtgcggccggtggtccagcaccggtccagcagcagcagcagctcgggcgtgggcagcccggccgtgacgcccaccgagaagatgttccccaacagctcagcggacaagtcgggcaccatgtgacctgcaggatgggccgcgccgccgtggcccgctgtggctcaccacggcccagggtggccttggtggcttccacgtgcttcccagtgaccctggccttggagggcagaggtccgtctgggagggtgtgtctgtgcagagctgaggcccgggcgctggctgcagctcacgtccagccatgggaatcccacggacctctcgcgtgtcaacagacgaccagaggagtgctggagctccagcagccccaaccacagcattccctaacatggaggcaaaataccacatggcttctcccgcatatcgtcactggaaacttcctctctcgacattctctctacatacgtatatgtgtgtgtatatcgatgtgtgcatatatacacatgtatacgtatgtacgtgtctgtaggtgtgtgtatatatatatatatttatgcatctatatacatatactagatctggacacacgcatactaagtgtatatagtatctcctttttctttttatgaaacttagatttacctcagatccatgccaccaaacatctcccaccgagttatttggtgggatttgcagggacttttctgggagaacttaaaggcccatagtaactgcgaatgaagcaatataccactaacctgcagaaaaacacaaacaaaaacagactcccactgtctccagaagtcgtggccttccagaacagtctgcccctcaaggaagggtggggcaggcagtacccccaagcaggctgctcccagaggtggggaacccttcataggaaatccccacccccgtccaccccagagaccctgcccttccacccggaggccaaaggccaactgtactcccaaaggcatgggagaaggttggcgagaagacccctgactaccacatccttgtgtttgtgtgtagagacgggggatagtgagaacctaagccccatcgtagcacagtattacatgtggttgggaaaaataaaaatacagtggtgtggaatactccaaaacctagaaatgctgtaggaataaatctgtggtaactatagaggtttaacttatatcattttcaaactatttaattttttcttttcctggttctactaattatactgtgtcagatttggaactaaacaggcaaggaggctttgagtcacatcgttttcattttaaatcaggctgtgatgcactgtggctggtgccgtcttgcatgaaacgcatgagccgtgagcgcccagttcagactggggccagggaggggcagtccttggcactttctgtcctagaggacactgtcagttgagttaatacaagtgacatagcttcccttccctcccccttcacccactccctccagaacatttagtgtagatgaaaatgtggtgatagaaatgggtgcatgatcttcacgtgtgacagccaggcctttgcctcttggccaagtaaagcccttccgggtcgctctccttcgattccattttacctcctcttctgatcacttccagagatgagctgtttctggataatggcacacgggcaaatctgtgtgccctgtgggccgctgttacttaccctctcctgcgagacccaggggcttttccctactgttcccacgcttcctctctctcgaggccactgaagtttggagtcaaaaggcccagagtctgagtcccagccctgagcacttaggagccttctgacttagggtttgtcactccacctcattgagcctgactgttctgctccataaaatagggtaataaaggtcaaacatcagtgagcaagctgtgtacactggaaaacactgaatcaatacaatgcgtttgtgattatcattagtaaggtaagtcttagatcagagccctccagcccttctttttgaaacctcccaatggcatttcagaagtgagcagtggaattttcctgccatcctaataagagccctggattccatcattaacatttcagcccattggatgaagtggtgccctctcctctggtcccccgcgaaaaggtaaatacacccaaagggagggacctagttaagtcactggcacctagataagttaggagggtaaagccactacctcgtctgaaggactggacttgacaccccacagtggaagggagcatcaggagaggaacaaaaaaagggatctcagggagaggccagtgtcaaacttgacctcccttgtttggcctagaatgaacccttctctttagctcctggatatgaaaggccatctgcttggagcacagaaagatattgccattttacagcttaagagagtaaggccttgggctgtgctgtgacctgcccaagatttgacactggctaggagcagaggctgcgtcaggctcttaaagtcatgtgtttgcatgctggatgctatactgtccagccaggacacaagacttctgatttctaccctcaagatactcccagatcctaaatccagtagcctcccaggcaaaatatagcaatctgccacaactgccagatgaaaagcaacaatcagagtagaaaaatctgttgcctgatatacataacaccaatcagaccgtgtggatttttctctgaattgactgattttgtttttttcttactgaaaatggacctgcctttcactgaattttctgagggcagagtcttagctgttttctttaagcaccttttttttttttttccattgggaaatggctgatgagttcacatttagggatgtacacacacagatggcagacgtctccccactcatccagccccagatctgagccttgacgcaggccaagtggaaaaatactttcccgcccccctcccctgttcccacttcctcatctggcactatgcatgtctcactcaccctccacagcactcagtcccatcgacgttcactgaacattggctttctctttctgactcctgcctgttttagtccactatatattgctgtatttgcttaaatgctggaaagtaactgttaaaatgtgaaattgtaatttttaaaaaggctacaattaaattttagccaatgccactcaccaaatctttgcacctagtagatagatcaatgtaaaaacaaatacctaactgtacagtgagtgtgggggaaatgtagtaacctagttagtagtcttcaatataaccaattgtacaaggggaagtggtgtttacctacttgttcatcaccattattgaaagccgtactgatcagttagttgacaacgggcatttttttttctttgcttcatggaatgatttcttttcttaaccttcgacttatcctgaggtcaagccttttgtctttatgtgtaaccgacgttcagtctattctaggaatgaaccagcaagttgttcatttaaaactgaccaaagacaattaattcctggtctagtttcctgggccttgtggctcagctgccactaaagagctttttggataaaattgagaacaagctgtgcttcctaccccactctccccgtccccttttattcccttttcctcttaaagagctgctctgagctgtgggattctatgaaaaattcttgcctttccttgtttcagtgctaacgatttctcacctcgaagcgccttttgaaccccggacagagtgcacaatcggagggaattgcgagcttgggaattagactttggagtcttttctctgaagtcaccaggccaggggtcaggagagagatggattcccaagggatgaaaggtttctattcaatgaagaaatcggagtgggaagagacacagggaaattgagccatattttggctatcggctggaaccagcagttcagagatctgccttataaacatttaaaaccggtttgtggtacacaaagaggaaccagtgtgggaaggggcctttatgtggggctttcttctctgttggagtcccttggagtgccttgttgggtatatttctctgtcattcaggaggcacgaatgtggaggacttctcgtgacctggtcgtgatgtggcattcagtgcatgtccacagctaatggaaaaacacgaggactcgggtaatggttcttcctctcagtctttctattcctaacttttcacacatccagatggttccacactagtgcaaatgcctcactctcctgagaaacccagaaagaagagtggctggctcacaaccatggggttagcccctgctgggctgggagtcggggtggcggccaggaggaaaggcagaaaggggtgagccgaggtgttgcctagctgattttctgctgtgcagagctaatgctgacatttcatgtcaacttccccggttctctggggtctcctctcctctgagcagccacatagaacattccccacatatccaaagctgcccaggggagccgagagaagggactttgctgtcaggtccaagccctcctgacctccctgagattgatctgccagtgtcctgctgtccctctgggactggccacatggccatcgctgccccttgttgacacctcctttctgtgtgagttgtccccggccaataacaaagctgttccttgaaccagaacaaccagagtgcacttttccttccttagacggaagtagatcctggctagggtttctgcccaggcccttgttcccggcagtgtgactgtttacatggtttggcaataggtttgattctgattgcttcagagtggctggtctattttgtttcctttggtttccttcctccccaaattgtgacaggaaaaacagaccaaaaccaccctaggaaattgctggttgcctgtccccacgtgatgataaatgttgccctcttctggatatcgtttctctaccttacgaccaaacgcccgtcctatagagtgtctgattggatcctctgtcgcgtattctgatggtgcctgctggtttgacgtggagctatcctgtgaaataaaacagcttaacttttctcaaaaaaaaaaaaaaaaaa

SEQ ID NO: 172 - DNA, 4456 bp, Homo sapiens
gtgcgtcgcgggggcggggccgcgcaggcgtaccgggtgccccggctctggagcataaacaagagcggggacgggatgaggcggcggttgatcccagggtggcgagtggcggcgaccgaggcggcgagcggggcccggcgccgaccctgagtgcagcctgacccgccctcgcgcgcgcgccctccccggccgggcccactcgccgcgcgcccagccatgaacctggcgagccagagcggggaggccggcgccggccagctgctcttcgccaacttcaaccaggacaacacagaagtgaaaggggcatcaagagcagctggtcttggccgtcgcgctgttgtctggtccctagctgttggtagtaagtccggttataaatttttctccctttcttctgtggataagctggaacagatctatgaatgcaccgatacggaagatgtgtgcattgtagagagattgttctccagcagcctagtggccatcgtcagccttaaagcaccaaggaagctaaaggtttgccactttaagaagggaactgagatctgcaactacagctactccaacacgattctggctgtgaagctcaacaggcagaggctgatagtatgcctggaggagtccctgtacatccacaacattcgggacatgaaggtgctgcatacgatcagggagacgcctccaaaccctgcaggcctgtgtgcgctgtcaatcaacaacgacaactgctacttggcgtacccagggagcgcgaccatcggagaggtgcaggtcttcgataccattaatttgagagctgcaaacatgattccggctcacgacagtcctttagcggcactggcctttgacgcaagtggaactaaacttgccacggcttcggagaaggggaccgtgattagggtattttccattccagaaggacaaaaactctttgagtttcggagaggagtaaagaggtgcgtgagcatctgctccctggccttcagcatggacggcatgttcctctccgcctccagcaacactgagaccgtgcacatcttcaaactcgagactgtgaaagaaaaacccccagaggagcccaccacctggaccgggtacttcgggaaagtgctcatggcctccaccagctacctgccttcccaagtgacagaaatgttcaaccagggcagagccttcgccacggtccgcctgccattctgcggccacaaaaacatctgctcgctagccacaattcagaagatcccgcggttgttggtgggtgccgccgacgggtacctgtacatgtacaacctggacccccaggagggcggcgagtgtgccctgatgaagcagcaccggctggacggcagtctggaaacgaccaatgagatcttggactctgcctctcacgactgccccttagtcactcagacatacggcgcagctgcaggaaaagcctacacagacgacctgggtgctgtgggtggcgcctgcctggaggacgaggccagcgccctgcgcctggatgaggacagcgagcacccgcccatgattcttcggactgactgaacttgacctgtgacctctgacccggggagcagagaacactggcttcacagaggactttgtgcattgctgctatgaactttgacctgagtcgggggagaggatggcagagactttattaaaaaaaaaaaaagattgtagtggtagtctaactccataacgctgaggaaatacatcattttcacttcagtggcttttaaatcctgcttatgaattttagctttttgtttgtttgttttctctttttgccaaaattaactgtttggtgaagcccgcaaaacctcctcgctttgcatgcatgaacgtgccaagccagcataggggagctagaagccactttccagccacctgccgttgggttttttcatatctgtacataatgccgagtgcgtaaggaaaccgtggcgtcgcgcacagtgggtctgcttgtcaaggccagttctgcagtgacaggcccaggggctgcccaccaggtgtgctgggcagacttcagctgggacagaagtccgatctccctagggccccacctggaccattttccctccgttttattttgttaattaaattctttccaaattggatcgctctgggatttcttccatggtggacttttgtttctgatcttgttttccctgtggatattggaggacagcgaggttctttctgatactaaaaacctttctttcaggcagcaaatgaacttgaaaggttgcctggactcgctggagcaaaggaaagcgattttgtttgtataattaaatgatctgttcttctacttcactcttcctgttgaaaaactgtgtgatttttttttttttttaagtaaagtttgtagctcctcccatgcccaggaaagcacagaactcaagtgtggtggccgtctgagctgtcctttcgctggccccgctgtccgcaggggcttcctacctgtgtgagaggtcgtagcgggagacagcaacagagagtaggcggctgggccacgtccttcacagggcgtcatgtgcctttctattttcatcttagaaaatttcctcagcaaaccgatgagagattgtggttgcaagcttcagtatttgcctcgcttcccttcccttttcatatttacagaattaaaacaacctcaagtacctcagactctgcattccaaaccaaggcacccagcagccaaagtgtcgagggcatttaagtggcattaatggcaggagagatggttttagaatctatggagtggtggaagttacggatagaagggaaaaggcaaaaactatttaccctgcctttgcaggctggggtttttgaaccgaggaaggctgggacgcctgtttccagatggttgtcatggtcacgctgggcgaagagctggaggggagttgtcccctcagctgagcggctgcggtgaaatgccccagtgttcctgggttggctttacggcaaactaaatgcaggggacgctggagtccgactcacctacaccggcttcctcccagccgctggtgtgcggcacacacaacatctgcattaggcagaggtgcaagtgggctgattgaacttttccttcaaaacctgcttgtctgtcctggacctttgatgaaatgggatcccggtcacgcaggctgagacagtggggaccgccgaggccagagtgggctatgcttgagcagggatgagaagggccgcggcagcacgcagccttgacccacgcctgcgtcttgtggtgcaaggccagagggctctctctagaacctgaccgtgcactccatctcctgggagccacttttggcaagagtgagtgtggggggaaaaagtgtgcacaagagatacggaaccctgagctagggtttcctgtcaccaaagagtgagctgcatttccagttctgcgttaaagtatcgtttgttctggtgcctgcctgtggtggtgatttggagactcaaatttcctttgccaggtctcttttgtctttctttgggattggtagtatagaagatgctgggaattgtcttcctcgctcagcctcggcttcccgcactgtaagatgaggcagttgcagaggaggcctcggacgtcctgtgaccctcggcccacactcccccttgggtggccctggcagggctggctaggtgcgttccctgcagaccacgggaagccctgtgcttgcctgggtcagggctaagctgtgcgccctagaggagggaggaggactgcagattcttggtcgagaagaatgaagaggatttctgtgtttgctgagcagccattgtggagggttacccgcctccactttcccgttgcccatttcactgccaccagctcctcttcctctgctcgaacctatgagtcccagcctcactggcggcctcagacatgctcaggagtgacggggacagagggaggccgctgagttgcccgttagaactcttactgctgcgccagtgacccaggtggagagggaccctgaaccaaacagaacgtgtgctaattttccgaactccaaactgtacactcatattcatttttaaattgtatttttccaaacttcaaaaaggacgatgagcgtgggggataggaaacaaaacctgtaaacgttgtgaatgggctcagtggactctgggaccaaaccttctgtaatctctaaaacaatgggaccaagagctggatggaacctggagtcaaaaagaactgcttcagtccccgctgtaccgcctgcctagctgtgggagcaggcagggcgcctgggagcctgcgttttctggaccgttccatgggactcatccctacctcacagggctgttgtgaggtgttgtgtgactgcgtgtcctgcaaacgcccagctcggtgcccagccagcggtgggcacccaataaacgctacaacataaatgtgtcttctgcaattaaacacgatttttattca

SEQ ID NO: 173 - DNA, 3284 bp, Homo sapiens
cccgtgcaccctgtcccagccgtcctgtcctggctgctcgctctgcttcgctgcgcctccactatgctctccctccgtgtcccgctcgcgcccatcacggacccgcagcagctgcagctctcgccgctgaaggggctcagcttggtcgacaaggagaacacgccgccggccctgagcgggacccgcgtcctggccagcaagaccgcgaggaggatcttccaggagcccacggagccgaaaactaaagcagctgcccccggcgtggaggatgagccgctgctgagagaaaacccccgccgctttgtcatcttccccatcgagtaccatgatatctggcagatgtataagaaggcagaggcttccttttggaccgccgaggaggtggacctctccaaggacattcagcactgggaatccctgaaacccgaggagagatattttatatcccatgttctggctttctttgcagcaagcgatggcatagtaaatgaaaacttggtggagcgatttagccaagaagttcagattacagaagcccgctgtttctatggcttccaaattgccatggaaaacatacattctgaaatgtatagtcttcttattgacacttacataaaagatcccaaagaaagggaatttctcttcaatgccattgaaacgatgccttgtgtcaagaagaaggcagactgggccttgcgctggattggggacaaagaggctacctatggtgaacgtgttgtagcctttgctgcagtggaaggcattttcttttccggttcttttgcgtcgatattctggctcaagaaacgaggactgatgcctggcctcacattttctaatgaacttattagcagagatgagggtttacactgtgattttgcttgcctgatgttcaaacacctggtacacaaaccatcggaggagagagtaagagaaataattatcaatgctgttcggatagaacaggagttcctcactgaggccttgcctgtgaagctcattgggatgaattgcactctaatgaagcaatacattgagtttgtggcagacagacttatgctggaactgggttttagcaaggttttcagagtagagaacccatttgactttatggagaatatttcactggaaggaaagactaacttctttgagaagagagtaggcgagtatcagaggatgggagtgatgtcaagtccaacagagaattcttttaccttggatgctgacttctaaatgaactgaagatgtgcccttacttggctgattttttttttccatctcataagaaaaatcagctgaagtgttaccaactagccacaccatgaattgtccgtaatgttcattaacagcatctttaaaactgtgtagctacctcacaaccagtcctgtctgtttatagtgctggtagtatcaccttttgccagaaggcctggctggctgtgacttaccatagcagtgacaatggcagtcttggctttaaagtgaggggtgaccctttagtgagcttagcacagcgggattaaacagtcctttaaccagcacagccagttaaaagatgcagcctcactgcttcaacgcagattttaatgtttacttaaatataaacctggcactttacaaacaaataaacattgtttgtactcacaaggcgataatagcttgatttatttggtttctacaccaaatacattctcctgaccactaatgggagccaattcacaattcactaagtgactaaagtaagttaaacttgtgtagactaagcatgtaatttttaagttttattttaatgaattaaaatatttgttaaccaactttaaagtcagtcctgtgtatacctagatattagtcagttggtgccagatagaagacaggttgtgtttttatcctgtggcttgtgtagtgtcctgggattctctgccccctctgagtagagtgttgtgggataaaggaatctctcagggcaaggagcttcttaagttaaatcactagaaatttaggggtgatctgggccttcatatgtgtgagaagccgtttcattttatttctcactgtattttcctcaacgtctggttgatgagaaaaaattcttgaagagttttcatatgtgggagctaaggtagtattgtaaaatttcaagtcatccttaaacaaaatgatccacctaagatcttgcccctgttaagtggtgaaatcaactagaggtggttcctacaagttgttcattctagttttgtttggtgtaagtaggttgtgtgagttaattcatttatatttactatgtctgttaaatcagaaattttttattatctatgttcttctagattttacctgtagttcatacttcagtcacccagtgtcttattctggcattgtctaaatctgagcattgtctagggggatcttaaactttagtaggaaaccatgagctgttaatacagtttccattcaaatattaatttcagaatgaaacataatttttttttttttttttgagatggagtctcgctctgttgcccaggctggagtgcagtggcgcgattttggctcactgtaacctccatctcctgggttcaagcaattctcctgtctcagcctccctagtagctgggactgcaggtatgtgctaccacacctggctaatttttgtatttttagtagagatggagtttcaccatattggtcaggctggtcttgaactcctgacctcaggtgatccacccacctcggcctcccaaagtgctgggattgcaggcgtgataaacaaatattcttaatagggctactttgaattaatctgcctttatgtttgggagaagaaagctgagacattgcatgaaagatgatgagagataaatgttgatcttttggccccatttgttaattgtattcagtatttgaacgtcgtcctgtttattgttagttttcttcatcatttattgtatagacaatttttaaatctctgtaatatgatacattttcctatcttttaagttattgttacctaaagttaatccagattatatggtccttatatgtgtacaacattaaaatgaaaggctttgtcttgcattgtgaggtacaggcggaagttggaatcaggttttaggattctgtctctcattagctgaataatgtgaggattaacttctgccagctcagaccatttcctaatcagttgaaagggaaacaagtatttcagtctcaaaattgaataatgcacaagtcttaagtgattaaaataaaactgttcttatgtcagtttcaaaaaaaaaaaaaaaaaa

SEQ ID NO: 174 - DNA, 2913 bp, Homo sapiens
cccgcccgcgtggtcgtcgccaccgcagccgcccgagaggagctgggggaggacggtggcccgcgaggctcgtcgcagacaacgcggcggcgatgtccgcgagccaggcgacacaaagttatcattgttgggctggataatgcagggaaaactaccattctttaccaattttctatgaatgaagttgtacatacatctcctacaataggaagtaatgtagaagagatagtgattaataatacacgtttcctaatgtgggatattggtggccaagaatctcttcgttcttcctggaacacttactatactaacacagagtttgtaatagttgttgtggacagtacagacagagagaggatttctgtaactagagaagaactctataaaatgttagcgcatgaggacctaagaaaagctggattgctgatttttgctaataaacaagatgttaaagaatgcatgactgtagcagaaatctcccagtttttgaagctaacttctattaaagatcaccagtggcatatccaggcatgctgtgctctaactggcgagggattgtgccaaggacttgaatggatgatgtcacgacttaagattagatgatctctactgacctcttctcatagattttgtataaatgaagtgctggactttacctgaaagctgcaaaaattaatggtttagatatatttataataaactgatttaaactttttctataagaagaaaaattaagaccacttatttgaaaacaaagatgaagtctcaccttccagtttgctttctcattagttttttccaaagtaagttattgaagctgtgattgacatttttctcataatgaatcctctcaggacattgtgtagcctatggtaagtacaaagggagaggaagacattttgaattttaagagctttattatcagtttaaccctccctagttgaatgttattttcttcttgttccattaagtcagaatacaaatcagcacagatattcgaatgtttccaatattttaaaatgtaatgttacttatgaaaagtattttgcttaaggttgtgtgtgtattgtgtatatacctcaagttcaagttaatggcattgatttatgttccagacaaaaataacacaaataataatatccttcgttataaccacaatgagataagtattggcattagtgttcagtgccattttatactttctctctgtgttctctgtattgtactaaccaacctcccaaatcgctgagctgcttgtttaaaaaaaaaaaaaaggaaaaggaaaaagcatgacattgtgtatcgattttttgttgttgaccaaaatcacacacatggaaacatgtaattcaacagagtgggaaagctagcagattcttggcttagtattactaataggcaggattgtacaatgagcaactatcagattattcctttcagtggttcttatggcatctaaattactgaataaattattaatccattaatcagtgaatcaaattatgattacaattatcaaatgaatgctcagcattaattgaaaactgttttgtgaaacatgtctacccagaaaagtagcattctataaatactattaaacaacttagctatattatttttaagtattaaattatatgtcaagcagttaaagtgaatttcagagtaaaagtaaggcatgtttctgagcaacattgataatttcttaatttgcaaatttcttcttattttggtacttggaatatagtgtgagattttttatttctaaattttgttgtatcttctattacataaatgcattgacaattataaaatgcaagtgttttttgaatgattttaagaatttggcttaaaaattgattgatacaacgtattatttgtactaagaagtaacttgacccaaaacaccttttatgtttgcttagggtatattttttcagtgtctgaaagtcaaaggtattcctgtcacaactgtaaacaaacttatcctaaatgtgttaaaacatattcttgggtactctatttatgtatctttcatgccttgaaaatctgaaggttaatccaaactcacatgttttagcatatttgagaaaaaaaaactaccttcaatatcagccttttaaatttcatgaagattttggtgaggaataatagtatatagtttaagtattgacaaaactttgaaagtttctttctttaaaatgggaaatactcaatatctaaatccaggtcaggcatgggatatcagtatttaacattggatgttttatgttttatatttataatgttcaaaatgcaagcataacatttaatatttgtccacatggttttacaaaagtaaatcttaaattactaagcttttcccatatgttctcgtactttctcaaatccctataaagaattacttgttatctattaaaaatctcctttacccaaatctgtattatggtttcgccagacaaatattatgtgatgtagcccagaaaatccacaccttttgtcctttttatgttttaatttgaataatcatgtgcttagtcccttggattactgccacatcagtttaacacgatatcagcacattcccttgtcatcatcaaggtgttggctcagatttattcttaattggatgtttaaagcatgtactaccttgttacagttggtttagtgtagtggattattgacatgacatcatgagaagatgtgtaattttataccacatttataaaacatgattttgttttctacccttcaaggtaaacattaaaaataaggtggtacttgtgtacttgtacataaaaccaaaattatagttgggaaaaaaataaatttatatatgaaaatgtcaaaatcattttaaaagtattattttcaaataaaatggagaagctggtgaaaagtcatattggcaatttt

SEQ ID NO: 175 - DNA, 3193 bp, Homo sapiens
aatcgcgtcgccgccgcttccgccctcagccggccccacctctgccggctcgtactcggctcccccacctcgccgcagagctagcccgggaagcccacactggcggccacggagcagagtccctcacccccaccagctgtagctgaacgtctggatggtggagaagagcagatgatctgtactggacacacgtggagatatggccatgccacgcatgtgcaaacagaggtgtacacacaggagtgcagtgatacaggacacagataaacagaatgtacacagccttcaggaaggatctcaaggtcagggttccgagtctgaggaagacataaccttgtgcctgcctgcccacctctctctctggtcctgttcatctctcaggctctgagacactgaccttcactgctcagttaaaggttccagggattccactttgtctggacccatccagctgagtgaacccagggtggtggtgtatctggggagagtgaggagtgggttgtccaaacaccagggaaagagccctttggggcctcagacagcggagtgaagctggaaccatcagggaacatgagtgaattttggcacaaactgggctgctgtgtggtagagaaaccccagccgaagaagaagagaagacggattgaccggaccatgattggggaaccaatgaattttgttcacctgactcacattggctcaggggagatgggggccggagatggacttgccatgacaggtgcagttcaggagcagatgagatccaagggaaaccgagataggccatggagcaattctaggggcttatagctccaataatggaatggttctgccatcttgaaacccccattctgtttccagcccagaagaaatgctgcccctaccagatccctccttgaaccagtgatctaaggacccctcttttccctatctgcctaacagtgcctcacaaggcttgggggctggactccctctactccctctggccatagcccctcctggagatggggtcaaggcagcaggactgatcaagtgactactggttagccagaggagctcagctgaagccctggaaaccctcaggtctgagataggagttctctaggaacctggaatgagttcctgtctcctgaatgatggtctgggtgccacctgtttttaaactcttaaacctggaactccttaaatggggtaggtgggtgagattatcaaagctgaagctggctttgctgagaagctccctacctccctgcccttctcctccttcctgctggaatgaactaaagcagatgtcaagcaggggctggtgggggtgcctactcccttttccactctatctttagatttcaaaccttaggcttacagcccctcaatatctctctgctaacaccagtgtctctttctagttaggcctctaatcttctgtttctgtttaccagcttcccagcaactttccttttttaaaatattaaaaatttaattcaggttctcttaattatcctcatcctgctgttgcctccgcccttaactctatccctattaggaaccttgtttcccaccgaataagagttaaggtaagaggtagctcttcacctgatgacattccatttaagttttggggcatctttcctgccctctgccaacctccctgctggcccaggtgagaggaggaagaggggtctggaaagaaacccagaatgcggcagaactaggagtaagtccatctcaaggtggacttctgatcattgaggatggtgagataaataggttgaaaacaatcatctgtgagtttaggagtcttaagatcctcacagcacgggagcagggagaggctctagaacaaggtttcacaaccgagatgcctttgacattttgggctgaagtgttctttgtaaggaaaacctgtttcctattttgtgcattacaggatatttagcagcaaccctggcccactctagttatgacaaccaaaaatgtctctatacattgccagatttctcctagggggcaaaatcgcctccatttgagaaccacaactctaaagtcaagatatttttctctgaagtgatttctgcttggcacgctaccctcatcatcttactcatcttaagcccgagccatggatcaactaggagcccatataaatgaggctcagtagggctgcacataatctccaaacaattctttattcagtgttttgcttgtgtttgcatgttgctatgatggacaggtccccctcctccattcttgccctctggagaagtggttcctgcagtgtagagatatgaacagggtatggtaggattggggaaaggggagagagaagcagtagatacactccttatcctccccaaattttaagctctatttctgtgccctagtcctagacacacattagactcagggagttttgtctgaagaccaggtcccactgccccctggctgaagagtctgctttaaatgggaaaacaacgtaggagcaggggtttttaggcactttcagtattctcaggtgttcttcgttctggcccttccagggtaattaggaaggcagaacaagacagatgagctcctgcctgctctgagacaagaagggtggggtctcattagctttgcaacaggaaacatcctgttttatggtagtggggtcaggaatgtaggaactggtatccattctgccaattccaccacccattcagtttgcttatccctacagaacagtgactgaggttctttttttttttttttttttttttttttcaaatttccatgtattttctgccatttttcagggtctaagattggtcatacattcccaatttactctcagttccagtcaagctggttgctctgaaagtaacccagcttgttgctctaaaatacctcagtagcctgagtgttatactagagatctaaagggttaacaggatagggtggaaaggttagagactcctagaaatctctggtcaccgtgatcttcggcctcattctaatacctgttctttggacagtctttttcctttggtgctctcttgcctttagctaccttctctaatatgtatgctaccatcactaataaagtgatgggaatgggtttgagagtcgtaatttatattaaaaagttgttggacttttaaatacattttttcaaataaaaaattaagcaaaatagttgcacagtaaaaaaaaaaaa

SEQ ID NO: 176 - DNA, 3138 bp, Homo sapiens
gctctctcctcctcctcctcctcttcctctctggtctcctccctcctccgggctgggttgcaaatggcttcgttccccgagaccgatttccagatctgcttgctgtgcaaggagatgtgcggctcgccggcgccgctctcctccaactcgtccgcgtcgtcgtcctcctcgcagacgtccacgtcgtcggggggcggcggcgggggccctggggcggcggcgcgccgcctacacgtcctgccctgcctgcacgccttctgccgcccctgcctcgaggcgcaccggctgccggcggcgggcggcggcgcggcgggagagccgctcaagctgcgctgccccgtgtgcgaccagaaagtagtgctagccgaggcggcgggtatggacgcgctgccttcgtccgccttcctgcttagcaacctgctcgacgcggtggtggccactgccgacgagccgccgcccaagaacgggcgcgccggcgctccggcgggagcgggcggccacagcaaccaccggcaccacgctcaccacgcgcacccgcgcgcgtccgcctccgcgccgccactcccgcaggcgccgcagccgcccgcgccttcccgctcggcacccggcggccctgccgcttccccgtcggcgctgctgctccgccgtcctcacggctgcagctcgtgcgatgagggcaacgcagcttcttcgcgctgcctcgactgccaggagcacctgtgcgacaactgcgtccgagcgcaccagcgcgtgcgcctcaccaaggaccactacatcgagcgcggcccgccgggtcccggtgccgcagcagcggcgcagcagctcgggctcgggccgccctttcccggcccgcccttctccatcctctcagtgtttcccgagcgcctcggcttctgccagcaccacgacgacgaggtgctgcacctgtactgtgacacttgctctgtacccatctgtcgtgagtgcacaatgggccggcatgggggccacagcttcatctacctccaggaggcactgcaggactcacgggcactcaccatccagctgctggcagatgcccagcagggacgacaggcaatccagctgagcatcgagcaggcccagacggtggcggaacaggtggagatgaaggcgaaggttgtgcagtcggaggtcaaagccgtgacggcgaggcataagaaagccctggaggaacgcgagtgtgagctgctgtggaaggtagaaaagatccgccaggtgaaagccaagtctctgtacctgcaggtggagaagctgcggcaaaacctcaacaagcttgagagcaccatcagtgccgtgcagcaggtcctggaggagggtagagcgctagacatcctactggcccgagaccggatgctggcccaggtgcaggagctgaagaccgtgcggagcctcctgcagccccaggaagacgaccgagtcatgttcacaccccccgatcaggcactgtaccttgccatcaagtcttttggctttgttagcagcggggcctttgccccactcaccaaggccacaggcgatggcctcaagcgtgccctccagggtaaggtggcctccttcacagtcattggttatgaccacgatggtgagccccgcctctcaggaggcgacctgatgtcggctgtggtcctgggccctgatggcaacctgtttggtgcagaggtgagtgatcagcagaatgggacatacgtggtgagttaccgaccccagctggagggtgagcacctggtatctgtgacactgtgcaaccagcacattgagaacagccctttcaaggtggtggtcaagtcaggccgcagctacgtgggcattgggctcccgggcctgagcttcggcagtgagggtgacagcgatggcaagctctgccgcccttggggtgtgagtgtagacaaggagggctacatcattgtcgccgaccgcagcaacaaccgcatccaggtgttcaagccctgcggcgccttccaccacaaattcggcaccctgggctcccggcctgggcagttcgaccgaccagccggcgtggcctgtgacgcctcacgcaggatcgtggtggctgacaaggacaatcatcgcatccagatcttcacgttcgagggccagttcctcctcaagtttggtgagaaaggaaccaagaatgggcagttcaactacccttgggatgtggcggtgaattctgagggcaagatcctggtctcagacacgaggaaccaccggatccagctgtttgggcctgatggtgtcttcctaaacaagtatggcttcgagggggctctctggaagcactttgactccccacggggtgtggccttcaaccatgagggccacttggtggtcactgacttcaacaaccaccggctcctggttattcaccccgactgccagtcggcacgctttctgggctcggagggcacaggcaatgggcagttcctgcgcccacaaggggtagctgtggaccaggaagggcgcatcattgtggcggattccaggaaccatcgggtacagatgtttgaatccaacggcagcttcctgtgcaagtttggtgctcaaggcagcggctttgggcagatggaccgcccttccggcatcgccatcacccccgacggaatgatcgttgtggtggactttggcaacaatcgaatcctcgtcttctaattgcatttcctaggtttctgtgtttggggtgtgtgtgcgtgtctctctctctctctctctctttctctttctctctctttttgaatttcaaagaagaaacagtctcagggaaatttcttttttcttttttttttttaaagagaacaagaaaagtacaacattgcttaagtcctacctcatctttatttttttacagatgaatgtacttatcttttctgcagggattgagcctgtgaagtgataatttctatctacctcataaatctttacatttccttctgcaacaggccctcttcccctcctcagtggagtttgcatttccctcttcccctgcgtggggcatgatatgcacaagcctggcatctgtatggctgggagggcactggatgtgtgtggtggggtgtattctgtagattgagccaaggaaacacaaaaaaaaactactaagtaaaaaaacaaaaaactata

SEQ ID NO: 177 - DNA, 10159 bp, Homo sapiens
cttccacctcccgagcatcgctctgattcattgttaaaataaagaggccatgaccctggcactcccaccccggcagcccctgtgcgtggaaacccagccaaggtctgatgatggaggagccttggccctggctgtcccaggggaggaggtgaaattcctcagctctccaccaagattggccacaaaagcctgatcccctggaacacagcaggcctcacatagacggtcagccattggatcataggaactgccctggcctgactcacccaatatggaggaggtgcctggggatgccctgtgtgaacactttgaggccaacatacttacccagaaccgctgtcaaaactgcttccaccctgaggaggcccatggagcaagataccaggagctcaggagcccttcaggtgctgaggtgccctactgcgacctgcctcgatgtccacctgcccctgaggacccactcagcgcctcaacctccggctgccagtctgtggtggacccaggcctcaggccagggcccaagaggggcccatccccctcagcagggctcccagaagagggtcccacagctgcccccaggagcaggagccgggagcttgaggcagtaccctatctggagggcctgaccacttccttgtgtggcagctgcaacgaggaccccggctctgaccccacctccagccctgactccgccacccctgatgataccagcaactcgtcctctgtggactgggacactgttgagaggcaggaggaggaggcccccagctgggacgagctcgcagtgatgatcccgaggaggcctcgggaggggccgagagctgacagctcccaaagggctccgtctctcctcaccaggtcccctgtgggaggagatgctgcaggccagaaaaaggaggacaccggcggtgggggccggagcgcaggacagcactgggcaaggctccggggagaaagcgggttgtccctggagcggcaccggtcaacactgacccaggcttcctccatgacaccacacagtggacctcgaagcaccacgtctcaggcttctcctgcccaaagggacactgctcaggctgcctctacacgtgaaatccccagagcctcctctccccatcgaatcacccaaagggacacctccagggcctcatccacccaacaggaaatctccagggcctcatccacccaacaggaaacctccagggcctcatccacccaagaggacacccctagggcctcatccacccaagaggacacccccagggcctcatctacacagtggaacacccccagagcttcctctccctcacgaagcacccaactggataaccccagaacctcttctacccagcaggacaacccccaaacttcttttcctacttgtactccccagcgggaaaaccccaggacaccctgtgtccagcaggacgatcccagagcctcctctcccaacagaaccactcaacgagagaattccagaacatcctgtgcccagcgggacaatcccaaagcctccagaacctcctctcccaatagagccacacgagacaaccccagaacatcctgcgcccagcgggacaatcccagagcctcctctcccagtagagctacacgagacaaccccacaacatcctgtgcccagcgggacaatcccagagcctccagaacctcctctcccaatagagccacacgagacaaccccagaacatcctgtgcccagcgggacaatcccagagcctcctctcccagtagagctacacgagacaaccccacaacatcctgtgcccagcgggacaatcccagagcctccagaacctcctctcccaatagagccacacgagacaaccccagaacatcctgcgcccagcgggacaatcccagagcctcctctcccaatagagctgcacgagacaaccccacaacatcctgtgcccagcgggacaatcccagagcctccagaacctcctctcccaatagagccacacgagacaaccccagaacatcctgtgcccagcgggacaatcccagagcctcctctcccaatagagctacacgagacaaccccacaacatcctgtgcccagcgggacaatcccagagcctccagaacctcctctcccaatagagccacacgagataaccccagaacatcctgtgcccagcgggacaatcccagagcctcctctcccaacagaaccacccaacaagacagccccagaacatcctgtgcccgacgggacgatcccagagcctcctctcctaacagaaccatccaacaagagaaccccagaacatcctgtgccctacgggacaatcccagagcctcctctcccagcagaaccatccaacaagagaaccccagaacatcctgtgcccaacgggacgatcccagagcctcctctcctaacagaaccacccaacaagagaaccccagaacatcctgtgcccgacgggacaatcccagagcctcctctcgcaacagaaccatccagcgagacaaccccagaacatcctgtgcccagcgggacaatcccagagcctcctctcctaacagaaccatccaacaagagaacctcagaacatcctgtacccgacaggacaatcccaggacctcctctcccaatagagccacacgagacaaccccagaacatcctgtgcccagcgggacaatctcagagcctcctctcccatcagagccacccaacaggacaaccccagaacttgtattcaacagaacatccccagatcatcttctacccaacaagacaaccctaaaacctcttgtaccaaacgagataacctcagacccacttgtacacagcgggaccgcacacagtccttttcctttcaacgagacaaccctggaacctcctcatctcaatgctgcacccaaaaggagaatctgagaccatcatctccccaccgctccactcaatggaacaatcccaggaattcatctccccatcgtactaacaaagacatcccctgggcctcgtttcccctccggccaactcagagtgatggtccccgaacctcttccccatctcgctccaagcaaagcgaggttccctgggcatccatcgccctccggccaacccaaggtgacaggcctcagacatcctctcccagcaggccagcccagcatgacccaccccagtcctcctttggccccacccagtacaacttgccatcccgggccacctcttcctcccataacccaggccaccagagcacctcccgaacttcctcacctgtgtaccccgctgcctatggggctcccctgacctctcctgagccctcccagcctccatgtgctgtgtgcattgggcaccgggatgcccctcgagcctcttcgccccctcgctatttgcagcacgaccccttccccttcttcccagagccccgcgcccctgagagtgaaccgccccaccacgagcctccctatataccacctgctgtgtgcattggacaccgagatgccccccgggcgtcctcgcccccccgccacacccaatttgaccccttccccttcctcccagacacatcagatgccgagcatcagtgtcagtccccccaacacgagccccttcagctccctgcacctgtgtgtattgggtaccgagatgcaccccgggcctcctccccaccacgccaggccccagagccttccctcttattccaggacctccccagggccagcacagagagccttgtcccttccatggactctctgcacgagtgcccccacatccccacccctgtgtgcattgggcaccgggatgcaccctccttctcatccccaccacgccaggctcctgagccatccctcttcttccaggatccccctggaactagtatggagagcctggccccctccactgactctctgcatggctccccagtgctgatcccccaagtgtgcatcgggcaccgggatgcaccccgagcctcctccccaccccgccacccacccagtgacctagcgttcctggcaccctcaccttcaccgggcagctctgggggctcccggggctcagcgcctcccggggagaccaggcacaacttggagcgggaggagtacactgtgctggccgacctgcccccacccaggaggctggcccagagacagccagggccccaggcgcagtgcagcagcgggggccgcacccacagccctggccgtgcagaggtggagcgcctcttcgggcaagagcgcaggaagtccgaggcagcgggggccttccaggcccaggacgagggacggtcacagcagcccagccaaggccagagccaacttctccgaagacagtccagccctgcccccagcaggcaggtgaccatgctccctgccaaacaggcagaactgacccggcggagccaagcagagccccctcatccttggagtcctgagaagagacctgagggagatcggcagctccaggggtccccgctgccccccaggacatcagccaggacccctgagagggagctgcggacacagagacctctggagagtggccaagcaggcccaagacagcctctgggggtgtggcagagtcaggaggaaccgccagggtcccagggccctcatagacacctagaaaggagctggagcagccaggagggaggcctgggccctgggggctggtggggatgtggagagcccagcctgggggcagccaaagccccggagggagcatgggggggcacttccagggagtacaaggagagctgggggcagccagaggcctgggaggagaagcccactcatgagctccccagagaactaggaaagagaagcccactcacgagcccccctgagaactggggaggccccgcagagtcctcacaatcctggcactctgggacacccactgctgtgggctggggggcagagggagcgtgtccatacccgcgtggctctgagaggcgacccgagcttgactggagggatctgcttggccttctccgggcaccaggagagggggtctgggcccgtgtccccagcctggactgggagggcctcttggagctcctgcaggccaggctgccccgcaaggacccagctggacacagggatgacctggccagggctttagggccagagctgggtcccccaggcacaaacgatgtccctgagcaggagtcacacagccagccagaaggctgggccgaggccaccccagtcaatggacacagccccgcactgcagtcccagagcccggtccagctgcccagccctgcctgcacctccacccagtggccaaagatcaaagtgacaagaggaccagcgaccgcaactctggcaggcctggagcagacgggccccctggggagcaggagcactgcgaagggccccagcttgccagagctgcagttccaaccagaggagcctgaggagtcagaaccaagcagaggccaagaccccctgactgaccagaagcaggcagactcggcagacaagaggccagcagagggcaaggctgggagcccgctcaagggccgactggtgacctcatggcggatgcccggggaccggcccacgctgttcaatccgttcctgctgtctctgggggtcctcaggtggcgaaggcccgatctgctcaacttcaagaagggatggatgtcgatcttggacgagcctggagagcctccctccccctcgctcaccaccacctctacttcgcagtggaagaaacattggtttgtgctgacagattcaagtctcaaatattacagagactccactgctgaggaggcagatgagctggatggtgagatcgacctgcgttcctgcacggatgtcactgagtacgcggtgcagcgcaactatggcttccagatccacaccaaggatgctgtctataccttgtcggccatgacctcaggcatccggcggaactggatcgaggctctgagaaagaccgtacgtccaacttcagccccagatgtcaccaagctctcggactctaacaaggagaacgcgctgcacagctacagcacccagaagggccccctgaaggcaggggagcagcgggcgggctctgaggtcatcagccggggtggccctcggaaggcggacgggcagcgtcaggccttggactacgtggagctctcgccgctgacccaggcttccccgcagcgggcccgcaccccagcccgcactcctgaccgcctggccaagcaggaggagctggagcgggacctggcccagcgctccgaggagcggcgcaagtggtttgaggccacagacagcaggaccccagaggtgcctgctggtgaggggccgcgccggggcctgggtgcccccctgactgaggaccagcaaaaccggcttagtgaggagatcgagaagaagtggcaggagctggagaagctgcccctgcgggagaataagcgggtgcccctcactgccctgctcaaccaaagccgcggagagcgccgagggcccccaagtgacggccacgaggcactggagaaggaggttcaggctcttcgggcccagctggaggcgtggcgtctccaaggggaggctcctcagagtgcactgagatcccaggaggatggccacatccccccgggctacatctcacaggaggcatgtgagcgcagcctggcagagatggagtcctcgcaccagcaggtgatggaggagctgcagcggcaccacgagcgggagctgcagcgcctgcagcaggagaaggagtggctcctggctgaggagacggcagccacggcctcagccattgaagccatgaagaaggcctaccaggaagagctgagccgagagctgagcaaaacacggagtctccagcagggcccggatggcctccggaagcagcaccagtcagatgtggaggcactgaagcgagagctgcaggtgctatcggagcagtactcgcagaagtgcctggagattggggcactcatgcggcaggctgaggagcgcgagcacacgctgcgccgctgccagcaggagggccaggagctgctgcgccacaaccaggagctgcatggccgcctgtcagaggagatagaccagctgcgcggcttcattgcctcgcagggcatgggcaatggctgcgggcgcagcaacgagcggagttcctgcgagctagaggtgctgcttcgcgtaaaagaaaacgaactccagtacctaaagaaggaggtgcagtgcctccgggacgagctccagatgatgcagaaggacaagcgcttcacctcgggaaagtaccaggacgtctatgtggagctgagccacatcaagacacggtctgagcgggagatcgagcagctgaaggagcacctgcgtcttgccatggccgccctccaggagaaggagtcgatgcgcaacagcctggctgagtagaggtcccgcccagctgcagaccctccaggctggaggaccagccgccctccttccctcctggatggaagtaaaaagccaagctttctccccaccctctgtgggccacacgtgcacttgcacccaccacacacacacacacacacacacacacacacacagacacacagacacatacgcacacacgtgcacacatgtacacacggatacacacacacacacacacactgcatatctgagcgcgcccctcgcactgggtctcaccttgcaccttcttcaggattttatatgtgaagagatttttatatagatttttttcctttttttccaaaacactttatactttaaaaaaaaaaaaaaaaagcaattcctggtggctgtgtgcctccaaccctggtccccctctgtctccagccaccctctgcttgggcttctgagctggtggccctggcccagaggtctggcggaggcccaggcagcagccatggcggggtgtctctacaggggagaggcgggagcctgccaccctcttcctgccctacctcctactaacacttcctgccccatttggacccgtaccatggggctcaggacagagggagctagcagctggcctccatggccccacagcctccttcgaggctgtgctgggtgcagaaccgccagagccacccaaaaggtgtttctcttctgctccctgaacctcttaacttaataaaacgttccagcagctctggtgtcctagatggctggcagaacaggaatggagattggggtttcttgaagtggcttccccactcacaccctacccacaccccacccttcctaaagcagcggcctctaggcttctgagggtggggctgaaaatccaaggtctcccttagtacagactgtgacgcccccagtgtggcttgcaggctagtggcagcggaagcatgtgggaaatagcaagtccagtcccaccccaacctactgaaccagcgtctgcattttaacagggtgccccagtgattcacgtgaccttcaaagtctgaggagccctggagtagggcccagggcccaggcctgagagagaggcctggggctaagactagccctgaccatgaccttgggcaagtcacacccctcactgagcctcagtttgcttctccatcaaatgggtgtttttctttcagtcccagtcctctcctgaggcttttcccagaggtcatgcccagccctgggcaggggtgagggcagggttgtggctgccaggcacaggtccagcgggctgggagtcctcaccatggctggctgtgctgattatggttgcatggggctgggaagaggtcccatttctgagccacagaaacaggccacatccagtaggggtcctggaaggctgtgagaacccagaggagaccctgacccagcctgcaggtagaagactgcctttggaggcagctttgaaagatgactcttccagatggaagaatcaggaagggccttcccacgtggaggcaccagcaggagcaaacgtccctggtgtgttcaggcaaagagccacaggagagtgacctcgtggagtgggaagagattgtttcccattcccttgccagggattggttgaggaatggacaaggcttgcagttcacgcaagccagtgaaatgcgaggggaagtcttgggagtggggtggaggaggtcatctgggaagggtgtccttggtcttaaaaagaggcacaagaggccgggcgcggtggctcttgcctattatcctagcactttgggaggccaaggcagggggatcacttgaggtcaggagttcgagaccagcctggccaacatggtgaaaccccgtctctactaaaaatacaaaaaattagccagacgtggtgccaagcacctgtaatcccagctactcaggaggctgaggcaggagaatcacttgaacccaggaggcagaagttgcagtgagccaagatcgcgccactgcactccagcctgtgtgacaagggcgaaactccatctcaaaaaaaaagggggagggtggcgcaaggagaggacacctctctcctggccctgtcgccatcttccctcatcaatagctaaaaatggcaaagaagaaagagccaggaccccgtgccatcaaatcctccggccttgtgctgccctgtctcggcactgcttgccttaggagatcaggagtgttcctagccactgggagatgggatgcctgccactggcagctctgccgtccatcctcaccatcccaccgtccccccaagacagctctccatcccatcctctgcctcccttctagcctcaacctaactcagggctcccccgtctcacacctgggttgcaggaacatcctcttcaccaacccccctcccatccctcctcagggctgcctagggcagctacaaaaaccaggccagcctctgaaaggtgctccacatctcattaaaaaccgtgaaatcgcactgccccactatcagaatagctcagaggagaaggtctgccagtaccaagtgctggtggggatacggagaagagcagctcccaggcgctgctggtgcaaatgtgctttgttgcacccacggcaggaaactgaccagcttctcatcaagttaaatacgcatctaccctatggcctagcatttccactcttgcttacacatccaggagaaatgagtccttacatgcacaaaaggatgagtaccgtaatactcacatcagcaaataaacaatacagctgtgtgtcagtagtagaatgaataaattgtggtcgattcataaaaaaaaaaaaaaa

SEQ ID NO: 178 - DNA, 9855 bp, Homo sapiens
ggtggagccggcggcaggggccaggcctctctaggctctccggctgagccgggttggggcccgggttgggccgcccggggactctggagcattgggatttgtagcgcgccctctgggtaggcggctgtagcggagaggcgtgcgggatcgggatgtcggggctgctcacggacccggagcagagagcgcaggagccgcggtaccccggcttcgtgctggggctggatgtgggcagttctgtgatccgctgccacgtctatgaccgggcggcgcgggtctgcggctccagcgtgcagaaggtagaaaatctttatcctcaaattggctgggtagaaattgatcctgatgttctttggattcaatttgttgccgtaataaaagaagcagtcaaagctgcaggaatacagatgaatcaaattgttggtcttggcatttcaacacagagagcaacttttattacgtggaacaagaaaacaggaaatcattttcacaactttataagttggcaagacttaagagctgttgaacttgtaaaatcttggaataattctcttcttatgaagatatttcacagttcttgccgagtgcttcactttttcactagaagtaaacgactttttacagccagtttgttcactttcacaacccagcagacttctttgagattggtctggattttacagaacttgactgaggtgcaaaaggcagttgaagaagaaaattgctgctttgggactattgatacctggttgttatataagctcacaaaaggttctgtatatgccacagatttttcaaatgctagtacaactggactttttgacccatataagatgtgttggagtgggatgattacctctctaatttcgataccactttctctcctacctcctgtgagggacacaagccacaattttggatcagtggatgaagagatatttggtgtgcctataccaatagttgccttggttgctgaccagcaatcagccatgtttggagagtgctgcttccagacaggtgatgtgaaattaaccatgggaactgggacatttttggatattaacactggaaatagccttcaacagactactggaggcttttatccattaattgggtggaagattgggcaagaagtcgtatgcttagctgaaagcaatgcaggagacactggtactgccataaaatgggctcagcagttagaccttttcacagatgctgctgagactgaaaaaatggccaaaagtttggaggattctgaaggagtttgttttgttccatcttttagtggattacaggctccattaaatgacccctgggcatgtgcctcttttatgggtttgaagccttctaccagtaaataccatcttgtacgagcaatattggagtcaatagctttcagaaacaaacagttatatgagatgatgaagaaagagattcatattcctgtaagaaaaatccgggcagatggaggagtttgtaagaatggttttgtcatgcagatgacttcagacctgattaatgagaatatagacagacctgccgacattgacatgtcatgcctgggtgcagcttctctagctggccttgctgttgggttttggactgacaaggaggaactaaagaaactgagacaaagtgaagtggttttcaagccacagaagaaatgtcaagaatatgaaatgagtctggaaaactgggccaaagcagtgaaacgctccatgaattggtataacaagacataacactaaatgaaatgatcaaaaccataggtagctggtttatgtgacgtgcagatgagatgaagctcagggataacccatatgacaatgactaagaggagaaaattttaaataagcttcataacttaagaagcattgcttttaaaaaaacaaaacggaacaaaaaactcttatttttttcccctaaaccatggtaaggcagcaatacctcaaaactttatatcttctattttgtagcaaattccaaaggacattagtcatttccaaccacattttgacagttatgggtcctcttcctttttatactgggtcagtggtacataggaacataatgatttaccatccaagctaatagttctgggtcaagtaccatgcacatattgttccaaaattatgtgaaacgtatttctttaattctttaagtgggctatttgaagtacatatagctaaaaagaaagaataactgagaaaatgtggaattttgaaacattaatattttatgtttaaagccataatttcctaatattatatccaaatatgagcttaatatgtccctctcagataagcttatgagatagttaatgctttcctttactggtcttaaagacactgccttaatttttccttgttcaaccaaaatctgagcattctttctatgttgaaaacactgaaaaactaattttagttaatgaactagaaagaatattgatttttaagaaacagaaaaatactacttattttccttctcaaataacgtttctttcaaaaacttctggctgaagtataacatgctggtagttaacataaatcttgtctttctcttgttctttatctttctttgttatttagatgcttgtataaatgtcttttgtttttattaagtgcctaattgacagagcttaatttgaagaagtgccctaatttattgaccacttaagaattgcctttattggggtattttatttgttcctgcgtctttttgatgtttgttcagtctactcatccctgtgagtatgtgtgggggacagctgatagaagggaggagagtgtgtctatgctcaggattgccctttagccactcagccagagatccacagggagcaacaaggacagtttcacatgcttagactttcttggaagaaacagtgaggaggagtaagtcgtgagtagtgtcaagctggatgtagaattgtcctaaggcagttgaccccaccttccaacatgttttcactttatttgcccctccctacatttgggttaggttccatttggatttgcagcaataatgactttatttctctcttggtcaggatttggcacataaaatccttttattatagaactagctattttagttacatagtaatgtaactaatggagagatttatagagaattttgtttttgctgtcatatatgtccattttggagacagatatgatagaactagaaattaagttgcatttctgcaagtgccatttgaatgaacttcaagtatcttcttaattattaaattttctgatgaaggcattgtaacaaatatatagtattattaaatctaattaatatttggaaatattaataaataggtattttatttactgtaaaaagtcaaacttcattatgtagataaatcttattcttttcattctttcccctgtttacatcctttttacaaagcttagtcaccaattaaagctttcctatcaaaatcacatggaagctgctctgttgttttactgttacacattctgtttctcagtgggtgtaatttttttttctttttctttttttgtagagacagggtcttgctgtgttgcccagggtagtctttaattcctggcctcaagtgatcctcccaccttggcctcccaaagtgctgggattgcagccgtgaaccactgcacccagccaatgggtgtaatttcataggaaataattctttttgtcagaatgtactgaattgtaatattaatacctgaaaatttgttagttcacttcttttccacgttcttctttcccaacatataaccacaaaataaaggataaatactttgggctgtgtgcagtggctcatgcctgtaatcccagcactttggcaggctgaagtgggcggatcatttgaggtcaggagtccaacctggtcaaacacggtgaaaccctgtctccactaaaaatacaaaaattagctggatgtggtggtgcaagcctgtaatcccagctactcgggaggctgaggcaggagaattgcttgaatctggggggtggaagttgcagtgagccaagatcatgccactgcactgtagcctgggcaacagagcgacactgcgtctcaaaaaaaaaaaaaaaggatcaatacttttcagataatgttggaaagtaactttgaatgtccctcatcggaattgagcatctcctcaagtgtcagtggctatttttttcttctgtgaatctaaaaactaatattttatttttaatatttgtggccatttttagtgataagactttaataaatatttttggacttaactaaaatcagaaacatgaccacatttgcttttgtggttgcagaaacagttgataagatcaattgagcaacaaaattgtcctttcttttttttttttttttttgagacattgtcatgctctgttgcccaggctggagtgcagtggcatgatctcggctcactgcaacctccctctcctgggctcaagcagtcctcctgcctcagcctcccaagtagctgggatttcaggtatacgtcactacgcccagctgatttttgtatttttagtagagacagggttttaccatgttggccaggctggtctcaaactcctgaccttgtgacccacccacctcggcctcccaaagtgctaggattacaggcgtgagccaccatgcctggcttgtcctttctgtcttccaagtttgtttttcatttgtatgctaatatttgaagtttagaaaaatttgtgctacttctcagcatgttttattttcccattatagatctatcagatatttttagaaggtctgcaactgtctgataaaggaagagaatgttcctgttcaatctatcttaaagtgctactaattgcttttatactatagacatactgattttttcatcttttttatccaaccatggcatggtttcctaatctcagcattgacattttggactggataaatctttattttgggatgctatgctgtactttataggatgtttagcaatatccctgacctctgccctctagctacaagtaccatccccctagttgttatggccaaaaatgtcttcaaacattgccattctgagaggcaaaattgcccccagttgagagccactgatacaggctgttagaagaaaatcgaagactcagtgaatatagtgtcatactccttttctttctgcctcattttaccttaggaaatggttgttagcaaaaaaattagttaatcgtatcttgaaataaatagggtatctattttgctgattaataaagaaaaaataaatctcagctgggcacagtggctcacacctgtaatcctagcactttgggaggccaaggcaggcggatcacttcagctcaggagtttgagaccagcctgggcaacctggcgaatccctatctctacaaaaaatacacaaattagctgggtgtggtgacacacacatatagtcccagctaattagggggctgaggtgggaagatcacttgagctccaggaggtggaggctgcagtgagccaagttggtgtcactgtactctagcctgggtggcaaagtgagaccctgtctcaatcaatcaatcaatcaatcaatcaatatctcatgctgtaattgtcttctgatgttttcatccacccagccccacctctgcagccttaattactggagtaggtccatgatttcagtgtagggttaatgtattctgcagatcatctttgatttgacctgcttttttgcttcctttttatctctgaacaaaggagatcatcattctctttaatctgccttctgtgtaaatctctaccagactggaagctccctgaaagcagaaactgtctgcttccccagaacttagcactgtgctttcatgtatgtgggataaatttttactttgttagtgcaactttgtttgtacacgttatccttgatattacatacatttgttgatgggggcaatttatatttgttgtgagtaaaatacttttttgttggattaagaagaactatactcttcccagcactttgggaggccaaggaggacggattacctgaggttagtagcttgagaccagcctgaccaacatggagaaaccccatctctattaaaactacaaaaaaattagctgtgcgttgtggcacatgcctgtaatcccagctagtcaggaggctgaggcaggagaaccgcttgaacccctgaggcagaggttgcggttgagccgagatcgcgccattgcactccagcctgggcaacaagagttaaactccatttcaaaaaaacaaaaacaaaaacaaaaacaaaaaaacaaaagaagaactactctgtagtgagagctagaatcctcatgttgtttatttaaaatttttggccaagtacagtggctcatgcctgtaatcccagcactttgggaggctgaggccagaggatcacttgaagccaggagttcagttacagcttgggcagcaaagtgagaccttgtctctacaaaaaaattttttttaaattagccaggtgtggtggtatgcccctgtagtcccagctactcaggaaaccgaagcaggagaatcgcttgaacacaggagtttgagggtgctatgagctatgattgtgccactgcactccagcctgggcaacagggcaaggccctgtcttaataaaataaaataaaattcttaatatgtttatatatttgaaaaactatttgtgtagagacacatgtctgtaaatacacatagatatattaactttttaagctttaattgaagcctttctcttcacaggttttatatatttgactgcagatgactaacagattgaattttaagagtgcgaaacactctggtgctatagggaaggaacttcataaatagcccctcctgtaagggaccagtctttaatttaaaacagtccagcccaggaatcttgcaagaattttgtaattatttgaggagagatgtagatataccctggagttctttgactttaagttattctagagtcatcccagagatggcctagaagacttgaatgtaccccaaaggattctgaatccctttgggaaatttagactatgattttcagtaagaattaaaagccccaggataagcgtggtggttcacacctgtaatcccagcaatttgtgaggccaaggcgggaggatcgcttgagctcaggagttcgagaccagcctaggcaacatagtgagaccccacccatctcaatttaaaaaaagagagaaaaaggccaggtgtagtggctcacgcctgtaatcccagcactttgggaggccaaggcgggtggatcacctgaggtcaggagttcaagaccagcctgatcaatatggtgaaaccccatctctactaaaaatacaaaaattagccagtcctgatggcatgtgcctgtggtcccagcgacttgggaggctgagacaggagaattgcttgaacccgggacgtggaggttgcagtgagccgagattgggccactgcattccagcctgggtgagagagcgagactctgtctcaaaaaaaaaaaagagagagagagagagagagagagaaagccccaaacataccttgggcctttacaacctacttggtcccagaatcgtcttattgtaaacccaaagccaggtcttctggttcgaaccagtcaaaatgggtaatctaaaaaagttaaatagatgattcaaaatcgtgttggtggttttttctttttaaatcccctttccaagtaaaaggaatcttttttttttttttaagttttgaagcctcatagccataaatattttggcaccagcatctattggcacctaagtcattggctgtatcatattcccatgggacccttgttcctagaggaatgcaggaatgatcttggagtgggaaggacagaaacaggtgcttgcaaaatcagatatttctgaaattctctgttattctatttctactgtctttccccactttactataaatttgatctgttataaaatggctgtgtttagatagatacccgtgatgtttaggaaacaaatgatatagagactcccatttaaatgaatcttatctttataagaaacagccaaactgttttccagactggctataccatcttacattcccaccaggaatgtatgagtgatccagtttctctgcatgctcgccagcatttggtgttgtcactatttcttatttcaaccattctgtttatccttttcagtgaaatatctgttcatatcttttgcccatttgccaattgaggcaggaggatcacttgagcccaggagttcgaggctgcagtgagatatgatcactaaatgtttgcttaatgagccatatctttaaatatcttttttaaagtttttaaaagtcagtccagtggtttatgtgattatgtgggattttttaaatctttccaggcaaaatgtgtatagcattttgaacatatttacactgtactgagcccaagagttctcatattctttctttgctcattatagagtatggtactaatactgtataatagtaaattttcaaagatacctttatttagaatgttagagtatacagatatatactttgtacatagttatcataatgtttctaacctttttatttaaagcaggctgatttgtgtaaaggtttcagaatgattttgttaataagttattagaaactttcctatttgtacaagatggtaaatgtagattccaatttgtatgcctcagtaaattcataatcttatttctctgatgtgagccactgtgcctggccttctgtgatgctcttaatgaattttgcagttttattaaattgtcattgagaacctcataaatcattgttaagatctatacaaaaaatcaaggatccacagtaatagaatatttttcatctgcatatgaatttttcccttccctttttgtctacttttagatttaaaaaaaattaccaggacattcttattaaatactattacctgttttggtttctgcacattaagaaagtcacagagaagccagacacagtggcatgctcttctattcccagctactcaggaggctgaggctggagaatcacttgagcccaggagtttgaggatatcctgggcaacatggtgaaacttggcaaaaacaaaaacaaggccgggcatggtggctcacacgtgtagtcccagcactttgggaggccacggctggcggatcacgaggtcaggagatcgagaccatcctggctaacatggtgaaaccctgtctctactaaaaatacaaaaaattagccaggcgtggtggcgggtgcctgtactcccagctactcgggaggctgaggcaagagaatggcatgaacccaggaggcggagcttgcagtgagctgagatcgcgccactgcactcctgcctgggtgacagagtgagactccatctcaaaaaaaaaaaacaaaaacaacaacaacaacaacaaaaaacaaccagagaaatagcacttgttaactacaattgtgactctaggtaaacttgggccttaatatggttagacaagaagggttttaggtaacttgcctttttagatcctatttaggcttattagtctatattctacattcttgcacgatggaaattactagagaagtgggataattctttgttgtggggaaaataaaatttgttgtgaaaatatactgtattttaaaatatttagaaagattataaataactggagaaaagataatttcatatactaatatgatggaattagcctagcagatgttaaaaatcctttctgaaaattataatctaaaattatttgggaaattacaatggaactgaataatctgtacgttggtatattaaagccatttttatattgtgaaaaaaaaaaaaaaaaaa

SEQ ID NO: 179 - DNA, 6152 bp, Homo sapiens
cgcgctgccccctttaccccgggccgcgccccggggccccgcactgacggcccatggcgccgccagccgcccgcctcgccctgctctccgccgcggcgctcacgctggcggcccggcccgcgcctagccccggcctcggccccggacccgagtgtttcacagccaatggtgcggattataggggaacacagaactggacagcactacaaggcgggaagccatgtctgttttggaacgagactttccagcatccatacaacactctgaaataccccaacggggaggggggcctgggtgagcacaactattgcagaaatccagatggagacgtgagcccctggtgctatgtggcagagcacgaggatggtgtctactggaagtactgtgagatacctgcttgccagatgcctggaaaccttggctgctacaaggatcatggaaacccacctcctctaactggcaccagtaaaacgtccaacaaactcaccatacaaacttgcatcagtttttgtcggagtcagaggttcaagtttgctgggatggagtcaggctatgcttgcttctgtggaaacaatcctgattactggaagtacggggaggcagccagtaccgaatgcaacagcgtctgcttcggggatcacacccaaccctgtggtggcgatggcaggatcatcctctttgatactctcgtgggcgcctgcggtgggaactactcagccatgtcttctgtggtctattcccctgacttccccgacacctatgccacggggagggtctgctactggaccatccgggttccgggggcctcccacatccacttcagcttccccctatttgacatcagggactcggcggacatggtggagcttctggatggctacacccaccgtgtcctagcccgcttccacgggaggagccgcccacctctgtccttcaacgtctctctggacttcgtcatcttgtatttcttctctgatcgcatcaatcaggcccagggatttgctgttttataccaagccgtcaaggaagaactgccacaggagaggcccgctgtcaaccagacggtggccgaggtgatcacggagcaggccaacctcagtgtcagcgctgcccggtcctccaaagtcctctatgtcatcaccaccagccccagccacccacctcagactgtcccaggatggacagtctatggtctggcaactctcctcatcctcacagtcacagccattgtagcaaagatacttctgcacgtcacattcaaatcccatcgtgttcctgcttcaggggaccttagggattgtcatcaaccagggacttcgggggaaatctggagcattttttacaagccttccacttcaatttccatctttaagaagaaactcaagggtcagagtcaacaagatgaccgcaatccccttgtgagtgactaaaaaccccactgtgcctaggacttgaggtccctctttgagctcaaggctgccgtggtcaacctctcctgtggttcttctctgacagactcttcccctcctctccctctgcctcggcctcttcggggaaaccctcctcctacagactaggaagaggcaccctgctgccagggcaggcagagcctggattcctcctgcttcatcgattgcacttaggagagagactcaaagccctggggcccggccctctctgcatctctctctgatctagctagcagtgggggtgtcaggacagtgaggctgagatgacagaggtggtcatggctggcacagggctcaggtacattctagatggctgtcaggtggtgggtagctttagttacattgaatttttcttgcttctctatttttgtccacacacaaatcagtttctcctgatctttatgtcttggaacagggccagacagggagaactctcaggtactcttgggagttggtcccatacaagtgcggactcctggacattagcgaggtgtaaagagggcagtgtctgtgctgccccggcagctttgctctccagatgctggactagggtgggcctccttcagcctgggagggtctgagaataagatctagtgacccccatttatatcaaacctgataccttacacatgggcttctttctagattcttctttccatagctcatggagctgcagggaaagctttaagagctttggtcatataaaacatccattcagctgggcgcgatggctcatgcctgtaatcccagcactgtgggaggctgaggcgggcagatcacctgaggtcaggagttcgagaccagcctggccaacatggtgaaaccccgtctctactaaaaatataaaaattagtcaggcgtggtggcaggcgcctgtaatcccagctactcagaaggctgagacagaagaacagcttgaacccaggaggctgagattgcagtgagccgagatcgcaccactgcactccagcctgggtgacaagagtgagactctgtctcaaaaaaacaaaacacaaataaacaaaaaaaatccattcatttactcatgcaataaattctcctgcaagcttttatgggcactcagtaagtactcaggattggctttatcagccttgccactgagcagctcatggtcctatggaacctgagccaggcctcagtctctccatgattggctcagctaactctcagttcagagtggagagtatcaatcttgtgtttttgcccttaggcagcactatatgagacatggggcctgtggtccttccttctggtgtcccccgtgttaaaagataaaaaacaccccaagggccgggcgcggtggctcatgcctgtaatcccagcactttgggaggctgaggcgggtggatcacgaggtcaggtgatcgaaaccatcctggctaagatggtgaaaccccgtctctactaaaaatacaaaaaattagctgggtgtggtggtgggcgcctgtagtcccagctgctcgggaggctgaggcaggagaatggcgtgaacccgggaggcggagcttgcagtgagcagagatcacgccactgcactccagcctgggtgacagtgcaagactctgtctcaaaaaaaaaaaaaacactccaagggccatccgtgctctctgcccctcctgtggggaccaagtggggttaggaatggctcagtggggaaggagagcactcttgtccccagtcccttgccaccctgtcccttagatagggaggtgggctgcagagattggtgccagaagagggtgggtttgggaattggagctcctccaaggagctcctcctaagattgagtgctgcagctgtagtggctgctggttgggagagtaagtgccatcactaatttaaaagtccttgccatctggaatcaggctttgtcaacagcagctgagaaaagcagcctgtgcctctgctggccaggcctaggccctcgtcagagcgtgcctctccacaaggcacttgggcctgggtgattgttgcgcctctggctttggcgtttcctctttgcagcactttgcctacctcccccaagccctgagccactgcctgctggggctcctactgaggttctggaaacacctctgcacctgccgcccctgggaggaaagagggccacacaggaagtgtctgcagggagaggtggcactcggcagcctgagttcaggagaggtgcttggagcttcaggcagaggggccttcagaggagggaaacggagcaatgtgtcacaggcaggcaggggcaggactgccaccccaggccccgtgggaggcctgctgagggcacagagctgctcggtgcagccttcatgctttgatctggaaagagcagctgtccgcaggcctctgtctccaagaggcctgtcacacaggaggaccgctggaaacataccaacacgtgcagtctcccctccaagctattcatgctgtttgtggaatctctctcaaacataagtgtcaggtgtgtgtcgtcccaacgggtcctgtgctgtgaatagatccatgtgcagcacaaagggaatgtggcacgtggccccaggaagagttcacccggccagggggcagttgttcagttgcctggggctgacactgaccactggcctctggggtgtcctgcagcccaaatgcccaccttgccctcctcacatctcagtcaggggaggccatgcccaagccaatgtgctgtcacagcctgcagcgggggcagcacttcctcggagggcctgggaggtgctggggatgccccagcgcttctcttcctgcctcgccctggcatggcccagcgcctctaggatcaacttacgatccgtggagcagccccgggaaacccaaatctggctcaggacagcgtacgggcaggagggctgtaaatcatcccaggctaagcctccgtgggcactggctcctgccgcagcctggctatggactcagttagaaccaggtagaaagtcagcgacaccccacagaaggccactgcggctaggtaaacacctgagaaagaaactgctccagaagagatgacgtgggcttccaggagcatggaggaggtggcacttgaacttttaggaaactccttagatgagataaagtgggggttggaggtggcgaaaagagggtaaccctgggaaagtcagtcagaacccatggcagaagactgcaggagaggcaggggaggggcttcggggaccactgtggacagagctctgaaagcaccctggccaaagcccctcctgaggtgacagagcgtgggaggaggctgcactgggcctgcgtgccatcctcacccctgttccccgctggcgccaggccctgccttcttggtacctgtgccaacaggagagccctcaccagccgatcttgtcactctccgtggtgacagtgtcttggccagctgtggcccctagtttctagcagcgtttctcagtgtccttggcccttctgagaaggcaggcgggaggcacacggtgccctgttcttccccgtttgtccagttgcttgcaaagcagagaatgagtaggagtgaacccgagtgacttcacccgccctgtcccccacgtcaggacaggcttgaggcctctctgggcgtgagcgaggaaaccaggctgctctaacttctgaagagtgggctctggctcaagactccaatcggccagaagcccacagagatcaaagcactagcaagttcagctgtcctggccctcgggtagaacccacgggcgtgcctgggtgcggctccacccacatgccccactgtcagcccaggcaggagccttcctggccgggctcaggatctgcctgcagcccagccaggccatcacccagccccgatgcatcctggcactgcacgcttactcttcacaagcacttatacgcggatggcctccgagaccctgcctccctggtctgctgaggtcaggccaggtctcccacggagccgggcagctccacaccccaccacctggcaccgttaggtttcagatctcccgtgtggtgtttgatgtcggcttttgttcctaccttgggagtttggattgtttcctctggtgtctttgtttaccttcctcactgttctacctcctggccaggtctcagcttagcttccctggtgtggggtgtttttcaagccttccagccacagctgtctcccctcaggctggacggctccggggtgacagggcttcaccctctgcctgcagacccctggtgggcacatctcacaggcttccgtcttgctgagttgggtacggaggcagaagtggggtgtggaggaaagtcagagggaaatctgcttcagaaaggaagggtctttagacacaaagactggaggcccttccccgcccgcacgggagctgccatcgtgggtctcatgcacgtcaagaccttcccacatccaaactcagcttccagcagggattttgactttggatgacaaggctttatttgtaaatatgctcttaatatgcaactttgagaataaaatagaaacatcatgtattttaaaatataagatgaagtgtgacgcactgtatacaatttaatatatatttttagggttttgttatttaagaaaatggaatgtaatggtacttttacaaaagagaaaaaatgttatttttactttctggaaaaaataaatattctcattgttgtagaaagaaaaaaaaaaaaaaa

SEQ ID NO: 180 - DNA, 3032 bp, Homo sapiens
gtcacccgtaacaaccacaagtgccgtcgccgcgccccttccccctcccgcctccccggccccctccccggaaccggcggtcgagctacggtcgcggagcagtggaaccgagactgccccgcggagccgccggtatgagcgcccctcgccaccccgtgtcccaggcccggcctttctgacaagagctagacttcgggctccttgaggatattcagttttgtatgtttgaatatcctctcaccatgttcagcataaagtaccattcttaatgattatcctcaacaagacaggtgtgagagggttgctgttgtattgcaatcatggtgcagaaataccagtccccagtgagggtgtacaaatacccctttgaattaattatggctgcctatgaaaggaggttccctacatgtcctttgattccgatgttcgtgggcagtgacactgtgaatgaattcaagagcgaagatggggctattcatgtcattgaaaggcgctgcaagctggatgtagatgcacccagactgctgaagaagattgcaggagttgattatgtttattttgtccagaaaaactcactgaattctcgggaacgtactttgcacattgaggcttataatgaaacgttttccaatcgggtcatcattaatgagcattgctgctacaccgttcaccctgaaaatgaagattggacctgttttgaacagtctgcaagtttagatattaaatctttctttggttttgaaagtacagtggaaaaaattgcaatgaaacaatataccagcaacattaaaaaaggaaaggaaatcatcgaatactaccttcgccaattagaagaagaaggcataacctttgtgccccgttggagtccgccttccatcacgccctcttcagagacatcttcatcatcctccaagaaacaagcagcgtccatggccgtcgtcatcccagaagctgccctcaaggaggggctgagtggtgatgccctcagcagccccagcgcacctgagcccgtggtgggcacccctgacgacaaactagatgccgactacatcaagagatacctgggcgatttgactccgctgcaggagagctgcctcattagacttcgccagtggctccaggagacccacaagggcaaaattccaaaagatgagcatattcttcggttcctccgtgcacgggattttaatattgacaaagccagagagatcatgtgtcagtctttgacgtggagaaagcagcatcaggtagactacattcttgaaacctggacccctcctcaggtccttcaggattactacgcgggaggctggcatcatcacgacaaagatgggcggcccctctacgtgctcaggctggggcagatggacaccaaaggcttggtgagagcgctcggggaggaagccctgctgagatacgttctctccataaatgaagaagggctaaggcgatgcgaagagaatacaaaagtctttggtcggcctatcagctcatggacctgcctggtggacttggaagggctgaacatgcgccacttgtggagacctggtgtgaaagcgctgctgcggatcatcgaggtggtggaggccaactaccctgagacactgggccgccttctcatcctgcgggcgcccagggtatttcctgtgctctggacgctggttagtccgttcattgatgacaacaccagaaggaagttcctcatttatgcaggaaatgactaccagggtcctggaggcctgctggattacatcgacaaagagattattccagatttcctgagtggggagtgcatgtgcgaagtgccagagggtggactggtccccaaatctctgtaccggactgcagaggagctggagaacgaagacctgaagctctggactgagaccatctaccagtctgcaagcgtcttcaaaggagccccacatgagattctcattcagattgtggatgcctcgtcagtcatcacttgggatttcgacgtgtgcaaaggggacattgtgtttaacatctatcactccaagaggtcgccacaaccacccaaaaaggactccctgggagcccacagcatcacctctccgggtgggaacaatgtgcagctcatagacaaagtctggcagctgggccgcgactacagcatggtggagtcgcctctgatctgcaaagaaggagaaagcgtgcagggttcccatgtgaccaggtggccgggcttctacatcctgcagtggaaattccacagcatgcctgcgtgcgccgccagcagccttccccgggtggacgacgtgcttgcgtccctgcaggtctcttcgcacaagtgtaaagtgatgtactacaccgaggtgatcggctcggaggatttcagaggttccatgacgagcctggagtccagccacagcggcttctcccagctgagtgccgccaccacctcctccagccagtcccactccagctccatgatctccagatggcgattttgctgacagctgccaagaaaatgcttcactcaacagtcctcatgtgcccagagatgtttatagaactgtttgaattgcagccatcccctgccccctcccaggctgaagatctgttctttttaagttgattcgggagtggcattcttttatacccaaagactgtagtgcatcttgaagagctcaaagcacatgaccgcacaaatgcttacagggtttcctcccgagtaatccaatctcactccccttgtaagggaattctggggcagctatggtttgagtatgcagtttgcatcgtgtttctacctttagtaccttgccactcttttaaaacgctgctgtcatttcccatttcttagtactaatgattctttgattctccctctattatgtcttaattcactttccttcctaaatttgttatttgcatatcaaattctgtaaatgttttgtaaacatattacctcacttggtaatacaatactgatagtctttaaaagatttttttattgttatcaataataaatgtgaactatttaaagaaaaaaaaaaaaaaaaaaa

SEQ ID NO: 181 - DNA, 3755 bp, Homo sapiens
agcgctgcgcccggtccggcgcagctcccagccgcggacgcaggacccgaggctcgctcctgcgggcgcgcttgttttccagctgccgcctcgccctgcgcagcccccgcccgcccggccgccgctctctgctctgccccgcctgccttcctcgcccggcgctggatttatgaatggggggaagaggccacatgccgccgccgccgcctcgtgttgaccgcaagcagcccgggcccacggagctccggctgccgtgagagtgtcggcctggccccggcagccgctcggaggacttgttgctgctgcgctgccgccgctgcggggaagccggctattccggggcttggtgcggtcttggagccggagggtggcccgtgtgagcgcgagcgccccggaccttcgcggtgcgcgtggactgtgcgcttcctcgtctttggtcggggtgaaggcgggggcgtgtccccggcccagagcgtttgtgtgtcccgtcgtagcgggggaccgcgtgtgtgcttgcttctacttccccgggtcctccctctctgcgcctccctctctccggagcttcctgccctaaccccaaccacctgtgtaccggagaaatccaactcctcccgctccgcgtcctagggggataggcaggggcaagcccaagccgcagagggggccgccaccgcctcctgcctcctcttcgtctcctccccctcccccgtctgacgctgcctcctcgggaagggtgtttggagggcagcggccgccccaagccggagccccgcagcgcttcttatgatcagctcggtgtgtgtctcctcctaccgcgggcgcaagtcggggaacaagcctccgtccaaaacatgtctgaaggaggagatggccaagggcgaggcgtcggagaagatcatcatcaacgtgggcggcacgcgacatgagacctaccgcagcaccctgcgcaccctaccgggaacccgcctcgcctggctggccgaccccgacggcgggggccggcccgagaccgatggcggcggtgtgggtagcagcggcagcagcggcggcgggggctgcgagttcttcttcgacaggcacccgggcgtcttcgcctacgtgctcaactactaccgcaccggcaagctgcactgccccgcggacgtgtgcgggccgctcttcgaagaggagctcaccttctggggcatcgacgagaccgacgtggaaccctgctgctggatgacctaccggcagcaccgcgacgccgaggaggcgctcgacatcttcgagagcccggacggaggcggcagcggcgcggggcccagcgacgaggccggcgacgatgagcgggagctggccctgcagcgactgggcccccacgagggaggcgcgggccatggcgccgggtctgggggctgccgcggctggcagccccgcatgtgggcgctcttcgaggatccctactcctcccgggccgctagggtagtggcctttgcctctctcttcttcatcctggtctccatcaccactttctgcctggagacccatgaggcctttaatatcgaccgcaacgtgacagagatcctccgcgtagggaacatcaccagcgtgcacttccggcgggaggtagagacagagcccatcctgacctacatcgagggcgtatgtgtgctgtggttcacactggagttcctggtgcgcatcgtgtgctgccccgacacgctggacttcgtcaagaacctgctcaacatcatcgactttgtggccatcctgcccttctacctggaggtggggctgagcggcctgtcatccaaggcggcccgcgacgtgctgggcttcctgcgcgtggtgcgcttcgtgcgcatcctgcgtatcttcaagctcacacgccacttcgtggggctacgcgtgctgggccacaccctgagggccagcaccaatgagttcctgctgcttatcatcttcctggccctgggtgtgctcatctttgccaccatgatctactacgctgagcgcattggggccaggccctccgaccctcggggtaatgaccacaccgacttcaagaacatccccattggcttctggtgggctgtggtcaccatgacgacactgggctacggagacatgtaccccaagacgtggtcaggcatgctggtaggggcactgtgtgcactggctggcgtgctcaccatcgccatgccggtgcctgtcatcgtcaacaacttcggcatgtactactccctggccatggccaagcagaagctgcccaagaaacggaagaagcacgtgccacggccggcgcagctggagtcacccatgtactgcaagtctgaggagacttccccccgggacagcacctgcagtgataccagcccccctgcccgggaagagggtatgatcgagaggaaacgggcagactctaagcagaatggcgatgccaacgcagtgctgtctgatgaggagggagctggcctcacccaacccctggcctcctccccgacccccgaggagcgccgggccctgcgacgctccaccactcgagacagaaacaagaaggcagctgcctgcttcctgctcagcactggggactatgcctgcgccgatggtagtgtccggaaagagacctgccaagacgccctctcgtccaactatgcccaggctgaagtcctcaccctctcttaaagcggcaccaacgtgagagagacaggcagacagacagaaagccagaggcttagggaaactctggaacccagacaagaatcttttcgctgggaaagactcagatatccttgtttgcacaggactggtggaaaatctcccatgcgaccctcggggcccagagccatctgggtctgatgttctgttccattgtacatcgaagagatatatatgcacatatagtatctatattcatacatattatactcttgtgtgtagtgcacgtgctattggtggtttgtcttctttgttaggctgtgtctccctaagcccttgccccacccagagtttcccgtccccttcactgatttctgttgtttctgctgactgtgtgggtggaatgtcccaagaaaagtgcatctgggaattgccagtccagctgggtagtcccaggctcctgtcttggggatgtttcccctgtcagcaagtaacctggtgaagtctattgaaggccagactgccccctagggtcactgcttcactagccgcaccccaccccagattggggttctacctcccaccccacatcctcgttgtggggggacttccaggggctcctctgcagcctcctccactacttcctccaccccatctatgtccttgacttaggggggcattttgtcttttttagatttgattttgttctctctcctttgtctgtttgttgtcaaagatgctgctgggcagacaggcagggaaaggatctgtctgcccatctggcccagggggtccgagaagggaagccttgggcaagaggagaccagttgcaatactgtacttcctggtcagtggccagaggatgcgtgcaatagcagaggccaggtgaccccttcagccttggcctctgcccctcccttggccctccctccctgctcctccctggtgttggtcagtccttttctaaagctgtcccctcgtgtgtgtctggggcatgcccaggctgggccctgtgccctgtctgcatgcctccaactgtcatgctgtgctcgagccccaataaagacatctggagcatcctgctgctcctgctgtgtgagcacctgcaaaaaaaa

SEQ ID NO: 182 - DNA, 3985 bp, Homo sapiens
agctcggtcgcttgtgcgttccgctccggccgccctttgcgcttggatccacttccccatctgtaacgaggtgttgagacgaggcggagttgacctggaaacctctccttggccactgtcctttctaaggaactcatttccagagtccaccagcacagaactggtgggggagcctactaggagcagagaaaatggccatcttcaggcagctgtccctaggcgcgaaggccaccctggctgctgtcactgtcttcgtgtccatgatcgcctcccgctcgtatctggcagagagccttgagctcagggcctggcgttggctgcttcgcttgcagcttgccctgtttgtcaactcgctcttgctcattggctccctctacatttggcgcagcacagtgagcaacctctgccactccccagctgcagagtcaacctgttttcagctttggaaggtggtggttctggcatttctggccctggcccattccagtttctttaccatgttctttttagtggccgaagagccctatctcttttccttggcggcctactcctgcctgggtgcttacatcatcatgctcttcttcctcttcatcctcagcggcatggagcaggcctaccagctcttggcctggcgcagtggtagggtcgtgggcagccttgagaagacaaggaagctcgtgctcaggcctgccctggcagtgggagtgactgctgtgctcagcgtggccgggattctgaatgccgcgcagcccccggctgtgaaaactgtggaggtgcccatccatcagctgcctgcctcaatgaacaacctcaagatcgtgctcctctcagacattcacttgggccccacagtgggcaggaccaagatggaaatgtttgtgaggatggtgaatgtgctggaaccagacatcacggtgattgtgggtgacctctccgactcagaagcctcggtcctgcggacggctgtcgctcctctgggccagcttcattcacatctcggtgcctacttcgtcacaggcaatcatgagtactacacgtcagatgtcagcaactggtttgcacttctggaatccctgcatgtccagcctcttcataatgagaacgtgaagatttccgccacacgggcccaacgtggtggtggtggcagtggcagtgggagtgaggatgaggactggatctgcttggctggggtggacgatattgaagcagacatcctgcactactctggccatggcatggatcttgacaaggccctggagggctgcagcccagaccacacaatcatcttgctagctcaccagcccctggctgccaagagagctctccaggctcggccagatattaacctgatcctttctgggcacacacatgctgggcagatcttccccttgaacgtagcagcctatctcctgaatcccttctttgctggtctctaccaggtggcccaggctacattcgtgtatgtcagcccaggcacagcctactacgggatacccatgaggctgggtagcagggccgagatcacagagctcatcctgcagcggtctccctgaactggccctgccctgtgcacctctgccctgcccttgtcctcgaccctccatcctgcttcagagtggtttgcctgcttttcccctccagccttgcccactcatccttgcctacacacccttggtcacaagcctgactcaaacagtgacttatggtgggcctgcctggcatgttcaggctggtttaactatttccttggccagttgctttttttgatgcacttgtgagatcactaaggtcacatatattagcactcccctctattttccagatgatgtggaatggggaccttctcctgcagagctcccagggatgaacctcccctcggggttgctagaaaggcatacctctagaaggtggggcggggaggagcaggagcatttttctcctggtgttttaaaattgtctttaggacttaagtggtttccagaatcattgatccagagcctttctggggaaggggtagtgttgccaggtaatttgggagaacaggcaagatggaagggccctctggctgctagagaagaatattttcttttcctctgattctatcaggatcacctctattgagggcatcagcaaaatctactggaatgcaaagctcctcctgttccaggccttgagggatgctatttaactgtctgtgctcctgggcctttgggggcaaggtcaggggagaagaacggtgggcgccatggtcggtgatggtgagaacatggctgcttaggaattcagagggctttgcctcccttgtctcattttatacaacccttcggggagctcactggggacaggctgcttttccctatttggagataaggaaaccaaggcaaagagagatagggcacaggcagtatgacaagatatgtaggagatttggggctagaaaccaggtcttgtacctcccagtaaaagcggtgcttttgcccttttgccagaagcaatagatcctttgatcctgagatggagataagcacccgtgttagaaaaggcctcactgagaagacagggctgggctggtttcctgctgggtgatttaggcttgtgatggaaagtcttcctccaatggggagtgaagacactcgctctgactggagaggctaaccctgctgctcactcatagggcagcgttgggtgggtgactttccctcactcagccttggtttccatcaaccctaaaatggggataattatcgtatctacctcaagattgttttgtcaggagggatccatcaagccttgtgcatgagttccacatggcacagcgtgcacagtaaacactcaatgttaatttttcaacgttccagtggagcttgctaaggaactctgttgggcacaggtgcccagaggattcatggagcagccagtcctggggaatgtgagtgggtagcgagctgcctgctgctggggcaggtgatgtgtcaaagcagcaactgctaggggtttgccttccttccctcatgtgcattctggcaggcaaagggggtttcttcctttcctccttgtcctcctggtgtatagtggggttctgggggatctggagaccaccctttttgttcccaggcagccacggtattgacagtgggccataccatgcagtttaaaatgtatctttgagttgaaattttggtggtttccttattcttttttctctcttcactgtccttccaaactcacttttcttgtgtcccgaccgcattttgtgaatcatccttactccctttaagttctcgctttggatttcaccaggtgggctagatggtgccatttcacttccactgtttgatgcggctggtaatgtttgactcacctgttacgtgttatttcactggtttcttgattttacatctttctcatcagtgacctgggcttgatgaaattagctttcattaagtcctattttttttttaattttgcatccttacctcttttctttctcttgaatgccatcattgtgtggtcttatgtacccttcatccactctgaagtccttgcttgactgattgctttctattagcagaaagaaaacaggtccatcctatgtatctgagaaacaacatcaacaccctctcgtatgtggtttgtattccctgacgcggcggacatttttgcagcagaaatttctccatcactgtccagattctggccctggtgggcaggtctccatgacacctttagtccctttgttcaacattcttaaaccatggacctttttgtttgtttgtggccgggggaggtggtgagaaacgttacttgaagcttgatcattctttcaatttcatttgtttctttatttttaatctgttagatgcaaattgaaatgcaatgctttttgaaaatcagcaatagtgtctgtagtatatgatgctgtcacaaaatctcaataaattgatcctgctgccattccttccaaatacccaaaaaaaaaaaaaaa

SEQ ID NO: 183 - DNA, 6909 bp, Homo sapiens
aacacgcaggcgcgtctcctcaaatcctgtccctacacccctcctctttctcttcatttcgttccccctcctcttgcagcacctcggcaggttcaaactcttctccgggagcgtggcggcgatcgcgaggtcacgtgatgagcatcctgctgcccaacatggcggagttcgacaccatctcggaactggaggaggaggaggaagaagaagcggcaacgtcgtcgtcgtcgccgtcgtcgtcgtcgtcggtatctgggcccgacgatgacgaggaggatgaggaggaagaggaggaagaggaggaggaggaagaagaggaggaggaggaagaggaggaggaagcgccgcccccgcctcgggtagtgagcgaggagcatctgcggagatatgctcccgaccctgtattagtgcggggtgccggccacatcactgtgtttggcttgagcaacaagtttgatactgaatttccctccgttctaacagggaaggtggccccagaagaatttaaaaccagcattggccgtgtgaatgcatgtttgaaaaaggctctcccggtcaatgtgaaatggctgctgtgtggttgtctctgctgctgttgcacactgggttgcagcctatggcctgttatttgtctcaacaaaagaaccagaagatcaattcagaagttaatagaatgggaaaataacagattatatcacaagcttgctttgcactggaagttgactaagaggaaatgtgaaactagcaatatgatggagtatgtaatactaatagaattcttaccaaaatatcccatattccgacctgactgaggagttttatccagtcacttctgtgttacctgtcatttcctacccttagtgccttgtagatttggaatgaagatggtctcctttgctgtgttcaacttattctttataatggtagaatattcttctcgctcttttgtgttggtttatgaagaaaatttgcacatcttttttgtctttcaatgaggcttgtgttttgcactctcaattttaaatacacacacatgcgtgtgtgcatatacatatatagatagttgccattaaagataaatcatcagtgttggtgtttaaaaaacaaaaacttgttctgagcatgctgccttataattttcatactcattgtttctaaactcgcatcatttttctaggctacttgatgctctgtaatcccttactggacaaacttaaataagcttttggtagcttttagaaatggttttactctgcttttaaaggacatgcttttaaaggacatgcaattaatggcactggttttgtcctgcactttgctttatcacttatgttagtggataaaatatttaaactcctaaagacttgtaaatattgcctctttgcataatgtaaaatgtggtatgccatggtttacataatgtaacattactcttattgtattgccaacaattttacatagattttaatatgaatgaagtttgcaagcatccctttgaatgtagaaactgctaacatgctgttttatggcaaggccataatgagtatgttaagaatttcaggtgtagggcaaggttgccctttgtaacaagtggactaaaattgaaattattatctcagatattctgtattgcacctgaaaccatgacctttatttttccatttcgtttaataatttccattttgttgtctactccttcccacaaaaaaactatttgacatctgacacatttcacagtctcactatcctgcatttattagccttttcttcctttgaaaatacacacaattatgacttttaaggagtattttgagatttcagacatcttcagaaggtatctagaccctcttgaaagccactaacacctttctgcagttctgatattctagtttgagaaagagagagaactatttgagaagctgtagctaaagagtatatagcagctgattcataattgaaaaaaaattctcaattctgtttttgatgatcctttataaaacattaatgaggaaagacaagtgtttagacaaaagtattttagtttataaattcagcacatatgtaacatttatttggtccatatttctctatttttcttcacaattaaaatgattgctagcaccacacaactagaatttgaaaattcagtataatgaaagctttatatcacattaattcaactgcaaatgtatgcctgtttgtaggcattatttgtaattcatagtgctaaaaataaaagtgtctagggctcagtaatattttgtcatcttactcttactgcttttagtaaaccttttaggcaagattcatctcagtgaagtgaacaatcatttcttcatagaaggtcaagcctttttaagccactcttaaaatttatgcctaatttgaaatccacagtccttgaccagtttaaaaaagagaggaaaaagaagacactattttatatgtgattataattgtttgcacaaacacttttccaccttcctctgtgccccattacctctgtgccactcagtcaccccaaatctctaacctttagtaatgtgtatgcctgcaaatattatgtgtttgcctgctgcaaaattgaaggtgtatttttatagacaaggtagaagcctctgaaaatgtataccaaatgtcttgttttgtagctaaggtcgggaaaaattgtatctgaggtttatgttccagctaatgttatcaaatttatgcttcaaactgtgatattttaataccaaaatcgattttcagcataatacaaaatatctcattttcactgatagaaaattgcttttaagtgttgatccttagaaatcttatttttttctataaccttagaatttgatcatatgatggtcataggaactttttctgccatgtataaatcacacttggttttgctcaaagaacagcatgaagtggtgaattgtttccatgaaacaattattgagaatgggaatacagtatatctggaaatgacacagtataatacaagttacagtagcatttgtcacaaaaaccacttgtcagcatgtgtaaacttaattttaaagcctattctaatcactcgagtttattattttattgttcgctatgctggttgactcatcttagtttcttcaactacccaaaaaaataccaatttttttcctctcttgtatgactactttttcaaactgttttcctttgcagggggctgattagcaattgagtattttgtaatgtttgggcggggttgctttgttttcagtgaaattggttgcagtgaatgctaaaatgacacagcacactggtgattaattcctcccccatggagccttttttctgttatgcttaggatagaacatacttgtaattttccattaggttagtaacatacttttgtgaaagttgtttttagactgaagaaagtaattttgaatttctttgttacataatattcctttatgaaacttgtgatagtttccagagcaaaacatgtatttgccaaagtatataaatctcacaaggctttaagattacaagctaaaattgttttttaaaattaatgttccaatgtttctcatttggcccaagattctggcttcataaatttgtccaactggctatttttaagcttgtcctaaaagccaataacatgtttattcctaataactaatatgggcaagtgttatttacagatttattaactccatcccagatatgtctccactctttgttccctcctaatgctaatttaggaaagagaccactgtagtaaaactttagaagaagatggagaagtgccttgtctttttagaacaaagataacacattacgtgtaaggaagcataataaatgaattggtagatgattagattagaaatcatccttttcaactaggtctaagaatactttactagtgtattatcttttatttattatgtaaagcttctttccttccttttccccaatcatgatatattagtgacaaaatattacagaaccggactatcagtcacttaaaaaaacagtataattctaatgctagtaaacatgtaatttaatttagttctggaaggacagttgtctttgattaaagccccaccaaaacccatttaagtatttaatgtacatactattcatattattatggcctgtaaacactaatatctgagcaatcaaactgttttatctaccatttttgatgaaatttgaataaagtttaaaaacgtgtaagcctttgaacaaatgtatgaaagctttaaaagatcattagcacttttattttgtttacaaataagctgccatttaaaaaaataaaacctcactacttgaacataaagctcccaaacaatattgtattaaaatgtactatattgacctaggaggatatagaaattatattcacctgattaactggagcagtttcacatagtagaaatactttttgctaatttgattataagtgctcaaatttattgaaattagattctcatgcctataaaagtatactttaaaaatattttgcaacaactgtcaaattatttgggttcctttaaatagcaaacaattgggaaattttccataaaaatgaataggttttattaatacctgttcatgtagtatgtggactaaaacaattgatatatatctgtatgtaaaaatgaatgatcttatcttgccccaaatttttcttacctgattctgagccagcctttttgttttgatggcaccctgtgagtatgttccattttctgtgaactttgtcaaattcatactatatgaggaaatgatctaatattgtgggctccaggcaggtcatcttaattgcatgtctgtctcttctgtaaaatgatgaggtggaacctagagctggacaaaaaattagagatcacttaacattctgtgattcaaggaattcttaggacatttttactctatagaatctcagaatgattattctcagatctactgtccttggtggaaactctcacagtgccttgcatgcagtaaaagtttgatttgccgactggctgacgtgttaattatcacacagactccaagaacctgatgcttgctagaccttagttccttggtgatgctaagagtaaatgtagttttcctaggaactgagcactgaggtctgtgtcctttgcctgtgtagaatctgtctatgcagttggtattcaggcaagaattttagctgtaacaacaatggaaatattggaggacccactttggcatttatgtaaagatttcatatcctatccaacatttactttagtgtctaatcaaattccataccctcaaaaagatctgttggaacaaattgataaaattaggtggaaaggaaagtggtatgggactcaaatacaagtcacttctggtttaattattggctctgctgcttaattcctctgtacctcacgtcctcattgtcgaagtggggacaataatctggacctacctcacaggggaattgaggatattttcatatattagtgtgctttgaagttgactgaaagatatactggatatcataattatataatttctaaatagatttctttaaatccatgctatgttttctttttcagtcaggtcctacagaatgactattgcacttggtctattgttttaatagtaaattttgttattaatctcctatgtgttaaacgtgggtaattgtattatgttaatacatacttagggaggaaaagcaggtggatgtaaatcagtgattcccaacttcagcagatgatagcagtggagggtatccttgagctttttgtaatatttcaaaaagtatattagaaattatacatttacccataatattcctgcttcacaagtcaattaagacattgaatttccattcattttgcctatattctctcaaaagctgtgaatggcagtatgtttttgattaataataaaataagaaatcctattatgtgcaacttattaaatacttgggaacatgggaaaagaataatgaagggattcttatggtgaaaatgttgggaaccacttttataaaggaactaagattatttgaccccctccacagattgcttacctagtctctaaataatgaaatgtgtgtgtttgtgtgttttggctatattaggctatataacttcaggttagaatttgccttcagttttttttctgttttagaatatcactggcctaatttatttaggtgtgtacatgttgctcatacatacacacacatataggattacaaatgtggaaaatgttataatgtcatattctagcattggactaaatatcaatttctgactcttaaagtagttctgtgtataaattcaacatgatgaatcaaggcaataatttctcaaatgttcttttatttctttgtttttatctcgactttttattttccattttttctagtacgcaaatagtgtaaaattgttttaatgcctggactttgaaacaagtaacaagtgtttgaaagtatataatctacgagcgaatttgccctccttggactaaccacatacaaatatgaatctggctgcaagaacaggatatccaggtaactagagagtgggcattgataaaaatatctggtggagaagcctaggatttcaactttttgtcagaggattcctgttgggacagctttaccagaaaagaataatagcggatatgttcatccaaactaagaactttcatgcatcttgcattgttacatagcctgtggaatgaattcattttttctcccttgagtccaggaatgacttccctggaaaaactcaatctatatacagctgtgccaaaatgaaggatacctgcctctccgaaactttcactgctgcttctgtcattgttcacttgtcagataaaattttattatctcaggatgcaaatttaaaataaagtgtaaatctatgttaa

SEQ ID NO: 184 - DNA, 7629 bp, Homo sapiens
gcggccgcggaggcggaggcagccgcggaggcggaggcggccggcggggggtggcgaggggcgccgggcccccgcggacctgtcgtcctcggcccgtcctccggccccggccccgcgcggctgaggaggcgcggccaggaccatgtcggcgggcggccgtgacgaggagcggcggaagctggccgacatcatccaccactggaacgccaaccggctggacctgttcgagatcagccagccgaccgaggatttggagttccatggagtgatgagattttattttcaagataaagctgctggaaactttgcaacaaaatgtattcgggtctctagtactgccaccactcaagatgtaatcgaaacgctcgcggagaaatttcgacctgatatgcgaatgctgtcctctcccaagtattcactctatgaagtgcatgtcagcggagaaagaagattggatatagatgagaaacctctagttgtacaactgaattggaacaaagatgatcgggaaggcagatttgttcttaagaatgagaatgacgccattcctcctaagaaggctcaaagtaatggacctgaaaagcaggaaaaagaaggggttatccagaacttcaagagaactctctcaaagaaagaaaagaaggaaaaaaagaagagagaaaaagaggcattgcgacaggcatctgataaagatgatagacctttccaaggggaggatgttgaaaattctcgactggctgctgaggtttacaaagacatgccggaaaccagctttactcgaaccatttctaatcctgaggtggttatgaaacgacggaggcagcaaaaattggaaaagagaatgcaggaatttcggagctcagatgggcggcctgattcaggtggaacattgagaatttatgcagatagtttaaaaccaaatattccctacaagacaatcctgctgtctactacagatcctgcagactttgctgtggctgaagctttagagaagtatggtctggaaaaagaaaaccctaaggattactgcatcgcccgggttatgcttcctcctggagcccagcattctgatgaaaagggtgctaaagaaattattcttgatgatgatgagtgtcctttacaaatcttcagggaatggccaagtgacaaagggattttagtctttcagttgaagaggaggccaccagaccacatcccaaagaaaaccaagaaacacttggaaggcaagacacccaagggaaaggagagagctgacgggtctggctatggctccacccttcctccggagaagctgccctatttagtagagttaagcccagggagaaggaatcactttgcctactacaactatcacacttacgaagatggttctgactctagagataagccaaagctttaccgccttcagttaagtgttactgaagttgggacagaaaagttggatgacaactctatccagttgtttggcccaggaattcagccccatcactgtgaccttaccaacatggatggagtggtcactgtgacgcccagaagtatggacgcagaaacctacgtggaaggccagcgcatctcagaaaccaccatgctgcagagtggcatgaaagtgcagtttggggcgtcccatgtatttaagtttgtggaccccagtcaggatcatgctcttgcaaaaagatctgtggatggaggcctgatggttaagggcccaagacataaacctggaattgttcaggagacaacttttgatttgggaggagatattcatagtgggacagcattaccgacaagcaagagcaccactaggctggacagcgacagagtgtcgtctgcctctagcacagccgagcggggaatggtgaagccgatgatcagagtagaacagcagccagattatcgcaggcaagaaagcagaacacaggatgcttctgggcctgagctgatactacctgcaagcattgaattcagggaaagttctgaagattcatttttgtctgccattataaattatactaatagctctacagtccactttaagttgtcccctacatatgtattatatatggcatgccggtatgtattgtccaaccagtacagacctgacatcagccctacagagcgcacacataaagtcattgcagtcgtcaacaagatggtgagcatgatggagggtgtcatccagaaacagaagaatattgcaggggcacttgccttctggatggcaaatgcatctgaacttctcaacttcattaagcaagaccgagaccttagtcggatcacactggatgctcaagatgttttagcacatttggttcaaatggcatttaaatacttggttcactgtcttcaatcagaacttaataattacatgccagcctttctagatgaccctgaagagaacagtctgcaacgaccaaaaatagatgatgtgctgcacacgctcacaggagccatgtccttgctacgacgctgcagagtcaatgccgccctgaccatccagctcttctctcagctcttccacttcatcaatatgtggctgttcaatagattggtgaccgacccagattcggggctgtgctcccattactggggtgcgattatccgtcagcagttgggccatattgaagcctgggctgagaagcaggggctggaactggctgcggactgtcatctgagcaggatcgtgcaggcaacgactttgcttaccatggataagtatgcacctgatgacattccaaatataaacagcacctgctttaagttaaattcattacaacttcaagccttattacagaactatcactgtgcacctgatgagccttttatcccaacggatcttatagaaaatgtagtgactgtggctgaaaacactgccgatgagctggcccgcagtgatggaagggaagtgcagttggaggaggatcctgatctgcagctgccgtttcttttgccagaagatggttattcttgtgatgttgtcagaaacattccaaatggtttacaagaatttttagaccctctgtgccagagaggattttgcaggttaattcctcacacacgttcaccaggtacttggacaatatattttgaaggtgcagattatgaaagtcaccttctgcgtgagaacacagagctggctcagcctctgaggaaagaacctgaaataatcactgtgaccctaaaaaagcagaatggaatgggccttagcattgttgcagcaaagggtgctggtcaagataaactaggaatctatgtgaagtcggttgtgaaaggaggtgctgcagatgtggatggacgtctagctgcaggtgatcagctcctcagtgtggatggacgaagtctggttggactctctcaggaaagggcggcagaactcatgacaagaacaagctctgtggtgacactggaagtagcaaagcagggtgccatctaccacggtctggccacccttctcaatcagccatcccccatgatgcagagaatttcagatcgtcgtggctcaggtaaaccccgaccaaagagtgaaggctttgagctctataataattcaactcaaaatgggtctcctgagagtcctcagctgccttgggcagaatatagtgaaccaaagaaattgcctggtgatgacagactgatgaaaaatagagctgatcaccgttccagccccaacgtagcaaatcagcctcctagtcctggagggaaaagtgcatatgcctctggaacaacagcgaagataacatctgtctctactggaaacctctgcactgaggagcagacgcctccgcctagacctgaagcctaccccatccccactcagacgtacaccagagagtattttaccttcccagcttccaaatcccaggatcggatggctcctcctcagaaccagtggccaaattatgaggaaaagccacatatgcacacagatagtaatcattccagtattgcaattcagcgtgttacacgttcccaagaagaacttcgagaagataaagcttaccaacttgagcggcatcgaatagaggcagctatggaccgaaagtctgatagtgatatgtggataaatcagagctcctcactggactccagtacctctagccaggagcatctgaaccattcctctaagtcggtcacccctgcttccacactgaccaaaagtggccctggccgttggaaaacaccagcagccataccggccacccctgtggccgtctcccagccaatccgaacagacctgcctccgccacccccgccacctccagtccactatgccggtgatttcgatggaatgtccatggatttgcctctcccaccacccccttccgccaaccagatagggctgccgtctgcgcaggtggctgctgctgaacggagaaagagagaagaacatcagcgttggtatgagaaggagaaggcccgcctggaggaggagcgggagaggaagcggagagagcaggagaggaagttgggccagatgcgcactcagtccttaaaccctgctccgttttctcccctgactgcacagcagatgaagcccgaaaagccttccacactccagcggccacaggaaacagtcattcgggagctgcagcctcagcagcagccccgcacgatcgagcgcagagacttgcagtacattacagtcagcaaagaggagctttcctcgggggacagtctgtcccccgacccgtggaagcgggacgccaaggagaagctggagaagcagcagcagatgcacatcgtggacatgctgagcaaggagatccaggagctccagagcaaaccggaccgcagcgccgaggagagcgaccggctgcgcaagctcatgctggagtggcagttccagaagagactccaggagtcgaagcagaaggacgaagatgacgaggaggaggaggacgatgatgtggacaccatgctgatcatgcagcgcctggaggctgaacgaagagcgagggacgaggagcggaggcggcagcagcagttagaagagatgcgcaagcgggaagcggaagaccgagcgaggcaagaggaagagcgccggcggcaggaggaggagcgaacaaaacgagacgctgaagaaaaggttatggtcctttaagggcagctagaattttaccaagttagcctgaacgtaatcgattggctggggcagagcgggctggaagttctgtgtttcttaagaagcacgaggcagagcagggcctggctcccccagctttgtgattggacctgcaactttaccccatctggcccacctacctctcttctggactgtctccagatccccttatctgccaagttttgtctccttcaaacttctgaactcttgggcgtgtgtagcagtgagcctctttgcaaagggttcgtttcctcgggcactcatctttactgaacatggcccagcttgtcattgtgaaggtgacattggttcagtgattgcttaaatggcatgtggaccgtgggaagcagtaggagcgtagtaagacagttggctgccattcaacatttcaaatagatggtttactcaaatcactcacttctggttgatggtaaagagagcagatggcttagaaaacatgatacaggaaaatttagtatgtaatccagtaaatatcctaagttatttattttcatgtgtgtgtgtgtgtttaaatcaagtaacccttttaattgaattttaaaatgacagcgaattttgacattctgagaaatggggattttgagatgtttctctccatatctccctttgtcctgtgtgtgtggccgacgccctctggatgaagaggctgtagccgttgagctccctgtgggggcctgtttcatcccgaggggactgcgtgttgctctgtgtggtttgagagaagctgctcttctctgttacttcccttctatgaaggtagaagctttcagtgttacaacttctgatggcggaaaatttagtttttattaataattccttcttggatagtctagtgaactatattaatagaacagtgtactgttcacagaaaagaacttgtagggagttttttgtagtgatatgctctattaggatacagaacaatctaagagtaagcttgatagacatgatgtgacttcacttaaatggagtagagtgaataatgtaaggacactcacctctgttgaaattggtgatttctgcattttgtagacctttgccctctaagtttatcatcatattatctgttgaatctgaacagcatttgaagtcctctcaaagagtttgagctttcaggattaggttcccctgtgagtctttcacttgtgtaatggtaagtcaacattgatgatctttctaaggaaatcagatttacaaaatgctgagccgcttgatgtctaagtgttggtggtttttgctgttgctttgctgttccatgaaagcgctccctggctgcttggagggctgtgcttttccaggtcagtgccagcttggctgtcccaggccgtgcacagtgcccattgctatagctgggcccagtcctggccacgccggagcctcggcgggggcagctgggttgtcacggcagcacagtgcacatgcagagaggaccaggccatgtttttcctgtgctgagaaactcttgggttatttaatttttccaatgtgttttcataactcatgattatttgaaatacacttgtgttagtaactgcttctataattaagtggtcactgtaaaaaggcgaataacctatttttatatcagaatgtccaaaactcatgggtttgctttgttatagaaaaatgtgccattcatttgttgggtagaataaagttgtcttgtaattgtatctgctcttggtataactaaaagaggatattttgatttcttcctaaaatgttaccaagcaactgttcttcatgttaatactaagattcttgatagttccatttaaaagccacaagaagtcattctggtttattcctcactccaagggaacacttactttgtgtagacaagaagatgagagtctttccttcaggatttctaaacacagagcaagaagattcaatgaaaaattgggctcagggcagtaattggggctggcatttattcttaagagttttctccctcaaaaggtgaaggagtgacattgcgtattcactctgtgtgtgtgtgtgtgtgtgtgtgtgtgtgtgtgtgtgtgtgtgtgtagctctagagggagtagggagaaaatacaggatgaaattgaaaacagggactaacaacttttcactgaatgccagcaagctctctaaaattagttttctttggttgaacaaatttacaattcattgtacttcatttcacagcattaaacatttactcgaggcagtttattctgtttgctctttcatcccccttcttatttacttttttcttgtgctctaaaacttttgtcaatctttaacaaaactgtgctgttaccttttttaatgttaaaagaattttaacactgtcaactgtagtttgtgcagatgtatgtcagaaaaaaatgtacagtatgtgtcaaaatatatttgaatatcttgttgctgttgctgttagttcctggctctctaattttctgtctgttagggagtttcttaagatttgaaatacaagttaagaactatggaaagca

SEQ ID NO: 185 - DNA, 2279 bp, Homo sapiens
agcgcgcggcgtgggggcggggcctgcggttcccgcgggggcggtggcgcgcggtcagctgacccggcgggccttgacccagaagctgggccctggcggcggatctggacgtggtgagccggaccgggggcaggtggcaaacttcacggctgggggtcggggctcctgggcttccctgccacatccttccagccctctcctccggccgctggactgtcccggctcctgcgccctccttgtggcgcgatatcgtgggacgaggctccgggccgggactgggtggccctcgggaatccgcagccagtggccccccacctcaaaggcgaccagcgcggcctctcgagctggcctggccaggagttgccctgccccggccgaccggccccttggcatctgatggcttcgtttttcccgggccggccgggcgaggggccctcgcggcgctggccccagcagctgtcctatcattatccctccaaacaggcggcccgcgccgggctgagtcaccaggagggagctgtggccgaggacgccgaggcctggagtgggtggtagccccgagctgggacgctcctccctccacaatctccccaggtctgcagggaccgagggcctacactgcctcctcccacgccgtgcttaggaacccttgctggcctcagaacaccagcgccctccctccggtgcagccctgcctggccgggggcccctcctccacagccatggtctggaagaaactgggctcccgcaacttctccagctgccccagtggctccatccagtggatatgggatgtgttgggtgaatgtgcccaggacggctgggacgaggccagcgtgggcctgggcttgatctccattctctgctttgctgcatctaccttcccccagttcatcaaagcctacaagacgggcaacatggaccaggcgctgtccctgtggttcctcctgggctggattggcggagactcctgcaacctcatcggctccttccttgctgaccagctgcccctgcagacctacacggctgtgtattatgtcttggcagacctggtgatgctgacgctgtacttttactacaagttcaggacgcgcccctctctgttgtctgcccccatcaactccgtgctgttgttcctcatggggatggcgtgcgccacaccgctgctgagtgctgctgggcccgtggctgcccctagggaagccttccgggggcgggcgctcctgtccgtggagtcgggcagcaagcccttcacccggcaggaagtcattggcttcgtcatcggctccatctccagcgtgttgtacctgctttcccggctgcctcagatccgcaccaacttcctccggaagtccacccaggggatctcctactctctgttcgcgctggtgatgctggggaacacgctgtatgggctgagcgtgctgctcaaaaaccccgaggagggccagagcgagggcagctacctgctgcaccacctgccctggcttgtgggcagcctgggcgtgctgctgctcgacaccatcatctccatccagttcctggtgtacaggcgcagcaccgccgcctcggagcttgagcccctcctccccagctgaccagaaccaggctgagcgcaggaggacaggcaccaccggatgccacaccaggcaggaggaggtgtggacagtgatggtacggcggccctgcatcagcctgcgggtggcctctggatcctccgtggaccgaaccgtccccccaggaacacaccttcaggtagaccccgaagcctcaaggccggggctggagcggagaccccagggcctctcaggagacagtgaggctgcccctcctaccacctacctcattctgcctactcaccccaggggccacagccacagcctgctggactcaggactgtcctgtcaactccagacaactgaataaacaggccgggtacagtggctcgcacctgtaatcctagcactttgggaggccgaagcgggtggaccacttgacgtccgtagttcgagaccagcctggccaacatggtgaaaccccatctctactaaaaatacaaaaattagccaggtgtggtggcacacatctgtagtcccagctacttgggaggctgaggcaggagaactgtttgaacctgggagacagaggttgcggtgaaccgagatcgtgccactgtactccagcctgggtgacagagtgagactccgtctcaaaaaaataaaaaagataaccgaggaaacggtacctccccatgaaaaaaaaaaaaaaaaaaaaaaaaa

SEQ ID NO: 186 - DNA, 6628 bp, Homo sapiens
ctcctcggtgcaacctatataaggctcacagtctgcgctcctggtacacgcgcttcaacttcggttggtgtgtgtcgaagaaacctgactgcgccctgaggagaacagcggagaaggtccaccgagcctggcgaaaggtccgctgagcgggctgtcgtccggagccactccgggctgcggagcacccagtggagaccgcgcctggctcaggtgtgggaccccatccttcctgtcttcgcagaggagtcctcgcgtgaaataagcgggttttgaaaacaaaaaaaagaaggagtggaagagggggccaggatccaggcctccatccccacagaagtgaagctacagctgggaggtctcctcccaccccaaccgtcaccctgggtcccgactgcccacctcctcctcctccccctccccccaacaacaacaacaacaacaactccaagcacaccggccataagagtgcgtgtgtccccaacatgaccgaacgaagaagggacgagctctctgaagagatcaacaacttaagagagaaggtcatgaagcagtcggaggagaacaacaacctgcagagccaggtgcagaagctcacagaggagaacaccacccttcgagagcaagtggaacccacccctgaggatgaggatgatgacatcgagctccgcggtgctgcagcagctgctgccccaccccctccaatagaggaagagtgcccagaagacctcccagagaagttcgatggcaacccagacatgctggctcctttcatggcccagtgccagatcttcatggaaaagagcaccagggatttctcagttgatcgtgtccgtgtctgcttcgtgacaagcatgatgaccggccgtgctgcccgttgggcctcagcaaagctggagcgctcccactacctgatgcacaactacccagctttcatgatggaaatgaagcatgtctttgaagaccctcagaggcgagaggttgccaaacgcaagatcagacgcctgcgccaaggcatggggtctgtcatcgactactccaatgctttccagatgattgcccaggacctggattggaacgagcctgcgctgattgaccagtaccacgagggcctcagcgaccacattcaggaggagctctcccacctcgaggtcgccaagtcgctgtctgctctgattgggcagtgcattcacattgagagaaggctggccagggctgctgcagctcgcaagccacgctcgccaccccgggcgctggtgttgcctcacattgcaagccaccaccaggtagatccaaccgagccggtgggaggtgcccgcatgcgcctgacgcaggaagaaaaagaaagacgcagaaagctgaacctgtgcctctactgtggaacaggaggtcactacgctgacaattgtcctgccaaggcctcaaagtcttcgccggcgggaaactccccggccccgctgtagagggaccttcagcgaccgggccagaaataataaggtccccacaagatgatgcctcatctccacacttgcaagtgatgctccagattcatcttccgggcagacacaccctgttcgtccgagccatgatcgattctggtgcttctggcaacttcattgatcacgaatatgttgctcaaaatggaattcctctaagaatcaaggactggccaatacttgtggaagcaattgatgggcgccccatagcatcgggcccagttgtccacgaaactcacgacctgatagttgacctgggagatcaccgagaggtgctgtcatttgatgtgactcagtctccattcttccctgtcgtcctaggggttcgctggctgagcacacatgatcccaatatcacatggagcactcgatctatcgtctttgattctgaatactgccgctaccactgccggatgtattctccaataccaccatcgctcccaccaccagcaccacaaccgccactctattatccagtagatggatacagagtttaccaaccagtgaggtattactatgtccagaatgtgtacactccagtagatgagcacgtctacccagatcaccgcctggttgaccctcacatagaaatgatacctggagcacacagtattcccagtggacatgtgtattcactgtccgaacctgaaatggcagctcttcgagattttgtggcaagaaatgtaaaagatgggctaattactccaacgattgcacctaatggagcccaagttctccaggtgaagagggggtggaaactgcaagtttcttatgattgccgagctccaaacaattttactatccagaatcagtatcctcgcctatctattccaaatttagaagaccaagcacacctggcaacgtacactgaattcgtacctcaaatacctggataccaaacataccccacatatgccgcgtacccgacctacccagtaggattcgcctggtacccagtgggacgagacggacaaggaagatcactatatgtacctgtgatgatcacttggaatccacactggtaccgccagcctccggtaccacagtacccgccgccacagccgccgcctccaccaccaccaccgccgccgcctccatcttacagtaccctgtaaatacctgtcatgtccttcaggatctctgccctcaaaatttattcctgttcagcttctcaatcagtgactgtgtgctaaattttaggctactgtatcttcaggccacctgaggcacatcctctctgaaacggctatggaaggttagggccactctggactggcacacatcctaaagcaccaaaagaccttcaacattttctgagagcaacagagtatttgccaataaatgatctctcatttttccaccttgactgccaatctaactaaaataattaataagtttactttccagccagtcctggaagtctgggttttacctgccaaaacctccatcaccatctaaattataggctgccaaatttgctgtttaacatttacagagaagctgatacaaacgcaggaaatgctgatttctttatggagggggagacgaggaggaggaggacatgacttttcttgcggtttcggtaccctctttttaaatcactggaggactgaggccttattaaggaagccaaaattatcggtgcagtgtggaaaggcttccgtgatcctctcgctgcacccttagaaacttcaccgtcttcaaactccatttccatggttctgttaattctcaaggagcagcaactcgactggttctcccaggagcaggaaaaacccttgtgacatgaaacatctcaggcctgaaaagaaagtgctctctcagatggactcttgcatgttaagactatgtcttcacatcatggtgcaaatcacatgtacccaatgactccggctttgacacaacaccttaccatcatcatgccatgatggcttccacaaagcattaaacctggtaaccagagattactggtggctccagcgttgttagatgttcatgaaatgtgaccacctctcaatcacctttgagggctaaagagtagcacatcaaaaggactccaaaatcccatacccaactcttaagagatttgtcctggtacttcagaaagaattttcatgagtgttcttaattggctggaaaagcaccagctgacgttttggaagaatctatccatgtgtctgcctccatatgcatctgggcatttcatcttcagtcccctcattagactgtagcattaggatgtgtggagagaggagaaatgatttagcacccagattcacactcctatgcctggaagggggacatctttgaagaagaggaattagggctgtggacactgtcttgaggatgtggacttccttagtgagctccacattacttgatggtaaccacttcaaaaggatcagaatccacgtaatgaaaaaggtccctctagaggatggagctgatgtgaagctgccaatggatgaaaagcctcagaaagcaactcaaaggactcaaagcaacggacaacacaagagttgtcttcagcccagtgacacctctgatgtcccctggaagctttgtgctaacctgggactgcctgacttcctttagcctggtcccttgctactaccttgaactgttttatctaacctctctttttctgtttaattctttgctactgccattgaccctgctgcaggatttgtgtcattttcctgcctggttgctgagactccattttgctgccacacacagagatgtaagaggcaggctttaattgccaaagcacagtttgagcagtagaaaacaacatggtgtatatctcaaattgcctgacatgaagaggagtctaacggtgaagtttcacttttcatcagcatcatctttcacatgttcattatcatctgctcttattcttgcatgtttaaacacttaaaatttttagtataatttttagtgtgttttgaagtggtgactaggctttcaaaaacttccattgaattacaaagcactatccagttcttattgttaaactaagtaaaaatgataagtaacatagtgtaaaatattcctttactgtgaacttcttacaatgctgtgaatgagaggctcctcagaactggagcatttgtataataattcatcctgttcatcttcaattttaacatcatatataatttcaattctatcaattgggcctttaaaaatcatataaaaggatataaaatttgaaaagagaaacctaattggctatttaatccaaaacaactttttttttccttcaatggaatcagaaagcttgtcaatcactcatgtgttttagagtaattacttttaaaatggtgcatttgtgcttctgaactattttgaagagtcacttctgtttacctcaagtatcaattcatcctccatacatttgaattcaagttgtttttttgtcaaatttacagttgtcaattgatcttcaagctgcagggtgcctagaaatgggccgttgtctgtagccctggcatgtgcacacggacatttgccaccactgcaagcaaaagtctggagaagttcaccaacgacaagaacgattagggaaaatatgctgctgtgggttaacaactcagaaagtccctgatccacatttggctgtttactaaagcttgtgattaactttttggcagtgtgtactatgctctattgctatatatgctatctataaatgtagatgttaaggataagtaattctaaatttattattctatagttttgaagtttggttaagtttcctttcactcaattgatttattttgttgttaatcaaatttatgttaattggatcctttaaattttttttggcattttccaacaaaaatggctttattcataagaaaggaaaaaaatcaatggaatttgatatctaaagaagttagaaagggagcaaaataaaaaacataaaggagatagatgaattagtaagcaaatcagtagtcgagtttttcaaactggcaaaattaattaattgacttttagcccaaatttacattgttaattaaatcaagaaggaagaagatctaagagctcccattgataggcaagcctagagagaactagctaaatttatcatgctaggatattgaaacacagaaagtttacatacatttatgaagggtcaatttagtttggacagtgaggtatttgtcttagtggaaaaaaggagaattagtctgatcaaatcgtgaagtaatacagtgaacttgcaggtgcacaaaataagagggccacatctatatggtgcagtctggaattctgtttaagtttgtaggtacctcttggacttctgaattgatccagttgtcatccaccacagacatctcacatcagatacagacagttccaagattgacaacagagaacaacctgctggaaagacctgggcagaaatggagagccctgcgggaaccatgctacattttcatctaaagagagaatgcacatctgatgagactgaaagttctttgttgttttagattgtagaatggtattgaattggtctgtggaaaattgcattgcttttatttctttgtgtaatcaagtttaagtaataggggatatataatcataagcattttagggtgggagggactattaagtaattttaagtgggtggggttatttagaatgttagaataatattatgtattagatatcgctataagtggacatgcgtacttacttgtaaccctttaccctataattgctatccttaaagatttcaaataaactcggagggaactgcagggagaccaacttatttagagcgaattggacatggataaaaaccccagtgggagaaagttcaaaggtgattagattaataatttaatagaggatgagtgacctctgataaattactgctagaatgaacttgtcaatgatggatggtaaattttcatggaagttataaaagtgataaataaaaacccttgcttttacccctgtcagtagccctcctcctaccactgaaccccattgcccctacccctccttctaactttattgctgtattctcttcactctatatttctctctatttgctaatattgcattgctgttacaataaaaattcaataaagatttagtggttaagtgcaaaaaaaaaaaaa

SEQ ID NO: 187 - DNA, 5187 bp, Homo sapiens
gggcgagcggtgtcagcggcggagccggatgcgggcggcatcgcggcggtcgcggccttggggatgggcggagccccagccgctagtgctggtggccgccgctgctgccccagctggagcccgagccgccgcctctgcgtccgcgcgtcgctgcttcccagggcggcggtatgctggggaaaggagtagtcggcggtggcggcggcaccaaggcccccaagccctccttcgtgtcgtacgtacgccctgaggaaattcacacaaacgaaaaggaagtaacagagaaggaagtaactcttcacttgttgccaggtgaacagctgctttgtgaagccagcacagtactgaagtatgtccaggaagattcctgtcagcatggggtctatgggaggcttgtctgcacagacttcaagattgccttcttgggtgatgatgaatctgcattggataatgatgaaactcaatttaagaataaggttataggagaaaatgacattacactccactgtgttgatcagatttatggagtgtttgatgagaaaaagaaaactctctttggacaactgaagaaataccctgagaagctcatcatccactgcaaagaccttcgagtgttccagttttgtctgaggtacacaaaggaagaggaagtcaaaaggattgtcagtggcataattcatcatacccaggctcctaaactgcttaaacgattatttctgttttcctatgcgactgctgcacaaaacaatacagtcactgatcccaagaaccataccgtaatgtttgacacacttaaggactggtgttgggaactggaacggaccaaaggcaacatgaagtacaaagcagtgagtgtcaacgaaggctataaagtctgtgagagattgccagcatactttgttgtccccacccctcttcctgaagagaatgtgcagcgctttcagggtcatggcataccaatatggtgttggtcctgccacaatggaagtgcccttttgaaaatgtcagcactgcccaaagaacaggatgacggcattttacaaatccaaaagagcttcttagatggaatttacaagaccatccacaggccaccctatgaaattgttaaaacggaagacctgtcaagcaacttcctgtccctgcaggaaatccagactgcatactctaaatttaaacagctatttctgatagataacagtactgaattttgggacacagatataaaatggttttctctgttggaaagtagcagctggcttgacataatcagacgttgcctgaaaaaagcaatagagattacagaatgtatggaagcacaaaacatgaatgttcttcttttagaggagaatgcatccgacctctgctgtctcatttcctctctggtgcaactgatgatggacccccactgcagaaccagaattggtttccagagcctcatccaaaaggagtgggtcatgggtggccactgtttcttggatcgctgcaaccatctccgccagaacgacaaagaggaggttcctgtgttcctgcttttcctagattgtgtctggcagctggtgcaccagcatcccccggcatttgaattcacagagacttacctgactgttttgtcagatagcctgtatatacctatttttagcaccttcttcttcaattcacctcatcaaaaagatactaacatgggtagagaaggccaggatacacaaagcaagcctttgaatctgctcaccgtgtgggattggtcggtgcagtttgaacccaaagcccagacattgctcaaaaaccctctttatgtggaaaagccaaaactggacaaaggccaacggaaaggaatgcgcttcaaacatcaacgacaactttctttgccacttacacaatctaagtcatctcccaaaagaggatttttcagggaagaaacagatcatttaattaaaaaccttctgggcaagagaattagcaaacttattaattcttctgatgagctccaagacaactttcgagagttctatgacagctggcatagcaagtccactgactaccatggtttgttgttaccgcatatcgaggggcccgaaatcaaagtctgggcccagcgctacctacgttggattccagaagcccaaatcctaggtggtggccaagtggccactctgagcaaactcttggaaatgatggaggaagtccagagtttacaagagaagatcgacgagagacaccacagccagcaggccccccaggctgaggccccctgcctgctgaggaactctgcccgcctctcgtctttgtttcctttcgctctgctccagcgacattcctctaagcccgtcttacccaccagtggctggaaagctttgggagatgaagacgatttggccaaacgagaagatgagttcgtggacctaggggatgtgtgacctgtttgttgagtgattgtgaaagaggaatgtgggagattgggacagctgatccctggatttgtgtcacgctacagctcatgctggctgggtccttagcccggcactccgttagaataaacctgggccttcgggaaaagaggtggctctcattatttttcatgattctaaaagactatgcaattaaaaccgcatctgtagtattactaattggaaggaattattacttgacccgtaatagggttgtggccgttttctgatgcctaagtattatacagagcccacaatggccagtttactaccagaaagggcttcagtaagatattcttggacttgatactttcttcagatcctctttgtgccaagataatttatccagtcattgggaatagtaagtttctgtgtaacccatctcaattatagaagcaagttcagctttatgtatttgtatggggagttgaagattcagatagaggtattaagatgtgtggcatttacttaaaccatcacatttttttctttctacgcccccttgcctgtaaaacacctgggaagttccactggtgtcatccatcctgatgcttcagaccaccctcccttcttcacagaccgtgtcactttgcctgtgggtgggggctagccagccaccaccctcttttctgtgctgccagccccaggtcttcctccgcctgctccacaccactcgccgctgtccctctgcactccctgccttggtgcgtgtagtcccagtgtctcactgccaaacctcttggttacgctgcggggatctgtttctttgcctgagatccttcctgaggagcgtccattcctctggagtctctccttgtttggaacaaatcgcttcgcctttttctacttgcctgctgaagctttggagcacttgtgattgcagttttctgccgcaacccctgagccgagttcctcacattcttttacctttatggactgatgggattgggtcacttttgaatgtggctttcataggaaagcagcttaaacataaatatcagaagtgatgattatcatatgatacctcagtgattttaaaagccatagaagaaacttgactatgcctggtcaccttcttggatctgctgtctaaatgatatatatatgatatatatgtgatatatatatatcatatatatgatatatatatatatatcacatatatatgatatatatatgatatatatatatcacatatatatgatatatatatcatatatatgatatatattttttttaatgcaggaaagtatactttgtaaggagcagatttttttgttctcagtggaaccctgtcaaatcgcataaaagaggaaaaaaacaaaactcattagaatgttttaaattgaatgttcgccttttacatatatttgctcttcagtatggatcccaatttgaatgttacatgttcggaaaaactttcagttgctcaagggcaataagaaaatttgaggccgggtgtggtggctcacgcctgtaatcccagcactttgggaggctcaggtgggcgaattgcttgagcccaggagttcgagaccagccggggcaacatggcaaaaccctgtctctactaaaaatacaaaaattagctgggtgtggtggtgcatgcctgtagtcccagctactcgggaggctgaggtgggaggatcccgtgagcctgggaggtggagtttgcagtgagctaagatcgtgccactgcactccggcctgggtgatggagcaagacctcgtctcagaaaattggaaactattgactaagagaagtttctaggtttgcactgaattgtcttttgtacatacagtgaattgttttgctgttctccccactccatattaatgcaggagccaggttggtctgttaggatgaacaaaggttgaggggagggcaggattcgtgcatctgggggccaaacacatgttccgtcttgattgccttaagagttactagcgaggtcagtgttaggcttgcaatagggattttaaaatacactaactagttccttagctaccttcacatacattctataggccttcttaaattagcactaacctccacttccttctctgccccattgcctcccaaatatgctatggagctatttttgttaccacgttataacgtgaatatttatacagtagcctcttcaggctttgtaattttcattccaaaaatgcccggtgtgatgctttacactctacaaagtatggtttaaaggcacaaggtcatggcctttgtcatagcagttgaatgtgcattgacatatttttctatgattttttaaaattacaatagaaaaataagctgttgtaacgtgtaaggtcatgacaatttttgtatttatatttgaaatcagatttctataactcgtatttgtgtacagaattctcaatggatttatatattgtgaaatttttatctgagattgggatgtggattatgcttaacagtgagagctgaaatgagaccatttactttgtttaaaatgctgtactgtgcaagtttggaaatgtaaattaatttactgtatataatatcttgagtttgtttatacctccaagtttttacactgaagataaactagctttaattcaaaactttttttttctttataagggaataagctgttgagctaaacctgtatacttgtgctttttattttctggatgcacaatgaaagtttatacttgtatctcactgcatcatatctgattgcagaaattaaagcacaatttacaagcaata

SEQ ID NO: 188 - DNA, 8257 bp, Homo sapiens
gctctgaaagtgttccagctgaaatttcagatcggacagactcgctgcggctccggaggcagtgattccaagctgctcgcgcacgctgctgccaagctgcaggatggtgcacgtagccaggctgctgctgctgctcctcactttcttcctccgcacggatgctgagacacctccaaggtttacacgaacacccgttgatcagacaggggtctctggcggagttgcctctttcatctgccaagctacgggagacccaagacctaaaattgtctggaacaaaaaaggaaagaaagtcagcaatcagagatttgaggtaatagagtttgacgatgggtctggatcagttctcagaatacaacccttacggactccgagggatgaggccatttatgaatgtgtggcctcaaataatgtgggagaaataagtgtatccaccagactcacagttttgcgggaagatcaaattcccaggggcttccctaccattgacatgggcccacagttgaaggtggttgagcgtactcgcacggccaccatgctttgtgcagccagtggtaatccggatccagaaatcacttggtttaaagatttcttacctgtggacacaagcaacaacaatggtcgtattaagcagttacgatcaggtggtacaccaataagaggagcccttcagattgagcagagtgaagagtctgaccaaggaaaatatgagtgtgttgccaccaacagcgcgggcactcgctattccgctcctgccaatttatatgtcagagagctgcgagaagttcgccgtgtcccaccaagattctctatcccacccactaatcatgaaatcatgccaggcggaagcgttaatatcacctgtgtggccgtggggtcaccaatgccttatgtaaagtggatgttgggggcagaagatctgacacctgaagatgatatgccaataggaagaaatgtgctagaactgaatgatgtaagacagtcagcaaattacacctgtgttgctatgtcaacactgggtgtcattgaagcaatagcacagatcactgtcaaagccttacccaaacctccaggaactcctgtagtgaccgagagcacagctacaagcatcacactgacgtgggactctgggaaccctgagcctgtttcttattacataattcagcataaacctaaaaactctgaggaactttacaaagaaattgatggggtggcgaccacacgctacagtgtcgctggactaagtccctactcggattatgaattcagggttgttgctgtcaataacattgggcgggggcctcccagcgaacctgtgctaacacaaacctcagagcaagcaccatccagtgccccgagggatgtccaggcacgaatgttgagttcgaccaccattttggtacagtggaaggaacctgaagagccaaatggacagatccaaggatatagagtttattatacaatggatcccactcaacatgtcaacaactggatgaaacacaatgtagctgacagccaaatcactactattggcaacttagtgccccagaaaacatattctgtcaaagtcctggcttttacctcaattggagatggtcccctttcaagtgacatacaagtcatcactcagacaggagtaccagggcagccactaaacttcaaagcagaacctgagtctgaaacaagtattttgctctcttggacacctccacgttcagataccattgccaactatgaactggtctacaaagatggggagcatggagaggagcaacgaattaccattgagccagggacatcatataggctgcaaggactgaaaccaaacagcttatactatttccgtctggctgcacgctcccctcaaggcctgggtgcttctactgcagaaatatcagctagaaccatgcagtcaatgtttgcaaaaaattttcatgtcaaagcagtaatgaagacttccgtgttgctgtcttgggagattccagagaattataactccgccatgcctttcaaaattctttatgatgatgggaaaatggtagaagaagtggatggccgagccacacagaagttaattgtcaacctgaagcctgagaaatcatattcatttgtgctgacaaatcgtggaaacagtgctggtgggctgcagcacagggtcacggcaaagactgcaccagatgtattacgtaccaagcctgccttcattgggaagaccaacttggatggcatgattactgtgcaactgcctgaagtacctgcaaatgagaatataaaaggttactacataataattgtgcctttgaagaaatctcgcgggaaatttatcaagccatgggagagtccagatgaaatggaattagatgagctgcttaaggagatatctaggaagcgcagaagcatccgttatgggagagaagttgaattaaagccatatattgccgctcactttgatgtccttcccactgagttcaccctgggggatgacaagcattatggtggatttacaaacaagcaactccaaagtggtcaagaatatgtcttctttgtgttagcagtaatggaacatgcagagtctaagatgtatgcaaccagcccttactccgaccccgtggtgtcaatggatctggatccgcagccaatcacggatgaagaagaaggcttgatctgggttgtaggtcctgtccttgcagtggtctttatcatctgcattgtcattgctattcttctttataaaagtaaacccgacaggaagagggcagagtccgactctagaaaaagcagcataccgaacaataaggagatcccttcacaccacccaacagaccctgtagaactgaggcgccttaactttcaaacaccgggtatggctagccatcctccaatacccatcttggaacttgcagaccacattgaaagattgaaagcaaatgacaacttgaagttttcccaggaatatgagtcaattgaccctggccagcagttcacttgggaacattcaaacttggaagtaaacaaaccaaagaatagatacgcgaatgtaatcgcatatgatcattcccgggttctcctatcagctatagaagggatcccaggaagtgactatgtgaatgccaactacatagatgggtataggaagcaaaatgcctatattgcaacacagggatctctccccgaaacatttggggacttttggagaatgatatgggaacaacggagtgccacagttgtcatgatgacaaaactagaagaaagatcaagggtgaagtgtgaccagtattggcctagcagaggcacagaaacccacggactcgttcaagtaacgctgcttgatactgtggagctggccacatattgtgttcgaacatttgcactttacaagaatggttcaagtgagaagagagaagtgagacaattccagttcaccgcctggcctgatcatggtgttccagaacaccctacaccttttctagctttcttacgtagagtcaaaacctgtaaccctcccgatgctggtccgatggttgtgcactgcagtgcgggagttggccggactggttgcttcatcgtcatagatgccatgttagaaagaataaagcatgaaaaaactgtagatatttatggccatgtaactttaatgagagcccagaggaactatatggttcaaacagaagaccaatacatctttatccatgatgcactgttagaagcagtgacttgtggaaataccgaagtgccagctagaaacttgtatgcctacattcagaagctgacacaaatagaaacgggagagaatgtcacaggaatggagctcgaatttaagcgtctagccagctcaaaagctcacacctcaaggtttatcagtgccaatcttccatgtaataaattcaaaaatcgccttgttaatattatgccatatgaatccacaagggtatgcctgcagcctatccgtggagtagaaggatctgattacatcaatgccagttttattgatggatacagacaacagaaagcctacatcgctacccaggggcccttggcagagaccactgaagacttctggcggatgctctgggaacacaattccaccatagttgtgatgctcaccaagctgcgtgaaatgggcagagagaaatgtcaccaatactggccagcagaacggtctgcaagataccagtactttgttgtagatcccatggctgagtacaacatgccacagtatatcctaagggaattcaaggtcacagatgccagggacggccagtcccgaacagtaaggcagttccagttcactgactggccagagcaaggagtgccaaagtccggagaaggatttattgacttcatcggccaagtccataaaacaaaagaacagtttggccaagatggacccatttcagtccattgcagcgcgggcgttggaagaactggagtcttcataacgctaagcattgttttggaaagaatgagatatgaaggagttgtagatatcttccagactgtcaaaatgttaagaacacaacgaccagctatggtacagacagaggatcaatatcagttttcctatcgtgccgcactagagtacctgggcagctttgaccactatgcaacgtagaaacccctgacccattctggatttttactacaggcccttcaatatccatggagtctcttctgagccatacagggcacttgagaagtccttcttaacttctagctaacaactacttagtgggactattacacacaaaacaaattaaaaacaaattattccaggtggaccaagaattcacagtttaataatctaacctgaaaaataatgaagagaatcctgactgatgaggcatctgaaggattttatttacagatacctcaaggattcaaaatcaagggaagaagaaatcacagcaaagaaccaccatcttattcaggattgcttgaaaggtgcaaggagaaattgccagaatgctgcagttcagcacaagatatgtgctggtgtggcttctcacaatgaaacggactctgctttgacatcgccccttcccaccatactgctcataataacattttagggggaaaggggagggaatgtttaaaaagaaagtccttgatttagttttttagtattgtaaagatactgctgacctgtgcttcatttctaactgtgtaaacttttttttaacaaaatgtatcattcgataaagtgaattttaaaaaagttacataactcttcatttttttatttccaaatcgtaggtttttttaagctgtagaactgttatctgtaatatcttgctgtagaaatatcaaatcatttgaaaatttgcacatttttgtgcaaaactcaatctacagtatcagtctcgtcagatatattaattttacacttcagttttgattggtgagaaagtacccattctcttcaaataatcaaagataattattattttgttttgtttttggaatcaacagggaggcgcaaagtataaagttgctgctaacatatatacatatatatccatattttataagggtgtctatgtatatatagacagtgtgtccacacaaaaaatagatacagttatcagtcagtcagttcttccatgatttagtttttttaaacgtagaaaagctattgtaaacatctctttccatttattcttaattttttgacatattggtatttctttaaagggaaatgaggaatgcacatcagtgattgattgtcaaacctcaccccctgatttcctacctaatctacccccacctaaccaatcaatcacatccacaaattgttttgtttgtttgttagtcaggcttccaacaaagttcaatatttctaacactctagtgcaataaaaattattattaaatagctaagaggtgtgcatgtgggaaaggtcagtgcatatccctttaggaggggagaatgttgtaatatatcagctatcgagttgtttaaaaaaagtgtattcaatcgtatattgtctatagtatgtgctatgaaatttgcatttatgatatgtaacaggggcaaagccaaattcatgttactctgttcagtcagaaacattttgtggcatacagcattcctgggaagtgctgtactttgtttcgttttggttttagttttgcatttagagtgccttataattgatgcctattttaatagcatttctttttagcttttggttcgtatttccattcactgttcgtatctgttactttctattaaagcattatctgtttaccacatgtacaaaaactctttgaataatatgcattcctagttttcagccaagtcggggatgttagtgattgtaccagcccaaagcacttggataatcagggcccttcttccttttataatcaatcatcaacatcagaaaaagctacttgttttatttatattcccttccaaatccgctctggaacatgcagtaactgcaccaaacttattttagtaacaaatatcattggcaactttggaatatatttgatattccattaggatttttctaaaaggggaaataaactatatatatatatgtatcttacccccaattcttccaacagaatttctataggaagccatggatgatggcataagtttgccacatattacatgattttaaataatcctcaaaatacccaaggaactcttaaagagttttggtatgagtatactactttggtttaattttagcttcatggatgttctgcatggaaggatttttgttttccacattttcccattgctagcagagtgaaatccaagagaccaaacatttgcaagcattgtatttgagcacttttgtaaaaaacaaagaaaaagaaaaaaaagaaaatatatataatactaaaaaaaagtatctagaaggctacctcagaatgagactctctaacctacatcagaaccagagaagaatgtgcactatgtgggtctgttatcattattttcttttagtttgtatctttttggagatttatccaagtgccagattactcagtgctataattttcttttagttaaacaaagggggtcagacagacattgcatcatccagacatgccttgttggacatgtagaatccgatggagcactgcacaccagaatgattggccaatgagcagcttctctccctgaaacaataactgcccatttggcaaagggaaagatgacaataatcagaagaagaaaatgaatgggatgcataccatagacgaacgaggcggagactattgcgggaatcttactgttcaggagctgttcctagaactaactcccttactgtcattgatgtgcattccactctgtgcttttctgtacaaccattcaagttttaatttcccaggtgaaccatctttatctgccattaccacaagctttcaagtttccagttattttcatcatcataaccagtacggtgctattatttacctatgtacgtgtagttatgtataattttgtaattagttacaatggtaaaaaaaatcaaaatatataaaaagtgatttgtacagaactttattttagctcttttttaaaaatgatttgcatggttagaaaacggcgaggacagccaggggagggaagggcctctagggaactttgcactttctatacctttgtactatgcactgccctattgattctacacccaataatgatattacttgaacccatctgtaagaaactgcttcggaaattcatttgtgtgtatgtaaataacacaacatagaaacaggaagggaaaaaagtctgcagtaatgcacgtattttttttctttcctgtttattttcggttttgctttaagtccttttatttttaattccctttttgtttttctttttgggttttggttccttttgggtttatgggtgccctgatactccagcagagatcagaaggctacagatccattctatccatccgttatgtggctttgccatcccagcttggagtgtctttacaaagataataacagttgtgttctttgctctcgttttggatgcatagactgaaaaattaaaacaaataacttgtaaaatggcttgttaaaaaatacaattacctctaattagtagtacgcgtaaatgttttacagaatgaaaggcgtgctttttattttcttacttcgttacattggtggcgaaagaagtctgtatgaaaatcagttctttgctgacacaagttccatttgttacaaatgaattctaataaaaatgtcagtgttatgcaaaaaaaaaaaaaaaaaa

SEQ ID NO: 189 - DNA, 3416 bp, Homo sapiens
tgcgcgcgcccgaggacgtacgtcatcggcgacggctcccgccggctgggcgtccggtggccggtgtagcagagcgggagcggcgggcggcgagcagaggagctaacaggtgggggcacggcacgcggacggacccccccaaaggccgggaggaggcgcgcgacgcgacctttcctgatctcccggagaagcctccactccattgtctcctggccccaccctccattgggcacgcccttcaccttatcccccaccacttattggctgcaggtcacgcccctcctctatttctggttccccattggctcttcaccttgtcctctccggggcttctctccgcacaggccacaccctctcatttgtcactagaccccgccttaatagtggggggctcctcccccatccatccttcattcattatgcacccagtgctgggtgcttggtacacgggggtgaatcagaccccattcctgccttcggggagttcaggggattgtgggaggacacggacctagactccaacagtgacagctctgagtaaagaagtcgccgaagcagtgggacactagacgcggggaaggcttcctggaggaagtgaggcctaaactgagccttgaagaatggttaagagtttgctccaggaatatattgcaaaggcattcttggcggaaggacccgagacgtgaaaaaaacaggcgtattctggtaatttcgaggagaggtcgacagtgtggggagttggagtgacccggctggatgtgacccccaggacagaatggtgctggactcaggggctcaggcgtatgatcaggcaccccccagcccgcctaccagtcccccatccctgcgccataggctgaagccctcagaccgagatgggccaccactgtacccctggtctcagtccctggccttgcccctggctctggcagtccccccagcgctgcagccccagcctgagcagcagccgttctcacagatgctcctgggccaccgtggccacatgcgtcgcagtgagagcacctactctgtaaatagtactggccggcgggggcgtggcaccctgggacggcctccacctggacggggacggaacccaggtgggggcaccctgcggcctgcagcctccctgcctcacattgctaagactcaaagggatgcaggccatattgccagcaagagcccctgcatgttggtggccctgcggccaaccaacatggaccgtgagcgagacaagttcttccagtcccattacacctacaatccacagtttgagtaccaggagcccatgcccacggctgtgctggaaaagtactgcgaggcctctggacagttcatccatcaggcagttggcatcattgaggctgttctggagaagtttggaacctatgaacactttgaggctgccactggggggcagctgctcaccaagtgccagatatggtcgattgtgcgcaaatacatgcagaaggagggctgcgctggggaggttgtggtgcagctgagtgaggacctgctgtcccaggcagtgatgatggtggagaacagccggcccacattggcgatcaacctgaccggagcccgccagtactggttggagggcatgctgcggcatgagataggcacccactacctgcggggcgtgaacaacgcgcgccagccgtggcacaacgcggagggccggctgcggtacgggctgcggccggcgaaccccacggaggagggcctggccagcctgcacagcgtgctgttccgcaagcagccgttcctgtggcgcgctgcactgctctactacaccatccaccgcgccgcgcgcatgtccttccgtcagctcttccaggacctggagcgctacgtgcaggacgccgatgtgcgctgggagtactgcgtgcgcgccaagcgcggccagaccgacacctcgctgccaggttgtttcagcaaggaccaggtgtacctggacggcatcgtgcgcattctgcgacatcgccagaccatcgatttcccgttgctgacctcactgggcaaggtgtcctatgaggatgtggaccacctgcggccccatggggtgctggataatacccgggtgccccacttcatgcaggacttggcacgctaccggcagcagctggagcacatcatggccaccaaccggctggatgaggcggagctgggtcgcctgctacccgactgatgtccgttgagggctgcagtcagaggccctggacagaagctccagataggcccctagaacatgaagcagtttgctctgtgcgtccacggcctaggtgtttcttgggggtgttgggagggcaggagcattccttgaggaggagtggcaacatcaaagtgtttgtgtcccttgccagcctccctggggtctggggacctgcagcagcatgtctggcaaactgagtcgccctcctgcctccagctctctgttgagcagagggaaggcatgggggcaggaagagagctgagcattgatggggatgggggtggtttgggaatagaaacttgttcttgcatgagatggctttggttgtcccagtactccagtctctcccttcccttacctggccccttggtgctccttcagcatttgtgctgtctacctctcactgggtcctggtgggggtcgggctcccttctcctggggtgattgatggcctgagcctggggtcctggtagtagagacccagctggcctggggtctgctttccgacattttgcctctctcactggtcatgtatttattccatatttatatggtctacttcctgtggctgggagcagcagctcctgaaggttccgtgggggtgcggggggttggacaggacactccttcttggaaggcaccaattttcccagccccactcccattacacacacacacacacacacacacacacacacacacacacacacacacacacacacacacacacactgattcaggccttgagagtcaagcccaagagctcccttggccctgttccccactccctccactggcctctgctgttcctgtctttgctcacaccctcacagctgctctctggcagaggttggcatagcctaggagcagctgcaattgcacctgagggacaggccctagagtttggtggcccaagtcctgaacccctcttagaccaggtgaggtgcagaggtggttgctgcttccagtttcccttcagacttagctgtgtgaaccccactcctatcctttggccttagttttcccatctgtaaaactcagaaacgcagttggaaagtccttattcatttagtaagcgaatatattataatatgtatagagcgccttttgtgtaagtcactggtcagaatcctcactgagctcccagtccagagagaagccagacaattaaaacagtaatgacaaaaaaaaaaaaaaaaaa

SEQ ID NO: 190 - DNA, 3890 bp, Homo sapiens
gggtcgtcgcggccgccgaaccggggggcggggggccggggtgagcgctaagatggccgccccggctcgggctgttttcagatgcttcaagtgttgtgaacagagacttgtttggattatgcatttctcagctagactaaataaatgctagcaatggatacgtgcaaacatgttgggcagctgcagcttgctcaagaccattccagcctcaaccctcagaaatggcactgtgtggactgcaacacgaccgagtccatttgggcttgccttagctgctcccatgttgcctgtggaagatatattgaagagcatgcactcaagcactttcaagaaagcagtcatcctgttgcattggaggtgaatgagatgtacgttttttgttacctttgtgatgattatgttctgaatgataacacaactggagacctgaagttactacgacgtacattaagtgccatcaaaagtcaaaattatcactgcacaactcgtagtgggaggtttttacggtccatgggtacaggtgatgattcttatttcttacatgacggtgcccaatctctgcttcaaagtgaagatcaactgtatactgctctttggcacaggagaaggatactaatgggtaaaatctttcgaacatggtttgaacaatcacccattggaagaaaaaagcaagaagaaccatttcaggaaaaaatagtagtaaaaagagaagtaaagaaaagacggcaggaattggagtatcaagttaaagcagaattggaaagtatgcctccaagaaagagtttacgtttacaagggctcgctcagtcgaccataatagaaatagtttctgttcaggtgccagcacaaacgccagcatcaccagcaaaagataaagtactctctacctcagaaaatgaaatatctcaaaaagtcagtgactcctcagttaaacgaaggccaatagtaactcctggtgtaacaggattgagaaatttgggaaatacttgctatatgaattctgttcttcaggtgttgagtcatttacttatttttcgacaatgttttttaaagcttgatctgaaccaatggctggctatgactgctagcgagaagacaagatcttgtaagcatccaccagtcacagatacagtagtatatcaaatgaatgaatgtcaggaaaaagatacaggttttgtttgctccagacaatcaagtctgtcatcaggactaagtggtggagcatcaaaaggtagaaagatggaacttattcagccaaaggagccaacttcacagtacatttctctttgtcatgaattgcatactttgttccaagtcatgtggtctggaaagtgggcgttggtctcaccatttgctatgctacactcagtgtggagactcattcctgcctttcgtggttacgcccaacaagacgctcaggaatttctttgtgaacttttagataaaatacaacgtgaattagagacaactggtaccagtttaccagctcttatccccacttctcaaaggaaactcatcaaacaagttctgaatgttgtaaataacatttttcatggacaacttcttagtcaggttacatgtcttgcatgtgacaacaaatcaaataccatagaacctttctgggacttgtcattggagtttccagaaaggtatcaatgcagtggaaaagatattgcttcccagccatgtctggttactgaaatgttggccaaatttacagaaactgaagctttagaaggaaaaatctacgtatgtgaccagtgtaactcaaagcgtagaaggttttcctccaaaccagttgtactcacagaagcccagaaacaacttatgatatgccacctacctcaggttctcagactgcacctcaaacgattcaggtggtcaggacgtaataaccgagagaagattggtgttcatgttggctttgaggaaatcttaaacatggagccctattgctgcagggagaccctgaaatccctcagaccagaatgctttatctatgacttgtccgcggtggtgatgcaccatgggaaaggatttggctcagggcactacactgcctactgctataattctgaaggagggttctgggtacactgcaatgattccaaactaagcatgtgcactatggatgaagtatgcaaggctcaagcttatatcttgttttatacccaacgagttactgagaatggacattctaaacttttgcctccagagctcctgttggggagccaacatcccaatgaagacgctgatacctcgtctaatgaaatccttagctgatccaaagacaatggggttttcttcctgtgatttatatatatactttttaaaagactgatgtaccattttaaacttcattttttcttgtgaatcagtgtatactacatttatacattttatatctaacaatttttttttttacaaagtataaatgtatatatcaactgaaggtaactacttttttcatatttggagttttaaacttttggtgtttacctcagactgatgttacctcttttatatttttatgtcttaattggctcggatgatgaacttgtgcaatcttctaccaacaaagttcaagtggcatcattttatatacatgtatctttttcaggtattttctatacaaattcttaatagatggaaaattagactctactttggtcactaatagtctttcatttgtatattgaagttaccttgccccttggagttattgaagtgacatgtcaaggtatcacctaaatattcttcagtcacactcactggtatttctgaggctttgtgtgttaacaggccttgtaattgacattattttggttaatgtaaccccaaaattgctttagtaattgctctttggcatagtcaaactataaatgaaaatggcagctttacaaatagtatatttaagtgaactctggaactatggacatgaaaaaaatgatggctgggatttatgatttttgtctggcagcaaacaggtttgtccagaagtctaataattaagcagtcataaaaagtctgaatttagtaaaccagtgtatgatgttattcaaatagtttaccttgggtatgagttcattttataatgtctgatgacattagatctcttaaaactttatgtattttttttagttcaaaggaatagagtcttgaagagaaaaaattatagggcagaaaagataagtgttcaaaattggcaactggactattattatgtctagcatctcattctaaataactaaagcttgatttactcttgctaggattatgtgactactaggtaggagcctcttaaaacactggccctgagcattaaaaaaaaaaaaaaaaactaaaagctatctatctaaacttgcacaaaaaaaaatacagtgtgagtcactctttttcttcttctgataatctcactgggtttctttaaagtcctgttgctgctaactttatcttatttggagagggtagaatcaactaatctctgtagaccagctatgtatctaagctctgttaaccacaggaagatcatgtatcccttttttataagtgggtttatttgcaggttgaagtcttagtgaaagatagtatcctgtagaatgctgttcaccactagtgatcatctgttaagtacaaacttgaaagaggtctctaccaataaatttttcttaaatttcacaaaacaagtcatctgggttagctgatagtgaggtgcagtgagacttttatcactgaatagacaaatcatttgtgccgaaaatacatctggaatattaaatggctatgtttaaaattgttcataatacctatgcaagttgttacctcaactgttacacacttcttaatacctcattaaaaatttacatggtcaagataaaaaaaaaaaaaaa

SEQ ID NO: 191 - DNA, 2696 bp, Homo sapiens
gcagcgggcctggctgcagatgcggtggtggccgccgagcgcctggaaggagctgctggacaggccgagggagcctccgcccgagaccgcgcagccgccgccgccatggctacaaaagaccccacagctgtagagagagcaaacttgttaaacatggctaaactgagtatcaaaggactcattgaatctgctctgagctttggccgcactttggattctgactatccccccttgcagcaattctttgttgttatggaacattgcctgaaacacggtcttaaagtaagaaaatcatttttgagttacaacaaaaccatctggggccctttggaactggtggagaagctgtaccccgaagcagaggaaataggagctagtgtccgggatctacctggtctgaatgagttttatgagtatcacgcactaatgatggaagaagaaggagcagtaattgttgggctgctggttggcctgaatgtgatcgatgctaatctgtgtgtgaagggagaggatttagactcacaagttggagtgattgatttttctatgtatttaaagaatgaagaagatattggaaataaagaaaggaatgttcaaattgctgccatattagaccaaaagaattatgttgaagaattaaatagacaactgaacagcacagtcagcagcctccattcaagagttgattcattagaaaagtcaaatactaagctgattgaagagttagcaatagcaaagaataacatcattaaactccaggaagaaaatcatcaattacgaagtgaaaataaattgattttaatgaaaacacagcagcacctagaggttaccaaagtagatgtggaaactgagcttcaaacatataagcattctcgtcaggggctagatgaaatgtacaatgaagccagaaggcagcttcgagatgaatctcagttacgacaggatgtagagaatgagctagcagtacaagttagtatgaagcatgagattgaacttgccatgaagttgctggagaaagatatccatgagaaacaagatactctgataggccttcgacaacaactagaggaagttaaagcaattaacatagagatgtatcaaaagttgcagggttctgaagatggcttgaaagaaaaaaatgaaataattgcccgactagaagaaaaaaccaataaaattactgcagccatgaggcagctggaacaaagtgacaacgatttgttaactcaaactaggacaattgcaatgtcattggtgaaatgtgccagcagtgacacgcaggaccagtacaagctggttaaagatatatctttctgaagaccacttgtatttaaacagactaaatgaaaagagaatcaacaattttataatatattaaatagaaaggaatctaaatgctattaaatattctaaaaggatgttaggaaccctgtacatttcttggtcagctgctgtggtaatacactgccatcaagcagagtgggtgcacttggatttccagacatacgttcctcaaaccttgtgcacaaagggtgatttgagtattgaccctttggaggtcaggattttcaaatgcagttttatctttttagctactttttgatgaaaaatataaagattgtttaaaaataacttaaccttcagttttatactgtgttggcacagatatttttttctcattggcccactctttgcccaatggctcccttacagatttttacatatgctttaaaataatttataacccagactggccaacaccctgtgcttcagcttctcagttttccggttctcccttgccctcttctgtgatagcacaacttcaaggcctacctcactctgacttctattttcctttttgtaaccttagagaaaagcttgggtccaatcccagcacctgaatattttaatttaaacttggatttggagataacttaaatgttactctcccttccttggaagcagcatttatacccctgaaatatgtgagggttgctccattggtatggttttaaggaagaaaggaagaggaagagttttttagttagttgaaccgaaatttctcttgtgatttcctgcaaggagttaatatcctttgaatcttggtaaatattttcttataaaaatattgaagttaaatacaagaaatcctagatggccaaagaaggcagggagtggagctaagcacaggaaaatgcaacgacttacaaataaaaacaggaaagatgaaaatcacaatgttttagctaatttttaatattaaatggtgaggaacaaaaatgatctctagcaaatgatgccaactggcaccaaattctttttgaatcttaaacatatatgcacacgtgcacacacacacacacacagagcttcggcataatttagtaaatgcataaagatgccgtaagaaggacttggctatcatttggagtaattgcaggtctttgctcttggccttgtagcacacttgattcctggcatacacatcctagcataacatataacagtgtggcttcttcacctagtgtaggcataaatcctttgcttttcatggttttgtaaaaaggtagtaacatacctattatgctttgaaatttgattcgttatgctctgcataagtggtaaaggctgtattgctttgcactgttaattatgaacaagaaataaaacaaatttgaagatagtaaaaaaaaaaa

SEQ ID NO: 192 - DNA, 7653 bp, Homo sapiens
agtatcgcaaaataggccaagtcgctgccctctactcaactcgcagggcgggaggatggagacagagggatgcggcgggagggcgggacagcccagtcgccgccaaggaggcgaagcggggtcggggtagctcacccgccccccgcagtccccgccccccgcagtccccgccccgcgcggcgccgcgcacgcctgaagtcattgcccgaggccccgccccctcgcggccccagccccggctctggctctgccggcggagggggcggagagaacccgcagctgcaacttcgcctggagcctttgagcctgggctcagccggggatctagcagccgtcaccgccgagtcgccgcttccccggcgcgggcctcagcccagccggcttggccatggcaggcgccggcagtgcggcgaatctggcccctgcgctccccgcccgtagctgagcagccgttaaccagccatcccgcctttcctcctgcccgtgtcgccgaggcccacgctccgcgcaagtttccgccgccgaagaagcaggaggacggacgtgaggagtcgggcgtccctggcccacccggccctctcgcccgcgatgtgggggcgcttcctggctccggaggccagcggccgggatagccccggcggagcccgcagcttccctgccggcccagattattcatcagcatggctacctgctaatgaatcattgtggcaggccacaactgttccatctaaccatcgaaataaccatatcaggagacacagtatagcttctgacagtggagacactggcattggaacttcctgttctgatagcgtggaagatcattcaacttcaagtggcacattatcttttaagcctagtcaatcattgattactcttcctactgcccatgtgatgccgtctaattccagcgcttcaatttccaaacttagggaatcattgacaccagatggctcaaaatggagtacaagcctcatgcaaacattgggaaaccacagtaggggggagcaggactcttccctagacatgaaggacttccggccacttcggaaatggtcatctttatccaaactcactgccccggataactgtggccagggtggcactgtatgcagagaagagtcaaggaatggtttggagaagatagggaaggctaaggctttaacatcacaactgaggacaattgggcctagctgtttacatgatagtatggagatgcttaggttagaggacaaggaaataaataaaaaacggtcatcaactctggactgcaagtataaatttgagagctgtagcaaggaggactttagagcctcttcctctactcttaggagacagcctgtagacatgacatatagtgccttacctgaaagcaagcccattatgacaagctcagaggcttttgaacctccaaaatatttaatgcttggtcaacaggcagtaggtggagttcccattcagccttccgtaaggactcagatgtggcttacagagcagctgcggacaaatcctttggaaggtagaaatacagaggattcttacagtttagctccttggcaacagcagcaaattgaagactttcgacaaggaagtgaaacaccaatgcaggttttgactggatcatctcgtcaaagttattcacctggctatcaggatttcagtaagtgggaatcaatgttgaaaataaaagaaggacttctaaggcagaaagaaattgtaatcgatcggcagaagcaacaaattacccacctgcatgagaggataagggataatgaattacgggctcaacatgccatgttaggacattatgtaaattgtgaggattcttatgtggctagtttgcagccacaatatgagaacacttcactccagacaccattttcagaggaatcagtttcccattcccaacaaggggaatttgagcaaaagcttgcatctactgagaaagaagttttacagcttaatgagtttctcaaacaaagactaagcctatttagtgaagagaagaagaaactagaggaaaaacttaaaactagagatcgatacatcagtagtctgaaaaagaaatgccagaaggaatctgaacaaaacaaagaaaagcagagaagaattgagaccttggaaaagtatctggctgatcttccaactctagatgatgtacagagtcagagtctacagctgcagattctggaagaaaaaaataagaatttacaagaggctttgatagatacagaaaaaaaacttgaagagatcaaaaagcagtgtcaagataaagagacacagttaatatgccagaaaaagaaagaaaaggagttagtaactaccgttcagagtttgcaacaaaaagtagaaagatgccttgaagatggaatccgccttcccatgttagatgcaaaacagcttcagaatgaaaatgataatctcagacaacaaaatgagactgctagtaagataatagacagccaacaagatgagattgacagaatgattttagaaattcagtctatgcaaggaaagctttctaaagagaaactgaccactcaaaagatgatggaagagctggaaaagaaagaaagaaatgtacagagattaacaaaagcattgcttgaaaaccaaagacaaacagatgagacatgctctttattggatcagggccaggaacctgaccaatctaggcagcagacagttctttccaaacggccactatttgatttgactgtgattgatcagctgttcaaggaaatgtcctgttgtttgtttgacttgaaagcattgtgtagtattcttaatcagcgtgctcagggcaaggagcctaatctttcattattactgggaataagatcaatgaactgttcagctgaagagactgagaatgaccacagcacagaaacactcactaaaaagctgtcagatgtgtgccagttacgaagagacattgatgaattaaggactacaatatcagaccgctatgctcaggacatgggagacaactgcattactcagtgatcaagtgttagtcccacagcaataatgacctgttgtttaaatgctgctgtgttatggagccataatggaaggttgcaagtgacatgacttgcacttagggattttttttctgtggatttgttttgttgaaggggagaagggaagtgaagagattttgaaggggcttatctaatcaggcaaaaagaaaaaaaatcaaattacctttggaaaatatgataaaatctacaaggaaaaaaatgtctatattctcaaactactgattgtaggaccaagctgtgaagagtacccttcacatgaaggagtaggattccttttaatcctatagctttgtgtgtttgtgtgtgcatgtatgtgtgttgttgtgtgtgtgtgcacgtgctttattcacaaatttataagggtttctagggtcagagcagagcttctgagaaaggcacacgctgtttattcttatatttctttcatatagaagcttgtgttgtactttgggattttcagtggctggctgaacaagagttcaaacagcaggcaagtgttgtcatggtagtacaggaggcaaaaccatttatattttgaacacttactgcactgataggatgtttgtggttgagctgattttagtactgtagataggtcagctgtttttccagagtgattgtggatttcccaagaggtgtgaaattttgacgtgatgctctttttccttagcattgtaatgtatgtgttacaagaaaggttaacataacttgaactaattttaacatgttccttactatttacaattttttatttatatgttttatatatatacatatataaatgtaaacaaagccatatataattaataaaggcattggatcattattataaaaggaagattaacaaagttaccctggaacaatagcttacttatccaaatctcaacatttacattttaacagttttgtatgtttcaaagttgaaactactgtaagagaaagccaatactatttatatctgaatcaacagtagcataaacattttttaattgagattgtattttaatcccttttgttaaagtacattaacaacagtttttcacaggatatgaacttggcgaaattagttcttaatctgaattacagggtattactatgaaatgcagttgattttgcagtagacgtacagtcatttaaacttccaaatgagtgttgtccatgtttctgttggtattttggaaggattatacattttattgccttcagcattgattatgttcttttgaatatacttagttttggcgaaagccttgtcctttgtaagttggtttgatcttgtgatgcaaccaagtctcatttaggtcaagactaaataagagatggaggggtagagggtgtgactcaagcaggataatattgatttgataaagagcatatcacatgcctgttttcttgccagataaagggcatagcacatgcctgttttcttatatactagaataaaggctctcctaggaaagatttttcttaaatatttaaaagtgaaaatgtgagacaaggccttcaaggagactacccaggaagatacacagtttaaaatgttggctatacagctctcaatagattattttatagttatagttgaataatcagttataatacactgtaaagaaatcagattttccttctgtttggtgtctgagtccttcctgctcttcttacttctgagaatctgggcactaagaaatcagtaagtacattgtagtgctcctgcatcccagagtccttaacctaaggagggtcttagtcactggtaagaacttggctttctaattatattcacttggtttttaacattagtagcttgacgataatcagggtatagtaaatttccaccaaaaatgtgatgcgaagaattctgccttggtcctttatggtaaaacagataataacgtctaaaatagatcagccacaagtgcagcaaatatttttacactctctttgaatagaatcccaaccaccctcccccatgattttagaaataaaggcttcctaaaataatagaacaaattggcaaacaatcactaattggaccagtaggttcttacttaaatatctctcctagatttttagtgtatgttttgggattttatgggtttatttatttttttttttttaagcagacgttacagtttgttttaatctactatagatacgtttttgttttttggcttagttggggataaaataatttatttgtaagttagctttctaaaacttagagaaagtaatttaattcacgtatcttaaaaataaaattccaaagttaaaaaatttctgacttagtaggaagttaacaaaactactgctgatgcatttcagtttccaaaatctgtaccctccccccataaaaaagggagttaagatgtgctagtttaagtagttagctgaattatagattgatcctcttaaaatctggagtttgtaaaggggcctacataaacagtagatagacttggagggattttgtgggggaattgaaactaatagtattctatctagtttgtcagtatttactttttgatttttatttttcagaaaattttcctttcccaggacaccctcttgtattagaatatcctcttctgtatcacattaaaaacagattttactgttagaccaaataagatgggcaaatagcaacactagagcatctcacccagtttgaactaggatgttcgtggaagttatgacaccaatatattcctgaaatgaaaattaacctaaattttaaagtgaatctatttgaaaatttacttagataatgaaacctcgttttaattgtgctttttgtgaatccaacacttgtttgcttagaaagtatcttatccagtattaatattttgttcttttgggttttaaagttgagcttattcagcctcaatcacattacagcaagcataaagtaacagttgactcaatgaaagacccaaattgcctgtacagataaaattcactgaatcaaaggcacaatagctatcttttcacttgagctcagaaaagtaaaatggcttaatttgaactattaattttcagtggcctctaattaaacaaaaacaaaaaaccacaaatactggctaggtaagatattcctgaggtcattttaaaagaagtgtggcacctaggattcaatatttaatgctaacagtattatattttagtgaaatttattttggtggtgacagtttattaaacctaattagacttctttcaatagcttgttgtagagacaatctcaagggctggaaagtgttgctaaaatgaatgtcatacatttctgatatactaaggagcttataaagtaattctttcatagtgcaagaattattaatttcttagaggatgtttttaaaggagctacttaattgggaaaatgttctttaaatatcagtaatagttcattaagtaacatagtagctaagaacatggactatattttcacagcatagttcagcttaggcacacctttagtttggattattggcattctcttacgtaggaattatatcattgtagatatgtaattatggtaataagcaattttcataaccatgctcactcagactatatcatttgaaactgccatgtttccatttttgacaattcatgttcacaaaacaacaggaacaatttcctatttggtataaagagcaaaatttccaactttgccccaaaatgccatgggtggcatattgccatatgattatatcatatatttaatcatgtatgggaaagattttggattttttttcttatttaaaaaagtgctaaatataagaatatagttttaaatcagcaagtctaataacactattgcagctgtacacagagagaaccttttgtgcctttttgcctgcagtaagcatttatttctattttacatgagttctaagaatgttgatgattattgcaccttgttcttctgtatataaacttgattaaggaatttttttttttaaagcaaggagccgttttttgttactaggtggataccttagtaaacatgaggggaattatcagatagatgtctttggagcccagccttccctgtgtagtgagctggaaactcctttagattgtattcattggtgtgtatgtatatgtacatatatgtataaatagttaaatacataaacataaaacttaacatcgcattgttgtgatgacaagaagtagtaaggtgctaggtggttacattaaaaagcacagcacagtgtataatcagtcactatgactggtggttttgtaagctgggttcagtttttgaaccacccagaatacctcatgtgtaaatacagtgttcatgacttaattgaaatacagttattgtttaaaaaaaaaaaaaaagaatgtgaagccactggttggcttatgccttctgatctatcattcttgcctctttttttgtaaaggggttttcttcttgttgttctgttttttaatagggtttacagctagaattttgaatgccaaagttctatttattaaattaagaaaaaagttttcaatgttaatggctagtatttttccactggactattgtttgttgatgttggaatttgtatttacagagaaataaattttttataaaaagaaaaaaaaaaaaaaa

SEQ ID NO: 193 - DNA, 3020 bp, Homo sapiens
actttaacccggagccccgcccctcgggcgtacaaaaccggagcctcgggccgggctgcgtgagggaggagggttcatcatgcctagtggcgtataagaagaccccgccaccggtccctccacgcaccacttcaaagccgttcatctcagtcacagtccagagcagtactgagtctgcccaggacacctacctggacagccaggaccacaagagcgaggtgactagccagtcgggcctgagcaactcgtcggacagcctggacagcagtacccgaccgcccagcgtgacacggggtggagtcgccccagcccctgaggccccagagccacccccaaaacatgcagctctgaaaagtgaacaagggacgctgaccagctctgagtcccaccccgaggccgcccccaaaaggaaactgtcatcgataggaatacaagttgactgcattcagccagtgccaaaagaggagcccagtcccgctaccaaattccagtccatcggggttcaggtagaggacgactggcgaagcagcgtcccctctcacagtatgtcctcccgacgggacacagactcggatacccaggatgccaatgactcaagctgtaagtcatctgagaggagcctcccggactgtacccctcaccccaactccatcagcatcgatgccggtccccggcaggcccccaagattgcccagatcaagcgcaacctctcctatggagacaacagcgaccctgccctagaggcgtcctcgctgcccccacccgacccctggctcgagacctcctccagctccccagcagagccggcacagccaggggcctgccgccgagacggctactggttcctaaagctactgcaggcagaaacagagcggctggaaggctggtgctgccagatggacaaggagaccaaagagaacaacctctctgaagaagtcttaggaaaagtcctcagtgctgtgggcagtgcccagctactgatgtcccagaaattccagcagttccggggcctctgtgagcaaaacttgaaccctgatgccaacccacgccccacagcccaggacctggcagggttctgggacctgctacagctgtccatcgaggatatcagcatgaagttcgatgaactctaccacctcaaggccaacagctggcagctggtggagacccccgagaagaggaaggaagagaagaaaccaccccctccggtcccaaagaagccagccaaatccaagccggcagtgagccgcgacaaggcctcagacgccagcgacaagcagcgccaggaggcccgcaagagactcctggcggccaagcgggcagcttctgtgcggcagaactcagccaccgagagcgcagacagcatcgagatttatgtcccggaggcccagaccaggctctgagaccatgcaggaggaaagaaacgattttaaatcattaaaaacacaaaaactaagtgcgaacggaacagagttttctcaacctttgctatggttattctgtctagagaccctgagccaactttcaaattgacgcatacaagggctcacaatttggcttttttgggtccctcccagctttaggttatgaagattttactcacaaaaaaaatcaacaaaaatcacgaaactagaaaactttttttttcctcttgctggccgtggtggactagatagatggacgtcggcaactcccggcccagcctccatactgcggtctttttactcgttctatctgatgagaactcacactagcttgtttacaagatgacgacagtccaagggcagccttgggcacctgccatgtccctcctttccccagctatccccgctctgaccttgattttcattcttatgtttttctcttttcccttcagagctcacacagtggtcaccattgtggcaagcggctttctgggtctcagccctctctgcggttgagggcccagaggacagagagatggacatgcgtcccctccctccccccgccaagtgctcacacacaacctcacgcgcacacacacacacgcagatggaggcgcctcactgggaggtgccccgccagccctgggcagtgtcaggcaggactcactcaccgctgagcagatgagggaagttttagtcttggcgggtggaaatgagacgaagccacagttatcacactccagactcctgcccttttattttctccagccccttcttccttcagcaaaatctaggactcccgagtggcttccagggggccgtcagtcctcagccgcgcctgtgtccggtgcccgaggggcgggcggcggtgtctgtatgtatgtgtacatatgcacatagaccttagagtgtatagttaacaaacgcccatctgctcacccatgcccacccagcgccgccgccgctggctctcggggcacctggcaggaggcgggtgtgtgaatagcatatatttttacatgtactatatctaggtgtgtgtacaagtgtgtgtaaaaatatataccttgtgtgtaagcagccctttttttttttggtctccacccccctccccccgccccgcactcctaagggcccatctgcccagcctctgagttttctgttctattttttttttaaccccaattatccttctctctctcctgcccccgcatcccactcccagggtgtcacgagccctgagctgcaatggcccgggcctgcagggcggggtaggggagggcaggggctgagccccgaagccagctcagtacctgaggggctgctctatgctgtgtatgcgcctctctggcatccgagacatcctcttggctggcgcttgctgcagggggggacccccccccgtccccaggtgaaccaagggtctgctccggggcccatttccagcttggccgccgtctgtgaccttgggcaagtcacttgacctctgtgtgcctcaacttcctcctctgtaaaacggggacagtccctgcccctccctacctcacaggcatgttgtgagaataaatgaggtaacgtgtaccaaaaaaaaaaaaa

SEQ ID NO: 194 - DNA, 4051 bp, Homo sapiens
acatgctgccacttggctgagccgggcgccggcgagaaggcggcgccgctgccctggcagctggactgcactttgcccccgcccggcctcagctgccgcccgcccagacgccagcaagcccccctcccacgacagggctgctccgggagcttcggagacccgccccgggcctgagcgcaggctgcctccgggaccccacggctgtccggacgtgccatgggcgcgcagctgccgggcaacgtgttgtgtaaacactacacgtgaagagtggtgaaagggaacattgattactgaagtgccctggagagggaaagcactggtcaacatcacatggacaaatttcattgttttctaaagatggcctggaagtagtctttgccactgcttcctccacaaacagctcttcataacatgggctgcatgaaatcaaagcaaactttcccatttcctaccatatatgaaggtgagaagcagcatgagagtgaagaaccctttatgccagaagagagatgtctacctaggatggcttctccagttaatgtcaaagaggaagtgaaggaacctccagggaccaatactgtgatcttggaatatgcacaccgcctgtctcaggatatcttgtgtgatgccttgcagcaatgggcatgcaataacatcaagtaccatgacattccatacattgagagtgaggggccttgaggctgtaggatgacaacactttgactgtggaggtgctagtttgaataaatgtgacaaaagcaaaaactggtgtgaaaaagtacaaataactatctggatttaaaaatgtgtctacgataatgtcactattataagaacaactaggatgaaatgcattttaagtacttctatgttaacagcaatttctgtttagtcttagattttagtcatctgaagggctgaacagaggtcctgtgacacccaataatcagctgaatgtcacagcacttcttcctaagtaatggcatcaccaaagaaaatgctaaggaataaaaactgccccaaattccaatggttgaagtttatcctttaaaataacaatttttgtttgtttatacccaaaaaaagtccagatatgaaaagggcttttctaaaatttcttggcgagggaatggcactcaaatcatagtgattaacagtaagtcttgtttgtttgtcaaggatctctacttcttgacacaaatgaaccctgtctttaataagataagatatttatttttgtagatgagaagtgtaactaccaccttggacctcagggccctaactaattacagctgttactggacgactcagactttgtgcctaaagccatcttagagataacagtttatagaagccatgacattagtgtttattgcattgaattaagcccagtgatataactatacaagaaaacaagtaggggtaccttttacaaagagcaatccaataaatcttaaaaataacagaaacttagtctgcaaggtagaaagtttcagttttaattctgtattaagctttactatctcagaggtacagagggctggaatatgggcatttatttccagttttttcttgactagtaaggcggtcaccattaaaatagaccagataatgcatgaagatttacagttgtattgcaaaacggaaaagataaaactgtcctttgaggagagtactcgttttctgggtttttgttattttttagtggtaacacaagcctatagggcatttatagccacctattatactgtttccataagcctggctaccttttagggaagctattttttctctttcatttttactgtcacagcacatacacacacacctttttgttttaaaggattaagtactgtttgaagatcagtggtaacagaaaatttgggagggagaagaagaaattaagacatgacttgttagaaaattaagacttcagtttctagaattatcttttcatcaagatttggtagacattgagtttaaatggaaaggaaattatttaagcctgtgtatgttagatccacaatacaccattggtattgaaatataaaggttaaaaaaaaggcttatgacctctttaatgagataaatatgtatttgtcttgtaagcaggcagaaaatctacctctaattttaacactaatactttgaaacccacaatcaaatagagtgaattctccaagttacataagcaaggaaaacattatttgaaatatgccatgttttcgttgcctttggacacctcatcattcaactctaattttaccgagtcccgggatttgtactgtcccattgtacttgcaatctacaatttatataatagaaaaacaaccaaacccattcatacaaggatctgaagttataaggttaagggcagaaagtttcccataagtataaaacatttccaggtcatgaagagtagtttaggttgagtgacaaaagcctaggtgtggttgtttttcattcattttgcatctcacaccaagacatttttgctgcaaggtcatctgctgcttaaaatgtacaattaggtatataaaataagtacaatggtgaaaacacaaagccaggtaaagcagcatgccccactaaacttttcagtatacatagggacagacaagtgagttttggttgtatctaaatattttaatttcaggttccttctgtgccctgggccactatttcccaggggtgtgacagagatgcctgccagatccatatcaactagaagtctgatttctgttgctgcccttcctcagcaactatggcagtatacttttatcaccaagcaccactcccttgtccctgaatcacattttaatagagtacaatatcttctgtacaatatttctgaaacacttatgtctgaaatatatgctgtattgtatgttaacccatgacatatatgaactacaaggcttgcataatcagtgagctagtggataaatcaagacaggagcaaatgggagaaagatgaataaacaaatgaaaaaagatgaataaatgaataagagagatgaataaacaaatttacattacatgtgatagttatcatggtatggccttcatgacaagatggatgagaatatcactgataggatattagccttctttcatatctttatattgaaatatgggctttacttcaatttgaaggtctttcatgaacaataaaagagagtagaaggactgtctgagaaggcaggagacatataaaacagatgactgaaagactgactagctcctggaaagggaaacatttggaacatccagagtaagggcaaatgggcttctaccagcacaacaaagagcctccaggtggcaacatggaagcaggttatcagagaaaataaatgtgcaaattccttatttacaatgactcacttaaccccacaaacatgtttcactgctgccttccccagttgtcgcttatgtactgttgttacctttcagttacatgcctttgatcctaaaattctctacttttgttgccttatcagttctttgcaatctgcctgtggttatcagcacttaaagcacaattttgaaggggaaaaaaatgataatcaccttagtcccaaagaaataatttgtcaaactgccttattagtattaaaaacagacacactgaatgaagtagcatgatacgcatatatcctactcagtatcattggccttttatcaaatggggaaactatacttttgtattacatagttttagaaatcgaaagttagagactctttataagtaatgtcaaggaacagtaatttaaaaacaaagttctaacaaatatattgtttgcttaatcacaatgccctcaacttgtatttgaataactaaataggacatgtcttccttggagctgtgggcattagttcagaagcactacctgcatcttaattttcaaaacttaagttttattagcaaatcctcttctctgtaagacttagctatgaagtggtatattttttccaaatatttttctgaaaacatttgttgttgtaactgcacaataaaagtccagttgcaattaaaaaaaaaaaaaaaaaa

SEQ ID NO: 195 - DNA, 1645 bp, Homo sapiens
ggtgccggagcgcgggcgcggcgcactcggagcgggatggagcgggcgcgcgggccgcgggccgaggccgacgcgcctgaggaggaggaggaggcgggggcggccatggctgctgtggtggtggcggctgcgggtggcgcgggaccggcggtcctgcaggtggccggtctctaccggggcctgtgcgcggtgcgcagccgcgccctgggcctggggctcgtgtcacccgcgcagctgcgcgtcttcccagtgcgccccggctcgggccggcccgaggggggcgccgacagcagcggggtcggggccgaggccgagctccaggccaaccctttctacgaccgctaccgcgacaagatccagctgctgcgcaggtcagacccagctgcttttgagtcccgcctggagaaacgcagtgaatttcggaagcagccagtggggcattccaggcaaggtgattttatcaaatgtgtggaacagaagacagatgccttggggaaacagtctgtgaacagaggattcactaaggacaagactctcagttcaatctttaacattgagatggtaaaagaaaaaactgcagaagaaataaaacagatttggcagcaatattttgcagcaaaagatacagtctacgcagttattcctgcagaaaagtttgatttgatctggaaccgggctcagtcctgtccaacaaatgttgctgaggcacagtgcatcgccaaccaagttcagctcttctacgctactgatcggaaagagacctacgggttagtggagacctttaacctcagaccaaatgagttcaaatatatgtctgtcatcgctgaattggagcaaagcggacttggagcagaactgaaatgtgcccagaaccaaaataagacttagaactgtacaggttggcccttcacctagttgactcagccctcgatagtctagagcccaccccctcctcaggaactcaagagctcagcatttataatgagcagttggtaatgagttgccctatgtgcttgtcgcaagcagtcacagagatgagccctattacttgatattcaggaacaaaggtacctgaacattctgataattatctcagcatacttgaggtttccttttttaagtgttcgaggttataacaagagacagccaaggacctacaagacagttgacttgattttgcacagtgtaacagcgcagttgcattctggccactttgaccttatagctcccaaatgatgagtttgtcatctttatgaactcatgacaggataataagcttgaagacctgctgtagttagatatgggctttaatccttcccaggcaccagtcagctgaacaaaagcataagccaaacatcctgtttaaactgtagaataaccagatattcccatcaggttaaagacttcatctagatgatgccccccagagatgcctttagtgtaagtagctggcttggggtatcagcaaatttcaggtatagttagataaacaggtacagggcctgcatactattaaaccatagtttgtggcacccgcttttctaactccacctgttagaagctatgtgtttgaaggaatgaatcagtgcagtataaataaaattcttttgtaaggagaagattaaaaaaaaaaaaaaaaaaaaaa

SEQ ID NO: 196 - DNA, 6876 bp, Homo sapiens
aaaacccttccctcccccgctcccccggaagtgcttttccaagattcgggccggagagaggccttgtaggcacagcggctgagactcgatctgctccaagtaggggctccagcgcgggtcggagtctgggggttcgcgcccgccgacccgcgccctgctccctctcagcacctgggcggacgctcctggcaaccactatttgagtttctgcctctacaaatttgactattctaggtacttcataaatgaccattaagaagtagatgcccagatgcaaaagtgatgaaacagtccatttgtcataaagtaagatgcagctgtggcatgtcaaccagcttggaacaaaattgtatctgtttttctcagaagagaattccacaaggttaaatcagcaaacaaagaaaacatggtattttgaaatatgattaaactcctgatgctgcagcagaggctaagaatattaatggccagatctagtgcacacatggtcttctgaagaagccatgggtagctgttgtagctgtccagataaagacactgtcccagataaccatcggaacaagtttaaggtcattaatgtggatgatgatgggaatgagttaggttctggcataatggaacttacagacacagaactgattttatacacccgcaaacgtgactcagtaaaatggcactacctctgcctgcgacgctatggctatgactcgaatctcttttcttttgaaagtggtcgaaggtgtcaaactggacaaggaatctttgcctttaagtgtgcccgtgcagaagaattatttaacatgttgcaagagattatgcaaaataatagtataaatgtggtggaagagccagttgtagaaagaaataatcatcagacagaattggaagtccctagaacacctcgaacacctacaactccaggatttgctgctcagaacttacctaatggatatccccgatatccctcatttggagatgcttcatcccatccgtcaagcagacatccttctgtgggaagtgctcgcctgccttcagtaggggaagaatctacacatcctttgcttgtggctgaggaacaagtacatacctatgtcaacactacaggtgtgcaagaagagcggaaaaaccgcacaagtgtgcatgttccattggaggcgagggtttctaacgctgaaagcagcacaccaaaagaagaaccaagtagtattgaggacagggatcctcagattcttcttgaacctgaaggagtcaaatttgttttagggccaacccctgttcaaaagcagttaatggaaaaagagaaactggagcaacttggaagagatcaagttagtggaagtggagcaaataacacagaatgggacactggctatgacagtgatgaacgaagagatgcaccctctgttaacaaactggtgtatgaaaatataaatgggctatctatccctagtgcctcaggggtcaggagaggtcgtctgacatccaccagtacctcagatacccagaatatcaacaactcagctcagagaagaactgcattattaaactatgaaaatctaccatctttgcctcctgtttgggaagcccgcaagctaagtagggatgaagatgacaatttaggaccaaagaccccatctctaaatggctaccataataatctagatccaatgcataactatgtaaatacagagaatgtaacagtgccagcaagtgctcacaaaatagaatattcaaggcgtcgggactgtacaccaacagtctttaactttgatatcagacgcccaagtttagaacacaggcagcttaattacatacaggttgacttggaaggtggcagtgactctgacaaccctcagactccaaaaacgcctacaactccccttccacaaacccctaccaggcgcacagagctgtatgccgtgatagacatcgagagaactgctgctatgtcaaatttgcagaaagcactgccacgagatgatggtacatctaggaaaactagacacaatagtactgatctgcccatgtgagcctggaaagcattgtgttgtttgcacctttgtgaagtttttaaaaatgaagatgcaagtgcttcattttcatttctaaacactaactccttttatagactgataaaatttttttctgaatatttcatgtgcatctttaactaaagggaattaatgtagagcaggtactccttaaagaacactaatttcattatatactactcgttgtacagcagcattcccgttttcacagtgcctatttaaaatgagagttgaagtaaatgacatgctggttgatttttatcaatattctggacttaacgcatacctttcatgtctaagtcatggttggcttttaaaactttttataaagcctcttgacaatgtacattgctaacaggtaactataggctttgaaagtaatgctcgtagattcagtgttcacagtatgtggcctccagcatgtaacatgaggaatcctttatttcattaattaatggctttttgacttgagccaaaacatatgtaaaggaaacagaagtaccgcacctcctcttacaccagtcagctcctttgccttcagtgttactagaaagcggcctgtgtccatgagtgtgctttgctgttggtgcactgaaaggcaggaaggagacaagattttctatttactcatctcatgatgtcatttgaagggcatgtccagatatcttaaaattataataggctcaagaatcagtctcaggtcactttacccaaaaacatttgaaaatctgaaccacaatctcctgaaagtttttctcctatagattgttgacaacacattgttttctggaggcatttgtgccattaggtttccatttatcttcagtttttttctttggtgtttgggatgtcttattttgttgccttatgtccttttcaatttaaaatgtttgagtttgtatatagttttgaaattggattatgtgttcattgttgtttagtttgcatttttgtcaaattatggttttgaaggttcatttggaacttactgttagtctgtaacagggttgcccttgtccagtatttatttataagctgtttacttttcaagttgataaaaacattctccaattctaaatttgcttgtgtccataggtgatctctttagcaaactgagaaaaaaaggaagctacttttaacatgcaaagttccctcaaggtgtaccgtgttgtctctgtgggcactcttccccagcactttagcagtaattcccccagctacacgctgcagttgtactctgcccactctagtgttcctcagctctgctgtccttttacttgtagctggatctttgattatccttcgatttccatgaaatattaatattgttgccagcatagcaggtacagtggaagtcttgtagcagtgagattgtatcataatttaggatttaaaatgaattaaagtttatataaactgaagagtctccatatgtcaaactcttggaaaatcaaagatgttccaatttcctaaacactagagaatacgagagaaggtagagtggaaaaggttaggtaaccttgcaaaatattttactattttctctaaatatgaggaagtttgagattatgatctggatctaccagatataactaaggttaatttagcatgaaaaagttttagtcatattggcatccaacctattcagtaaccgaatcataggacaatgatggattaggagaacaatagagtgggatcattataaagaaaataaattattaaaggtgtctttatcgttttagtgccatttttagtgtctttactataaatcaatatcagtgtattttatcattctatgtgcatagcagaattttcttttctcccttttgttcccctgtgaacttggtgcttattaaagtgctcactgttctcttaaaagagagcagtggtataggtgtgcagtttccatgatgcaggttccatttttaatatattgttccacttatcctttcttctgagtaaattgctaattgtgccaaatttatgtaatagtttttgtaatgtggaataagaattatgatggaaccattgcacatttttttctgaaacagccagtcaaggcagaacattaatctccaaatgcaagggctgatctatttattcattttggaggttgggtactttattctttctttccgtcatccttttcattgtttcccccggattctaattagtttttattttttttagataactccaatataatcattacagtttatgctttaaatactatgtgctttaaaaaggaaaatgggaccaatttgtctgctaagaatttgattttaggtactataagagtattaggaaaatatatacaactggtgttaatttctagatattttctagaaatcacttgtgttcctatttaataaaaggtaatttagaatactacttgtcctttgcagtagtttagtaatgggcattaagctgtgtcctcgaaggatgtacctattactaggtgcattttagaatgaaatattgatattttattagcatataattgtggccatatatctcagattttctgaggcagatctaattttagataattctgttggtagaccatgtgatccttctttttggttttggaaatataatcattgttaatgttttccctccaaatagaatactgttttatccatacaaatcataacagcatctatcccatgctagggttggaaactgatattggtattacttgtgttttttcttagtgtgttttatttcccagtttcatcttcttctaaaaatgaaaatatggtgccttccctccctccaggaagactggcaaatatttccttttatttactgctgctgtggagtgatgagatatgcactttactctttaagattcagcaaaaagcttttcacttctcagtatatccagaatacatcatatctgggacttaggaaaatttgccaagcaatctttgtttttatagatactaatgttgaccctctccagcgttcaatgttataaatagaacaagtcaagctagtgtttatctcctccccctccccaaaactgtggcacagcatataaaaatgtacctcaataatgttctattaaaaatgggacaggggccttatgttttcataatttcccaacaatgtgccgccatatttttgcctcaaggtaaaggttttaacagatgaaaaagtacttcccaattcccccgtgctattcctaacctataatgcccaaatgttttgtgcaatgtgtagtgtgtgtgtataaatacatatattcttgaaatagacataccatcagagacatcattcacaagtaactgatgtattggcatctcattcatatttctgatgtgtgaggtatatggtactaattaccttttccttgatgtttgccaaatttgaataaaggcattggtacgaaattacagaatgtaaagaaaatgtttttggcttgaaaaattaacatattttatgacgtaccacagtatactctgcccaaaccagcaccctatctatctttcctgttctttacatccctgttccccatccctacttcctcatttttggtataacacagttcttttgtagcatcattataattgcagttctatggcaattggacagttatagcatggaaacagactggtataagtagtacagtagtcaccagtgtgccacatttgcattagtaatgcaaaatatacattttataaaggacaaactttgtgttatgttttattttcattacattgtataatattgtaagactattgtatgtcctaatttgcattataaatgtttttttcctacgtaaaggcataaatatagcaactttgtataaaggtagcttattagatttttaattttttcttttataaaaaattgtccaacagtgggactaccattgccaaattgtatatgaaatatgaattttacccccatggttaatttcttttataaacattccatatttctctaataaaaagacataagtgatactgtactatgcatacattgtatcttaatgctgtttcagatcagcattttaaattttggtttgcatttttaatattggcaaaacgtaaccactgttaattaaaataaaaccttgttgtatatgtaacaacataattttccctctatcccttcccaccctttgttctctatttctccctatcagtgccaacttcatacattttgtagcatggcaataaaatataacttttacactgaggccgagtgtggctttttggaggaagtggggatgggacgattgccctctagttgtcctttgcatatgactgttttttgccatataagccatgtcatcaggcatgaaaagttttctcatatatgatgtaaacttgcttttaaggacaagtgtgaatgtgctttttaagcttaatttttgtcatgacaactaattttttttatctttggagaagtcagagttctttacaatcaaacgtttattaactggagtacttagaataagctagtaattgaatttagttcaagggctaagcaacacatttttaaatccttatttattgtagagtattagtatactgtcctacaaattatgtaaaatatggtttaatattagatgactttggattttgcaatgccttactgttgtcattctagcataaatatccataatgaggtactcaagttgatactggaagctgagctgatcatacactgacctgaagcattcatgaaaagctgctttattgaataaagtctgattggagttcttttcatgctcactttccccttattgctgaaagtagattgcaataaaaccccaataaaacgtttggtcggatatctacttaaaaaaaaaaaa

SEQ ID NO: 197 - DNA, 3797 bp, Homo sapiens
gcagacggcaaccgggccgctgattgggcggcgaaggagccattcggggagactctggtgggttcggctgccccaagagtgataagttcggcttcagacacgccttagcgccagcagtgagtcggagctctatggaggtggcagcgggtaccgagtggcggctgcagcagcgactcctctgagctgagtttgaggccgtccccgactccttcctcccccttccctcccccttttttttgttttccgttcccctttcccctcccttccctatccccgacgaccggatcctgaggaggcagctgcggtggcagctgctgagttctcggtgaaggtatttcatttctcctgtcccctcccctccccaccccatctattaatattattcttttgaagattcttcgttgtcaagccgccaaagtggagagtgcgattgcagaagggggtgcttctcgtttcagtgcttcttcgggcggaggaggaagtaggggtgcacctcagcactatcccaagactgctggcaacagcgagttcctggggaaaaccccagggcaaaacgctcagaaatggattcctgcacgaagcactagacgagatgacaactccgcagcaaacaactccgcaaacgaaaaagaacgacatgatgcaatcttcaggaaagtaagaggcatactaaataagcttactcctgaaaagtttgacaagctatgccttgagctcctcaatgtgggtgtagagtctaaactcatccttaaaggggtcatactgctgattgtggacaaagccctagaagagccaaagtatagctcactgtatgctcagctatgtctgcgattggcagaagatgcaccaaactttgatggcccagcagcagagggtcaaccaggacagaagcaaagcaccacattcagacgcctcctaatttccaaattacaagatgaatttgaaaaccgaactagaaatgttgatgtctatgataagcgtgaaaatcccctcctccccgaggaggaggaacagagagccattgctaagatcaagatgttgggaaacatcaaattcattggagagcttggcaagcttgatcttattcacgaatctatccttcataagtgcatcaaaacacttttggaaaagaagaagagagtccaactcaaagatatgggagaggatttggagtgcctctgtcagataatgaggacagtgggacctagattagaccatgaacgagccaagtccttaatggatcagtactttgcccgaatgtgctccttgatgttaagtaaggaattgccagcaaggattcgtttcctgctgcaggataccgtagagttgcgagaacaccattgggttcctcgcaaggcttttcttgacaatggaccaaagacgatcaatcaaattcgtcaagatgcagtaaaagatctaggggtgtttattcctgctcctatggctcaagggatgagaagtgacttctttctggagggaccgttcatgccacccaggatgaaaatggatagggacccacttggaggacttgctgatatgtttggacaaatgccaggtagcggaattggtactggtccaggagttatccaggatagattttcacccaccatgggacgtcatcgttcaaatcaactcttcaatggccatgggggacacatcatgcctcccacacaatcgcagtttggagagatgggaggcaagtttatgaaaagccagattagcctgaggcctgctcagtcgttcctaatgaataaaaatcaagtgccaaagcttcagccccagataactatgattcctcctagtgcacaaccaccacgcactcaaacaccacctctgggacagacacctcagcttggtctcaaaactaatccaccgcttatccaggaaaagcctgccaagaccagcaaaaagccaccaccgtcaaaggaagaactccttaaactaactgaaactgttgtgactgaatatctaaatagtggaaatgcaaatgaggctgtcaatggtgtaagagaaatgagggctcctaaacactttcttcctgagatgttaagcaaagtaatcatcctgtcactagatagaagcgatgaagataaagaaaaagcaagttctttgatcagtttactcaaacaggaagggatagccacaagtgacaacttcatgcaggctttcctgaatgtattggaccagtgtcccaaactggaggttgacatccctttggtgaaatcctatttagcacagtttgcagctcgtgccatcatttcagagctggtgagcatttcagaactagctcaaccactagaaagtggcacccattttcctctcttcctactttgtcttcagcagttagctaaattacaagatcgagaatggttaacagaactttttcaacaaagcaaggtcaatatgcagaaaatgctcccagaaattgatcagaataaggaccgcatgttggagattttggaaggaaagggactgagtttcttattcccactcctcaaattggagaaggaactgttgaagcaaataaagttggatccatcccctcaaaccatatataaatggattaaagataacatctctcccaaacttcatgtagataaaggatttgtgaacatcttaatgactagcttcttacagtacatttctagtgaagtaaacccccccagcgatgaaacagattcatcctctgctccttccaaagaacagttagagcaggaaaaacaactactactatctttcaagccagtaatgcagaaatttcttcatgatcacgttgatctacaagtcagtgccctgtatgctctccaggtgcactgctataacagcaacttcccaaaaggcatgttacttcgcttttttgtgcacttctatgacatggaaattattgaagaagaagctttcttggcttggaaagaagatataacccaagagtttccgggaaaaggcaaggctttgttccaggtgaatcagtggctaacctggttagaaactgctgaagaagaagaatcagaggaagaagctgactaaagaaccagccaaagccttaaattgtgcaaaacatactgttgctatgatgtaactgcatttgacctaaccactgcgaaaattcattccgctgtaatgttttcacaatatttaaagcagaagcacgtcagttaggatttccttctgcataaggtttttttgtagtgtaatgtcttaatcatagtctaccatcaaatattttaggagtatctttaatgtttagatagtatattagcagcatgcaataattacatcataagttctcaagcagaggcagtctattgcaaggaccttctttgctgccagttatcataggctgttttaagttagaaaactgaatagcaacactgaatactgtagaaatgcactttgctcagtaatacttgagttgttgcaatatttgattatccatttggttgttacagaaaaattcttaactgtaattgatggttgttgccgtaatagtatattgcctgtatttctacctctagtaatgggctttatgtgctagattttaatatccttgagcctgggcaagtgcacaagtctttttaaaagaaacatggtttacttgcacaaaactgatcagttttgagagatcgttaatgcccttgaagtggtttttgtgggtgtgaaacaaatggtgagaatttgaattggtccctcctattatagtattgaaattaagtctacttaatttatcaagtcatgttcatgccctgattttatatacttgtatctatcaataaacattgtgatacttgatgtagtga

SEQ ID NO: 198 - DNA, 3990 bp, Homo sapiens
cttgcccggcgcgacctgatgatgccgagcccaggccggttccggcgaagttaaaccctcggagctggcctcggactgctggggcgttaccccttcggccacccccgctgaccatggcagtgtttcatgacgaggtggaaatcgaggacttccaatatgacgaggactcggagacgtatttctatccctgcccatgtggagataacttctccatcaccaaggatcagtttgtgtgtggagaaacagtcccagccccttcagccaacaaagaattagttaaatgctgaagaagccttcaggaatccaaatcctgaacatttggaatgagcccagatagaaatatcgaatgcaaagctactggcttcacagagacaaccatttatgatttgctgttctgtaagagtgtggattctttctatcaactgctgatatcatcttcaggaagcaagtccataacatgacatatctggattttgtgcttagaaccttaaattggaagcattcttaattatgcatctaaatttaaaagaagataatttcaaaacagtgctttctttcccttggtttcatcattttcatatcttaaaccaaattacttcggtatctgacaacagcatcatctacctcagtcattaggatttcttaataaaaaagagattgtatttttgacttggttattaagattattaaaattagcccttcctttgaaatatgacatcagctttgctgttctaaatttaaaattagttgcttcatcagtaccacacttccagtttctataccaagccagtctcctcagttttcccattagaatggacatgttctgttcagcgtgtcatttctgtaatgcttcatgcagagagtttggtcatagtattaaagagaaaatacagtgaggtcacaatgtctccagagctaaaagttagtgaacaagaaagaaagtccaaaatgaagtgatgaaagaatgaggacttttcttatattctgcatattccttggaagtcaggacaagatgaaaagaaaaacatccaaaagaagtgaaattggtgacagaatgagaggagcaaagcataccagtgtagtaagtggaatgtttgaatgactttgccaggtcagagcaagtaatatttctgtatctgagtttttgtttgtgttttgataaggctaatgaaattgcattccaggtaggggttaacgtcaaatttccatggctggtagctgtgcttttggcatatcacagtgttgtgtcactactacaaggtaaagcatctacagcggagaatgagcttgaaaatgagagacctattgtgaataaatatgcccatgagagcatatttaataagcctctataacatgcagccaaaccagacattcactcctgcagagaaatgttgccctggagaaaaagaaatatataaagataggctatcacccttcttttgctgcagtactaagcatagcaagaaattagaatcatttacattggaaatttgaaaattccctttatatacacaactttactgtgtataaataaaaaatatttattaatgcagtgatgtccgtcaggttgttttaggaatggcttctgcaattagaaaaatagcttgctagaatgtaaatgttctgttactggtaaatgtactgcacacattcattggacgttaaaacaagtgagtagccttttttacctgccagcagcatggctgtgtgcagccactaggctgagacaataaattaccaaaaattataatgtaccgagctgaaaatgctcagtacattatgtggcatattctggatgtgatgagaaatctcattgccatttgggacactgacatcccagaagtaatccacaactgctttgcaaaagcaaagtgactgctcagatgaacagagcagagtactcactcactatggtggcatcagctgcaaagcaaaatgaactgtcccatgatcatgttgatggttttctagatactgccaacatgttagctctttctgatgctgatgagtttcaaacacgaacagacacccttgatgtgggtttgctaagaacatagaagaacaggaagaaaagttgccaggttcacacatcccaggaaaaaagaagcataaaaagcattagcagtcagtgactgatgataatgctgcaataatgggaatggttttgtttctaaaccaaattatttctaaatcaaatcatttattgctttgtttctaaagcaattgagtcactaagtttgtgaactgtaggagaacacatcaagattgaatcctgtgttaagcagaaggtaaaaccagagccaggcgcagtggctcgtgcctgtaatcccagctactcaggaagctaaggcaggaggatcatgtgaggccaggagttcaagactagcctgggcaacatagaaagaccctgtctctaaaaaatcttcttttaattagcaaggtgtggggccttgagcaaattgcttgggcccaggagtttgaggctgtggtgagctgtgatcacaccactgcgttccagcctgtgtgacagggcaagacctcatgcctaaaaaataaagagaaagcagagtaaaactggactctgagatacgactaaagttctgtgtgatacgtgtgccttatttagctcaagacattcctggagcacctataaaaactgacttgtaatccaggctatgtctctttttagcttcgtaatctttggcaaggccattggattcttcagctgtacaattaggagactcgatcaggtgattgcctttctcagctgtcagttctctaatttcaggcttggtagcttgtaggaactgaaattgcaattaaaacctttataaactcaaactaaatcatgaattacagaaaaagtccattcttccaaaacttgatgttaccacacttacaagtttaaaatatgaagtcgactgtttaaaggattctgcatatattctagtgtgcacattcagaaacatttttcttggaaaaagtacccaacattttttataactgcacatattaatttattgccagaataaattgcattgcatgctaaataaagtcagataattcaaatccatttgcttttatgtagtttttcttctaaatgtcaacattttgaattaaaatgtttatgattttatatgaggtagaaatcttaactgctttggggtattgttaatagactttttgttatggacagtagtttttaaataaggaaattgccaatttctacagtttgggctctggatttctattgtttgggaaaaaaataactgagtcaagtggtagtaagacaaagttgacattcttagatgagtaactcagtttattacaaggaaagaaaactgattgtttaaggctgatgatcaattcttggagtggtttcagagcccagctctggtcagaagacaatttgaatcttagttcctccactgtgatctccgagaagttacttaataattatattctggtttgtgaaatctggatcatagtacctctttgacagggttgctgtgtgaacccattcattctgcaattagaaaaatagctgtcatgtgctatgcactaggcaaagaagtacctgtcacatgctaggcactaggggaagaagattcggtttctacatttggaaacttagtggaactagaagagacagaagcaagattacagatgagttagagcccccaaggaaacaaaccaggtgatgtgggagagagtaactgggtcaggtgactttttaagggagtctgagctctggcactttttctaagacctgaaggatgagaaggaaacagccttgtgaaaatgattaaatgagctagtatctataaaacatgacagctaatgcctgtcatgtgcaaaaaatggttaactattctaactccgaaaggaattaaacattgttttgcgctttctcctagtccatgttctgctgctgtaacaatacctgagactggataatttatcaagaataaaggttaatttggctcatga

SEQ ID NO: 199 - DNA, 3922 bp, Homo sapiens
atcagagcagctggcagcgcggcgggcagcgtttgccgagcgggcgctccgggtcgcacgcaagtccgcgcggggtccgggccacgcacgcggtttcatcgccatccccagccgggccacgcgcgcaggcagacaagctgttcgcggcgaccggagagcgccgacaccatgtggatccaggttcggaccatggacgggaggcagacccacacggtggactcgctgtccaggctgaccaaggtggaggagctgaggcggaagatccaggagctgttccacgtggagccaggcctgcagaggctgttctacaggggcaaacagatggaggacggccataccctcttcgactacgaggtccgcctgaatgacaccatccagctcctggtccgccagagcctcgtgctcccccacagcaccaaggagcgggactccgagctctccgacaccgactccggctgctgcctgggccagagtgagtcagacaagtcctccacccacggtgaggcggccgccgagactgacagcaggccagccgatgaggacatgtgggatgagacggaattggggctgtacaaggtcaatgagtacgtcgatgctcgggacacgaacatgggggcgtggtttgaggcgcaggtggtcagggtgacgcggaaggccccctcccgggacgagccctgcagctccacgtccaggccggcgctggaggaggacgtcatttaccacgtgaaatacgacgactacccggagaacggcgtggtccagatgaactccagggacgtccgagcgcgcgcccgcaccatcatcaagtggcaggacctggaggtgggccaggtggtcatgctcaactacaaccccgacaaccccaaggagcggggcttctggtacgacgcggagatctccaggaagcgcgagaccaggacggcgcgggaactctacgccaacgtggtgctgggggatgattctctgaacgactgtcggatcatcttcgtggacgaagtcttcaagattgagcggccgggtgaagggagccccatggttgacaaccccatgagacggaagagcgggccgtcctgcaagcactgcaaggacgacgtgaacagactctgccgggtctgcgcctgccacctgtgcgggggccggcaggaccccgacaagcagctcatgtgcgatgagtgcgacatggccttccacatctactgcctggacccgcccctcagcagtgttcccagcgaggacgagtggtactgccctgagtgccggaatgatgccagcgaggtggtactggcgggagagcggctgagagagagcaagaagaaggcgaagatggcctcggccacatcgtcctcacagcgggactggggcaagggcatggcctgtgtgggccgcaccaaggaatgtaccatcgtcccgtccaaccactacggacccatcccggggatccccgtgggcaccatgtggcggttccgagtccaggtcagcgagtcgggtgtccatcggccccacgtggctggcatacacggccggagcaacgacggagcgtactccctagtcctggcggggggctatgaggatgatgtggaccatgggaattttttcacatacacgggtagtggtggtcgagatctttccggcaacaagaggaccgcggaacagtcttgtgatcagaaactcaccaacaccaacagggcgctggctctcaactgctttgctcccatcaatgaccaagaaggggccgaggccaaggactggcggtcggggaagccggtcagggtggtgcgcaatgtcaagggtggcaagaatagcaagtacgcccccgctgagggcaaccgctacgatggcatctacaaggttgtgaaatactggcccgagaaggggaagtccgggtttctcgtgtggcgctaccttctgcggagggacgatgatgagcctggcccttggacgaaggaggggaaggaccggatcaagaagctggggctgaccatgcagtatccagaaggctacctggaagccctggccaaccgagagcgagagaaggagaacagcaagagggaggaggaggagcagcaggaggggggcttcgcgtcccccaggacgggcaagggcaagtggaagcggaagtcggcaggaggtggcccgagcagggccgggtccccgcgccggacatccaagaaaaccaaggtggagccctacagtctcacggcccagcagagcagcctcatcagagaggacaagagcaacgccaagctgtggaatgaggtcctggcgtcactcaaggaccggccggcgagcggcagcccgttccagttgttcctgagtaaagtggaggagacgttccagtgtatctgctgtcaggagctggtgttccggcccatcacgaccgtgtgccagcacaacgtgtgcaaggactgcctggacagatcctttcgggcacaggtgttcagctgccctgcctgccgctacgacctgggccgcagctatgccatgcaggtgaaccagcctctgcagaccgtcctcaaccagctcttccccggctacggcaatggccggtgatctccaagcacttctcgacaggcgttttgctgaaaacgtgtcggagggctcgttcatcggcactgattttgttcttagtgggcttaacttaaacaggtagtgtttcctccgttccctaaaaaggtttgtcttcctttttttttttatttttatttttcaaatctatacattttcaggaatttatgtattctggctaaaagttggacttctcagtattgtgtttagttctttgaaaacataaaagcctgcaatttctcgacaaaacaacacaagattttttaaagatggaatcagaaactacgtggtgtggaggctgttgatgtttctggtgtcaagttctcagaagttgctgccaccaactctttaagaaggcgacaggatcagtccttctctcgggttctggcccccaaggtcagagcaagcatcttcctgacagcattttgtcatctaaagtccagtgacatggttccccgtggtggcccgtggcagcccgtggcatggcgtggctcagctgtctgttgaagttgttgcaaggaaaagaggaaacatctcgggcctagttcaaacctttgcctcaaagccatcccccaccagactgcttagcgtctgagatccgcgtgaaaagtcctctgcccacgagagcagggagttggggccacgcagaaatggcctcaaggggactctgctccacgtggggccaggcgtgtgactgacgctgtccgacgaaggcggccacggacggacgccagcacacgaagtcacgtgcaagtgcctttgattcgttccttctttctaaagacgacagtctttgttgttagcactgaattattgaaaatgtcaaccagattctagaaactgcggtcatccagttcttcctgacaccggatgggtgcttgggaaccgtttgagccttatagatcatttacattcaatttttttaactcagcaagtgagaacttacaagagggtttttttaaaatttttttttctcttaatgaacacattttctaaatgaattttttttgtagttactgtatatgtaccaagaaagatataacgttagggtttggttgtttttgtttttgtattttttttcttttgaaagggtttgttaatttttctaattttaccaaagtttgcagcctatacctcaataaaacagggatattttaaatcacatacctgcagacaaactggagcaatgttatttttaaagggtttttttcacctccttattcttagattattaatgtattagggaagaatgagacaattttgtgtaggctttttctaaagtccagtactttgtccagattttagattctcagaataaatgtttttcacagatagaaaaaaaaaaaaaaaaaaaaaa

SEQ ID NO: 200 - DNA, 3682 bp, Homo sapiens
gcgagcgcagcggagcctggagagaaggcgctgggctgcgagggcgcgagggcgcgagggcagggggcaaccggaccccgcccgcacccatggcgcccgtcgccgtctgggccgcgctggccgtcggactggagctctgggctgcggcgcacgccttgcccgcccaggtggcatttacaccctacgccccggagcccgggagcacatgccggctcagagaatactatgaccagacagctcagatgtgctgcagcaaatgctcgccgggccaacatgcaaaagtcttctgtaccaagacctcggacaccgtgtgtgactcctgtgaggacagcacatacacccagctctggaactgggttcccgagtgcttgagctgtggctcccgctgtagctctgaccaggtggaaactcaagcctgcactcgggaacagaaccgcatctgcacctgcaggcccggctggtactgcgcgctgagcaagcaggaggggtgccggctgtgcgcgccgctgcgcaagtgccgcccgggcttcggcgtggccagaccaggaactgaaacatcagacgtggtgtgcaagccctgtgccccggggacgttctccaacacgacttcatccacggatatttgcaggccccaccagatctgtaacgtggtggccatccctgggaatgcaagcatggatgcagtctgcacgtccacgtcccccacccggagtatggccccaggggcagtacacttaccccagccagtgtccacacgatcccaacacacgcagccaactccagaacccagcactgctccaagcacctccttcctgctcccaatgggccccagccccccagctgaagggagcactggcgacttcgctcttccagttggactgattgtgggtgtgacagccttgggtctactaataataggagtggtgaactgtgtcatcatgacccaggtgaaaaagaagcccttgtgcctgcagagagaagccaaggtgcctcacttgcctgccgataaggcccggggtacacagggccccgagcagcagcacctgctgatcacagcgccgagctccagcagcagctccctggagagctcggccagtgcgttggacagaagggcgcccactcggaaccagccacaggcaccaggcgtggaggccagtggggccggggaggcccgggccagcaccgggagctcagattcttcccctggtggccatgggacccaggtcaatgtcacctgcatcgtgaacgtctgtagcagctctgaccacagctcacagtgctcctcccaagccagctccacaatgggagacacagattccagcccctcggagtccccgaaggacgagcaggtccccttctccaaggaggaatgtgcctttcggtcacagctggagacgccagagaccctgctggggagcaccgaagagaagcccctgccccttggagtgcctgatgctgggatgaagcccagttaaccaggccggtgtgggctgtgtcgtagccaaggtgggctgagccctggcaggatgaccctgcgaaggggccctggtccttccaggcccccaccactaggactctgaggctctttctgggccaagttcctctagtgccctccacagccgcagcctccctctgacctgcaggccaagagcagaggcagcgagttgtggaaagcctctgctgccatggcgtgtccctctcggaaggctggctgggcatggacgttcggggcatgctggggcaagtccctgactctctgtgacctgccccgcccagctgcacctgccagcctggcttctggagcccttgggttttttgtttgtttgtttgtttgtttgtttgtttctccccctgggctctgccccagctctggcttccagaaaaccccagcatccttttctgcagaggggctttctggagaggagggatgctgcctgagtcacccatgaagacaggacagtgcttcagcctgaggctgagactgcgggatggtcctggggctctgtgcagggaggaggtggcagccctgtagggaacggggtccttcaagttagctcaggaggcttggaaagcatcacctcaggccaggtgcagtggctcacgcctatgatcccagcactttgggaggctgaggcgggtggatcacctgaggttaggagttcgagaccagcctggccaacatggtaaaaccccatctctactaaaaatacagaaattagccgggcgtggtggcgggcacctatagtcccagctactcagaagcctgaggctgggaaatcgtttgaacccgggaagcggaggttgcagggagccgagatcacgccactgcactccagcctgggcgacagagcgagagtctgtctcaaaagaaaaaaaaaagcaccgcctccaaatgccaacttgtccttttgtaccatggtgtgaaagtcagatgcccagagggcccaggcaggccaccatattcagtgctgtggcctgggcaagataacgcacttctaactagaaatctgccaattttttaaaaaagtaagtaccactcaggccaacaagccaacgacaaagccaaactctgccagccacatccaaccccccacctgccatttgcaccctccgccttcactccggtgtgcctgcagccccgcgcctccttccttgctgtcctaggccacaccatctcctttcagggaatttcaggaactagagatgactgagtcctcgtagccatctctctactcctacctcagcctagaccctcctcctcccccagaggggtgggttcctcttccccactccccaccttcaattcctgggccccaaacgggctgccctgccactttggtacatggccagtgtgatcccaagtgccagtcttgtgtctgcgtctgtgttgcgtgtcgtgggtgtgtgtagccaaggtcggtaagttgaatggcctgccttgaagccactgaagctgggattcctccccattagagtcagccttccccctcccagggccagggccctgcagaggggaaaccagtgtagccttgcccggattctgggaggaagcaggttgaggggctcctggaaaggctcagtctcaggagcatggggataaaggagaaggcatgaaattgtctagcagagcaggggcagggtgataaattgttgataaattccactggacttgagcttggcagctgaactattggagggtgggagagcccagccattaccatggagacaagaagggttttccaccctggaatcaagatgtcagactggctggctgcagtgacgtgcacctgtactcaggaggctgaggggaggatcactggagcccaggagtttgaggctgcagcgagctatgatcgcgccactacactccagcctgagcaacagagtgagaccctgtctcttaaagaaaaaaaaagtcagactgctgggactggccaggtttctgcccacattggacccacatgaggacatgatggagcgcacctgccccctggtggacagtcctgggagaacctcaggcttccttggcatcacagggcagagccgggaagcgatgaatttggagactctgtggggccttggttcccttgtgtgtgtgtgttgatcccaagacaatgaaagtttgcactgtatgctggacggcattcctgcttatcaataaacctgtttgttttaaaaaaaa

SEQ ID NO: 201 - DNA, 5131 bp, Homo sapiens
cctttaaactttgttttttaaacttcgggggtgtggtcgcggcgcctcccctctcggcggctggcagtccttgcctctgccccgccttccagatgctttggagtcatgagccgggagggcgcgggggcagctttggtagccgaggtgatcaaagatcgcctttgttttgccattctctacagcagaccaaagagtgcatcaaatgtacattatttcagcatagataatgaacttgaatatgagaacttctacgcagattttggaccactcaatctggcaatggtttacagatattgttgcaagatcaataagaaattaaagtccattacaatgttaaggaagaaaattgttcattttactggctctgatcagagaaaacaagcaaatgctgccttccttgttggatgctacatggttatatatttggggagaaccccagaagaagcatatagaatattaatctttggagagacatcctatattcctttcagagatgctgcctatggaagttgcaatttctacattacacttcttgactgttttcatgcagtaaagaaggcaatgcagtatggcttccttaatttcaactcatttaaccttgatgaatatgaacactatgaaaaagcagaaaatggagatttaaattggataataccagaccgatttattgccttctgtggacctcattcaagagccagacttgaaagtggttaccaccaacattctcctgagacttatattcaatattttaagaatcacaatgttactaccattattcgtctgaataaaaggatgtatgatgccaaacgctttacggatgctggcttcgatcaccatgatcttttctttgcggatggcagcacccctactgatgccattgtcaaagaattcctagatatctgtgaaaatgctgagggtgccattgcagtacattgcaaagctggccttggtcgcacgggcactctgatagcctgctacatcatgaagcattacaggatgacagcagccgagaccattgcgtgggtcaggatctgcagacctggctcggtgattgggcctcagcagcagtttttggtgatgaagcaaaccaacctctggctggaaggggactattttcgtcagaagttaaaggggcaggagaatggacaacacagagcagccttctccaaacttctctctggcgttgatgacatttccataaatggggtcgagaatcaagatcagcaagaacccgaaccgtacagtgatgatgacgaaatcaatggagtgacacaaggtgatagacttcgggccttgaaaagcagaagacaatccaaaacaaacgctattcctctcacagtaattcttcaatccagtgttcagagctgtaaaacatctgaacctaacatttctggcagtgcaggcattactaaaagaaccaccagatctgcttcaaggaaaagcagtgttaaaagtctctccatttcaaggactaaaacagtcttgcgttaagtaaaaacctgtgaccagagctgaaggaagactctaggactgaaaactgcaacagaaattagcacaatttgaaaacaaaacaaaattgcaaaagccttagttgctttttccacctaagaagttgatcaatggagaaaatgtccactggagtttgaataatgaactttgagtttgggtgcaagcaaatgactcagagaagggtccagctctcaagctgaatgacaaacatgctgttgtaaatttagtctcaggtgtaaatacccaagccctctggtacccagggagctggctggtctgtggtgcatgtgtgtccctgtgatggcaatcattgtagttgctggccttcagaagaattgaggatctgatggaggttttttatgtatttattttctgttcaccttgtgaccctgtgtcaaaatttataaagatacaaaaggcattactgaaatggtactttctgtaatttgatactatttggcttaatcatcttcacttgactatttgtaatactgttgtaatgttaactctgttaagtacccaagctgcttgtcttccaccaaagagtgctttattaacaagaatctgtgaaaatcacatttaaacactgttgcatgttgtaagaccaggtggtaccttagtaacctaaaacttgcaagagaatattaatggtagctttagaagactcaggaggagaaactgacttcagagttggaagatgttgcaagtcgttcctttttctgtccttcagggactgaagaactgggaggctgcccattgtttggttgccagtcatacaaattaaaatcatatttccttccatgaatggaagaaacacactattggtttttccccttggaaacagcaatcccaaataatgtcggcttacaaaaaaaaaaagttaccacttttttagagtccttccctgtaacattggattttttttttcccttatgagatccacctaaggccattgacgtggcctgcgatctcagtgacaatgatctgcttctggatctcactgttgcctttggttagggaacacaactagtaactctgcagagtgccttctcccgcagccctactggaacacagcagagtctgtgccatgaagcagttacagaaacagaattgatgtgctgctaaaaaaaaaaaaaaaaatggggcccgaaataaaagaatatatagtactcacctcagttccttccataagaagtgggtggtttaatgattgttaagccatttttgcctgtgccgggagcatggagggctgagatgtcgacaggcagtgggaaacaaatgccctcctaagccacaaggcgtgcgccagattagtaggcaactccattttaagaagctgcctttttcacaaaactggaagaaataaaagcggttggaataaacaagttaaaagtctttaatgcaaaaagtaattgaaaggcagtgcctccattttggtgtactttcttggaagaaagtataaaattgaccggcatcatgagagacggaagatgccgtgttctcagccaaacaagcaactctttccccgccaggcactgtcgggtggggtcaggccagcttttaaacactggggactggatcacagaaaaacagtggttttctgtccctggaaatgaataggcacaaagacccacttggctgtgggcagactactcttcaataagatttgggtgggaggaggaacattccttttgctattttgagctgagacaatataaatattcaaactgtgccatgcataaagcattgaattctcagggcacctcttcttccccttaccccttttaaggccatcccctccattaataataatccaggtagttgtgaaaatcgtgcttctatctgatcccttcttagtttggcttttcatcccatcagaacaagtaaacgtaggcgccacagctcttgtgagtactgtctccctcacggtgaatgagcctcctggtgtttcgtccaagaaaagaaagggtgtcactggaaccacagccctttttcattttataaactgcctcttcatgttgcctgctcaagtttccacctagaattgctatcactgtggctctttctaaaaatctttctatttaactggttcactgaaattagtcatagaaaacttgtgatttggtgaagaggcattccttgtaataaccaaatgacttgggatggtgtgcatagcaagggcagtgttacacttatgaggactgtctctagcatccaggaagtctctgggtctgagggatggaaagttcttcctgctatgaatgagagtggactcttcccctcacccccaactgaaaccacaaacaaccagaatcttctggaattctgacttagagtcgttgttatagaagaccttgttgctatggaacatgaaactgtgtgtcagatggagagatccccttaacctaagagccttaaatagccctgaaagtacactgggacggtttgcgatggaattaaaattggaagtgaatatttttaggtgctcttgaagctttctggggactcaaaattatcaaaagtcagggacagtccggaggaagagcgtctgcaaaactgggttcctagaagtatagacggacttagctttttgtagaatttggtgaggagcagcgcctcgtgagagcagaatggcctggcgtggccagtgcttcccggcagcacgcagctctgcggcctccagaattcccctgttctgagcttgatgcccctagcctgtcccctacctacttcctcccctcctctctagccctctcacaggggtgattgctacctctctgttttcttgggcctaggcaagttttagaggagttcccaagcattgttatgaggccagtgtgctcgctgggctgggcgggatggcctgggcttgtgtgtggcctgagggctctcctggggccttctcttttcccagtcacctttggagccacagaagcagtgcactcattggatgtctgttcttaacacagcttctctttctacattaaaaaaaatcattattgcattttggaaagcagtgctcatcaaaagcaacttttaaaacctattttattgttcctttaaatgttctctcccgctgaaactgccctggagaggctatctgctgctcttccatttacccacatcaggttattctccatgtcactcagtggagatgactccagatgtgtttaaagactggacaattcacctatactgtgtaggaaattacctccttaattacctggtagaattgtcagcagacatgttcatccgatgatagtactgcagttttctattaataatttgcagacttttatctaacctgcactcatgtacagattattaaaagttttaaaatgtaactgatcagtattgatcaatcattgtcttgatttttttttacagcgtatatttctaatcatattttttaaagccaagagaactggttgaatgaatgtttattttcctgaaggtatttttaagataaagcttcctaatggcgtgtaaactttgcatatgtatgtagtttgatacatattgtcacatttgaaaatcttgtgggttgtaactggttttatacaaaatatcgaatagtggaaattgtataattacaatcatgtaattaaaagtattaacccaa

SEQ ID NO: 202 - DNA, 3910 bp, Homo sapiens
gttgtgtctccgccccccgtgcttattggccagcctggctgcgggtgacagtgagtggcagacacccggcctagcgccgcgggtcgcgccgagccgagccgagccgagcggagccggcggagcctctggaatcacccgggtcgctgttcctgagcagctgcagagcatcgagggctggagaggagcacatactgtccatggagctggtggtcaaggtggacagggggcggtggtgatggcgcagtttgacactgaataccagcgcctagaggcctcctatagtgattcacccccaggggaggaggacctgttggtgcacgtcgccgaggggagcaagtcaccttggcaccatattgaaaaccttgacctcttcttctctcgagtttataatctgcaccagaagaatggcttcacatgtatgctcatcggggagatctttgagctcatgcagttcctctttgtggttgccttcactaccttcctggtcagctgcgtggactatgacatcctatttgccaacaagatggtgaaccacagtcttcaccctactgaacccgtcaaggtcactctgccagacgcctttttgcctgctcaagtctgtagtgccaggattcaggaaaatggctcccttatcaccatcctggtcattgctggtgtcttctggatccaccggcttatcaagttcatctataacatttgctgctactgggagatccactccttctacctgcacgctctgcgcatccctatgtctgcccttccgtattgcacgtggcaagaagtgcaggcccggatcgtgcagacgcagaaggagcaccagatctgcatccacaaacgtgagctgacagaactggacatctaccaccgcatcctccgtttccagaactacatggtggcactggttaacaaatccctcctgcctctgcgcttccgcctgcctggcctcggggaagctgtcttcttcacccgtggtctcaagtacaactttgagctgatcctcttctggggacctggctctctgtttctcaatgaatggagcctcaaggccgagtacaaacgtggggggcaacggctagagctggcccagcgcctcagcaaccgcatcctgtggattggcatcgctaacttcctgctgtgccccctcatcctcatatggcaaatcctctatgccttcttcagctatgctgaggtgctgaagcgggagccgggggccctgggagcacgctgctggtcactctatggccgctgctacctccgccacttcaacgagctggagcacgagctgcagtcccgcctcaaccgtggctacaagcccgcctccaagtacatgaattgcttcttgtcacctcttttgacactgctggccaagaatggagccttcttcgctggctccatcctggctgtgcttattgccctcaccatttatgacgaagatgtgttggctgtggaacatgtgctgaccaccgtcacactcctgggggtcaccgtgaccgtgtgcaggtcctttatcccggaccagcacatggtgttctgccctgagcagctgctccgcgtgatcctcgctcacatccactacatgcctgaccactggcagggtaatgcccaccgctcgcagacccgggacgagtttgcccagctcttccagtacaaggcagtgttcattttggaagagttgctgagccccattgtcacacccctcatcctcatcttctgcctgcgcccacgggccctggagattatagacttcttccgaaacttcaccgtggaggtcgttggtgtgggagatacctgctcctttgctcagatggatgttcgccagcatggtcatccccagtggctatctgctgggcagacagaggcctcagtgtaccagcaagctgaggatggaaagacagagttgtcactcatgcactttgccatcaccaaccctggctggcagccaccacgtgagagcacagccttcctaggcttcctcaaggagcaggttcagcgggatggagcagctgctagcctcgcccaagggggtctgctccctgaaaatgccctctttacgtctatccagtccttacaatctgagtctgagcccctgagccttatcgcaaatgtggtagctggctcatcctgccggggccctccactgcccagagacctgcagggctccaggcacagggctgaagtcgcctctgccctgcgctccttctccccgctgcaacccgggcaggcgcccacaggccgggctcacagcaccatgacaggctctggggtggatgccaggacagccagctccgggagcagcgtgtgggaaggacagctgcagagcctggtgctgtcagaatatgcatccacagagatgagcctgcatgccctctatatgcaccagctccacaagcagcaggcccaggctgaacctgagcggcatgtatggcaccgccgggagagtgatgagagtggagaaagcgcccctgatgaagggggagagggcgcccgggccccccagtctatccctcgctctgctagctatccctgtgcagcaccccggcctggagctcctgagaccactgccctgcatgggggcttccagaggcgctacggtggcatcacagatcctggcacagtgcccagggttccctctcatttctctcggctgcctcttggagggtgggcagaagatgggcagtcggcatcaaggcaccctgagcccgtgcccgaagagggctcggaggatgagctaccccctcaggtgcacaaggtatagacaaggctgagcagggttcctgtggcccaggatggaggccaccgctgccctgccatcccgtctgcctgccatgggacggctcctctgagtgttccctggccccacgtgtgtggtgtttgtgtgtctgtgcctggccaagggaggtgccaacactgggcttgccacagccccaggagaggaatttggggcctaggaaccgagggcacacgggactctagcctcatccccaggacccccttggctcagagtgtggtgctagaaactggcccccagcccagccccagtactgccacctttacacctacccctgcaagtccccagagggctgcccacgatagaagctgccaagcagggagaacctgtgccaactgtggagtggggaggttgggcctggaccctcaacccctgcaaccttccctagccccctcaatagatgagcaggtcaggctgtggcccttacctcacccgcagttctcgcccagtgctgcagccggctcacctctctccgcttcttgcacatcactggcctgtgtgtgctgcttgctcctgttctgttcgcttgctcccgttccgttcggcttttgctttgcgttagggtgaagaccctagcgtccagctcccctcaacgctatattttgacactaaaaaagaaggtttctaaattgtaggagcaggatggaaatactttgctgcccttgccatcttttaggatgggcccccaggagactgaggtcttcctgggccctcattgctgcttatcgtaccccccatcacctgcacatgggacagaccgggctggagggtgaccttggctgtgtgcgtcccagcaaaagagctctggcccgcatctcgctgtgccctgaagggggatgaagggcgatgcctcgcccgaggctttgggctgctgcactgcatgctgggactgctcctactctctgtcccacccctcacccagctgtggtccggctttgggagagtggtgaattgcgctgcccgaactcggagcggagcagggtagggaccgtgtacagcttgataacccttaataaaaagggagtttgaccagaaaaaaaaaaaaaaaaaaaaaaaaaaaaaaaaaaaaaaaaaaaaaaaaaaaaaaaaaaaaaaaaaaaaaaaaaaaaaaaaaaaaaaaaa

SEQ ID NO: 203 - DNA, 6782 bp, Homo sapiens
gggagcaggggagttgtgaaatgggcggctagatctgcccggcgctgtgaattcgccagcgggagcgcgctcgcggccgcgcgttctccgctttcccggctccgtcgctgacgcgtcgtagacgttggggagcgggaaggcaacggcagcgggatcgggatgaacagcggcggcggcttcggtttgggcttaggcttcggcctcacccccacgtcggtgattcaggtgacgaatctgtcgtcggcggtgaccagcgagcagatgcggacgcttttttccttcctaggagaaatcgaggagctgcggctctaccccccggacaacgcacctcttgctttttcctccaaagtatgttatgttaagtttcgtgatccatcaagtgttggcgtggcccagcatctaactaacacggtttttattgacagagctctgatagttgttccttgtgcagaaggtaaaatcccagaggaatccaaagccctctctttattggctcctgctccaaccatgacaagtctgatgcctggtgcaggattgcttccaataccgaccccaaatcctttgactactcttggtgtttcacttagcagtttgggagctataccagcagcagcactagaccccaacattgcaacacttggagagataccacagccaccacttatgggaaacgtggatccttccaaaatagatgaaattaggagaacggtttatgttggaaatctgaattcccagacaacgacagctgatcaactacttgaattttttaaacaagttggagaagtgaagtttgtgcggatggcaggtgatgagactcagccaactcggtttgcttttgtggaatttgcagaccaaaattctgtaccaagggcccttgcttttaatggagttatgtttggagacaggccactgaaaataaatcactccaacaatgcaatagtaaaaccccctgagatgacacctcaggctgcagctaaggagttagaagaagtaatgaagcgagtacgagaagctcagtcatttatctcagcagctattgaaccagagtctggaaagagcaatgaaagaaaaggcggtcgatctcgttcccatactcgctcaaaatccaggtctagctcaaaatcccattctagaaggaaaagatcacaatcaaaacacaggagtagatcccataatagatcacgttcaagacagaaagacagacgtagatctaagagcccacataaaaaacgctctaaatcaagggagagacggaagtcaaggagtcgttcgcattcacgggacaagagaaaagacactcgagaaaagatcaaggaaaaggaaagagtgaaagagaaagacagggaaaaggagagagagagggaaaaggaacgtgaaaaagaaaaggaacggggtaaaaacaaagaccgggacaaggaacgggaaaaggaccgggaaaaagacaaggaaaaggacagagagagagaacgggaaaaagagcatgagaaggatcgagacaaagagaaggaaaaggaacaggacaaagaaaaggaacgagaaaaagacagatccaaagagatagatgaaaaaagaaagaaggataaaaaatccagaacaccacccaggagttacaatgcatcgcgaagatctcgtagttccagcagggaaaggcgtaggaggaggagcaggagttcttccagatcgccaagaacatcaaaaaccataaaaaggaaatcttctagatctccgtcccccaggagcagaaataagaaggataaaaagagagaaaaagaaagggaccacatcagtgaaagaagagagagagaacgttcaacgtctatgagaaagagttctaatgatagagatgggaaggagaagttggagaagaacagtacttcacttaaagagaaagagcacaataaagaaccagattcaagtgtgagcaaagaagtagatgacaaggatgcaccaaggactgaggaaaacaaaatacagcacaatgggaattgtcagctgaatgaagaaaacctctctaccaaaacagaagcagtataggaccgacaagtgtacctctgcactcaatgctggaatcaaatccaaagcttttaattctctcaacaagatgtaaacaggaaagaaatctagttgagcatgaagataggatctaacagcttttccagttgttagatgactttgtggccatcttgttattgagtaagaaaataaagcatggacatcatgaaaataacagatgttacccaaactcatcttctaaaatctgtgcatttccatggtggctgacacacttgtcatgtggtctgttagtgtttgccaagaaccattgcaaataaattgaacatcaaagatccaagtttgtactatccctaaagactggagataagcattggaggctcttttaaaaaatgctagttactgaattttgtattgttttacttttttttttatttcaatatatacagtttgatgatgtgcttgaaattggtgcaaatatatacacacccttgtaagtgcaaagtatgtaagaagttttaacatttacttcacaggacttgtgattgtgttaaattctcactattgtgttttcttttgctcactgtttaggacaatttttctttaaaatagttttgcagattaaaattgcttaaataagtggattaaaaaactgacaatgcatgctactgttctctttcaaaaggaagagcaaccgtgttgaatactaataatgatgaattagtattcagtgtttagaatcattgggactacccacaaagtgagcatttctttttaaattttcttgacatttccaagcttattatgaataatattgcagtgtgtcttgtcagctgtaggtggcaaaggtgcccttataaaaaaggaaactggcttttcaaaatgggctatgggagcacaagctgaagctttagtgccttctacaatgtggtatactgttttctagaattttatatgtgctagtcattctcaattcatatggaatctagatggatatttcatgcatacccatagagaagtgtgtaagtgatatgtcagaagagcttcttactgatttcacctaaaatgagaaggaagtcctgttttcaagaatgacattagagtcatgcagctttgggaccatcagttttatactgtgataattgaaaatgaaacatgttcttattttccttaaattgaagaaaaccctttagttgtctacattggatggccttattacctctcaatcatcttttcataaatgatgtgcagaaattgtacttaaggacttaggagtatatgggaggttattggttttatgtttaaggatacgtttacttgagtttaagatacaggtcatccatcattcttaggctcactttttacagaaagtatgcaaatagtaaagtgacagcactgctaatgtttttccccagtactataacttgtggtttctgaactcattattgttgtatttccaaaaaagtaataccttttaattagtgtattaaaagttaagtataattattttaatgcaatctaatacaatcagattactcagttgccttacctcatgggaagagttacttttttagatctaaaaagctgaatagcatgttagttacttggtttcaacttgagttttcttttaatgttaataagattgaaactttagtatttagtggggaatggaaagagttgcccttgttgcaagtaatgaagcctgatttgattatgaagctgcttaatcactcttcatgtgttcagaattactgttttttttgtttgtttttcctttttgtcactgtgtacattaaaattttggaagatgctttactatgtaaagtatagatggtcattttaatcattcagccacatacggttggctggtaaacagcttattctgatacaagaatgcttgggtgcatatggaaagattgtgaaagagtgtgtcttgcatcaacagctgtcttatttatgatatataagtagaaatagagcaaatgttggaatctgttatttttagtaccatgtctttaataaagctaagtattttagaggaaaatgtttgtttatgcatttcaaaaaagcattttagttttatcctgctcattttagttgtcatagagattgttgtgacgtggagagtgcatgtttgtgtggtgtctataaaacaagtcatttaaagtatgagtgttttcttgtactctggacctattacatgtttctttatgttggtaattaacatttaatttggttcttgctgctaattattttctctgctgatatttattaagctttaaaataatcgtactataatcttgaaacactgatttgtaaaaactaagaatgagtaggaatacaagagatctggaggaacaaatcagattgttattagggtttgactttttttttacatgggcttatggaagcaaggcattctagggtctagagggatgtgtgtgtgtgcttgtgtgtccatgtgtgcgcatgcgcacgtgtgtatctgtttgagacatactttctctgttcacttaaaagagctcatgttttcatttgtttattcttttctttcagggtattttgtttttttctttaagacttctttttttaaatcccaggtagatgttgtcagataaacttgaggtaaggccaagaagacagacattttatgcttcatactttctgtaattatcttttgtagcttgattacatagagtaccctctcttccttaagttgtagttgctatttatcattgtagacaaattctgttgcctttcagcaacgtatgctgaactagtatcataagatggtgcatcagttcataagctagtgcataagttttgtgtcaaaacttttaaatcctgaagttctgcagttatcatcttagttattttctatctaattagcttataattgcaaacactagtcagcttgtgatctctgtgtttcaagttcttttcttcacgaggttcagtacctgctatgttgatctttggcagtgccagaggcttaaattttgacctgctcaattaaaaataaacactggcgtttataatgaaaaggtttttttgtcgggggggggggggtcaagagaatttattttgtgatagtaataattttcaagaccttcagtcattcctatgtctatgttgctatctttattttaaaacttagaaccctgatctaactcccttctcaagtgaagatactgtgtagattcaagaattataatgtagagtaataggcctttaagtttttttttaatctgttagaaataaagagcatgatttaattattgttgaattaacaattaaaatgaatccctttggagggatggcattgaataacttataatttcagtgaatcatttacgttttcattggaagacagtatctgatttcaactggtgcgttacgaagtagagccattcccacaaagtaaatgtgcagtgcccatgtttcttgtgtttaaatattttttattttcactacatatatattattttctcatgtttatttactaatgtaattttcacttaaaattagatgtttattttcaaattttaaaagctagtgctcttaaaagagctaaattatatttctggaagcaggagtttagtataaatgtaataaaattttaaaataaaattgacttccctacttaatcttgggtttgtgggtgagtttgtttttagtacactcttattggtggttttgcctgaagagtaatacattattattattacttttctttttgagacagggtctcactctgtcactcaggctggagtgcagtgacacgatcatggctcactgcaatcttgacctttctcggcatggatgatcctctcacctcagcctcttgaatagctgggaccacagacatgtgccaccaagcccagttaattttagaattttttttgtagagacaggatcttgccatgttgcctagactggtctcaaactcctgggctcaaacaatctgtctgcctcagccttctaaagtgctgagattacaggtgtgaggtactgcacctggcaatacgttattttaaaagtaaacgctaagccatttatgactttggttatattcagtcagttggatttagtaactaataactagctttcttccattctaaggtacttttatagtttctagcaattagtttgttacaattagcttatatcagatataacagttcttaatataatgtttataaaaggttttaagtctgttgcctgatttttaaatttatatctagttaacattttaattttaaaattgccaacttttgggagatttcacatattttacctctatattttatttttccaggattggtatggaggagtagtaccttctattcttggtttatttttatttgctagacataatttcttaactacatatgtaagtataaattcataaaaatcacactgaaagaataggttgatttcaaccattttgagggtactggtaggtaacacactgttggggaataaactaaagaatttctgatttctacaatagatttaagtatgaaatttgagtatactgtgtagctgtgtagatcaacttaatgcttaaaaaattacctccttaatgattagattaatagaacagtgttagattatcaagggaagagtttggaatgtaaacataaacatgctgcataggtggtggttatttgtgagtaggactacttttaaatggtactagtaaagatttatcaaacaatgctgctattatgttgctatatttttaataaaatgaaaatcttaaaatcttg

SEQ ID NO: 204 - DNA, 9512 bp, Homo sapiens
aaccctgctcctcgctgaagatggaggaagtaaaaacaggattacccttagctacagatccactgccttagtttccaccaccaactgcagtgcacaaacacacgttaggcacaggaaagaaagaaagacagaggacacattaacagtaaacacaaacaaaagggtgatgggattattttactgcatgcactgctgagcccgacattgtcacctcctctttgaggggttagaagaagctgagatctcccgacagagctggaaatggtgatgaatcttttttaatcaaaggacaatttcttttcattgcactttgactatggaaacagaggctattgatggctatataacgtgtgacaatgagctttcacccgaaagggagcactccaatatggcaattgacctcacctcaagcacacccaatggacagcatgcctcaccaagtcacatgacaagcacaaattcagtaaagctagaaatgcagagtgatgaagagtgtgacaggaaacccctgagccgtgaagatgagatcaggggccatgatgagggtagcagcctagaagaacccctaattgagagcagcgaggtggctgacaacaggaaagtccaggagcttcaaggcgagggaggaatccggcttccgaatggtgaacgccccttccactgtaaccagtgtggagcttcttttactcagaagggcaaccttctgagacacataaagttacactctggagagaagccgttcaaatgtcctttctgtagctacgcctgtagaagaagggacgccctcacaggacacctcaggacccattctgtgggtaaacctcacaagtgcaactactgtggacgaagctacaagcagcgcagttcactggaggagcacaaggaacgctgccacaactatctccagaatgtcagcatggaggctgctgggcaggtcatgagtcaccatgtacctcctatggaagattgtaaggaacaagagcctattatggacaacaatatttctctggtgccttttgagagacctgctgtcatagagaagctcacggggaatatgggaaaacgtaaaagctccactccacaaaagtttgtgggggaaaagctcatgcgattcagctacccagatattcactttgatatgaacttaacatatgagaaggaggctgagctgatgcagtctcatatgatggaccaagccatcaacaatgcaatcacctaccttggagctgaggcccttcaccctctgatgcagcacccgccaagcacaatcgctgaagtggccccagttataagctcagcttattctcaggtctatcatccaaataggatagaaagacccattagcagggaaactgctgatagtcatgaaaacaacatggatggccccatctctctcatcagaccaaagagtcgaccccaggaaagagaggcctctcccagcaatagctgcctggattccactgactcagaaagcagccatgatgaccaccagtcctaccaaggacaccctgccttaaatcccaagaggaaacaaagcccagcttacatgaaggaggatgtcaaagctttggatactaccaaggctcctaagggctctctgaaggacatctacaaggtcttcaatggagaaggagaacagattagggccttcaagtgtgagcactgccgagtccttttcctagaccatgtcatgtacaccattcacatgggttgccatggctaccgggacccactggaatgcaacatctgtggctacagaagccaggaccgttatgagttttcatcacacattgttcgaggggagcacacattccactaggccttttcattccaaaggggacccctatgaagtaaagaactgcacatgaagaaatactgcacttacaatcccacctttcctcaaatgttgacataccttttattttttttaatattattactgttgataattcttattttgtggaggcagtgtcatttgctctgcctaattacgataaggaagaaacagaagagagaaggggcgggaatattgtttctttatcacctggcttgtttattttgtgggaatttaagagcagtccatttctaccaaggcatatcatgctttgaaaaatcacttgattcataaagattcacctaagagattctgatttgccactgatattcagaattatgatggaagacaggaaagttcagagttttctgggtaggactttggtggtttaaaaatggtataagtaactttattcttgaaagaagaatgtgtttcaaactgtaaaccaattttttgttcttcagagatcatggaacacaaacacattgttattttcagtgataactcctaagaggagctgagttgttgtgggttctatgtttacttcccctatggaatttataattcagtatgttttacactgtaccatatagcaaaacttttaaactacaggtagttaagggccacctacaatacatctgaggtcctgtgatcttatttttctaaacgtaagcactgtttttccatagttttgatgactggcattttatagacaccctggcagccttacttttaacacctttaaggaatagtatttttatgtagttttcagaataacatatggtctaagagtggataaaaggcagtcaataatttctgggagggacttctactttcataaatttgtttgagaggttttcttttaaagttgtaatgtgatggcagcatagtatatgtatttgtttctaaaagtatgcttacgattgtcactttatcagcatttaatcagtgttaaccagtcagcagaaaaatataattatgctaacagtagggggagaaaacccacttagaaatcccttttctggtatttctcttttcactagtttttttcaagatgtgacctcccggtgttctgtccatagttcattcatcctttactcttcgagtagaaggtcttaaaagtcttcctgtcggctgtttctttcaaaatctcctcagagcaattgctaatttggcctgaatctggtaacttgaaccctgtaaggttacagaactagggctatttattttagcatttcttcagtagtatttactactcttgttgcaaagaaaagggaatgggacttctttgtaacctgtaccttggacaacagataaaagaaacaaaaaaataagaaagtttacttttacccttcttggagtctagaatgtgacagaacccccaaaggaaagtcctgcacatttttctgtttccaaaacatttaattgtgtaagtccttgtcagaaatgaatctcaatcccttagtatagaattccccttacatggtataggttgccatatttcatgtgcagattttaatttcatttatgtgggcgctctgttttttctttgcagtccagccacattagaggggaggaaccgagtgatattgattcaagtcattttagggggacatacttggaaggcagaacttgctgcttctgtttggggaggacagacctgactgtgactggattatctgataaccatttgtgaatactgaaattctgttaggcagtaactgataactgctctaaaggatcattaaataggatgctgaaattatgtatcttaatacagtgtggtatgagaattaccaagtcaagagaattgtggacataagcaagtttggccccaatactgctcttaactcattttccagcttactatttgctatttaaatggtaggcaccagctaagcacttctaagcactaacacagctagaactaggcaaaaatggttagaactcagctctcttctactagtccctgtcataattatttttgggaaaatgtccaaactgccccctttaaatctaagggaatgcaccaaaacagagatatatagaatgtcaaccatttcatttttttttttctgcatgccttggtacatagtgaacatacaacctatttaaagataaagcatgtttttgagactcgctcacccccccccacccaaccactcccaaataataattgggatgccattttttttccttttggatgaggtaaataattttaaggttcacaattttgtcttttactgcaatttaaggaaacatttggatgtcagtcaatatgttcataattttggctgtgtgcgaatttctgctggcattatctatgaattttcttcctacttatttttttttcagtatatgaacaatcatgtatctacctgccccaggatgaaactaaatttaggtggaccctaaaccttatgaagacagtgctgaggcactttccttttctgatttcatctttttgggaatctgttttattgaaggtagttagtagttgagagtgcatttgctacaagcatatacttgtatcttcctagcttcatgaggaacagaaagaggtggatatggctcagggtgtggcagggacaattgaggacaaagtcaattcaaatttgtgggtcagaaagaatttttgtggacgtagtgtttttggagaaactctggatggttatatgtgcatgccttttcttcaaaaggaaatacgcaaggttgtagcatctaaaaataaacataagagtcagacaccaaataaatcaagttttacataacagttgtatgcccagtttgtttaggtgagatttcacattacagaaagtatttgaggagcatgaaaatgggttatcttctgtattttccagtttggcaaaagttcagaatttcatcacattgctttgccctaattttgcccagaattttatcttagcctctctctgacagtgatgaatcatgctcaaaagccattctaattggacctttttaagacagggaaagggatcagtaggcggattggaagaaatttcaagtcattgaaatattccattgagatttcctaaagggacaaaattgggaaaataagaaactacgacttagatttggctacgtagtagaaagtatctcccctacatacatacaggcaattgtatgtatgaatcatagggtatatgtgtgtgtatactacacacacattcttttaaagagaattcatggaaaaaaaagcagttggagtgatcagatgtattgcaaaaacatacagagaatttaaatgacagttaataccaagaaattagttgggtttactttatcaggtcgtaataggaatcactaaagaagttactagtgtgtctttaggaccagtggcaactcttaaactaaaactttgggtccttattatctacttacagaacaaagtgaaacaaacaatgattaagctgattggatatacattcaaagatatttaatgtaaagttttttggaatacgaagaaaattcagaaaataaatattatcaacagttacttattggcaaatagagaaagacaagaatagtttagtgagcccggtattttgtttttatagtttttatctcagttgtacaactcacaaaaccatgaagtctttggtattttataaatgtttaacaaaatttacatcagattaaggcatttagatgaaaattattatgttctcactatcttccaaattttatttcatcctatctccaaaatgatttcttagggtacaaaaagagcagacggggctgtaaaaatacaagcaaaaaactgtgtgcccctagtttcaggcagaacttaaactgtcagaggtactagctacatgatttgttttttaactttggattgttcacgtccaaaaatggataaattacatttgtgtttatcatcagttgcattttatgtattattttaataaatactatctgaatgaagactattctaaaccagaaaattccccaaatccaaaagaaaaaaaaagtgggaagaggtgaaattgaagtttgtgtatatgaaagttatcttagacatatttttaattctccagtttctgcaaaataattaaaatatacagtaactggtctcctaaatcctgaatttaatgtattaaatacttatgttctttatattggtgcctttttaaaatgcattgagagtgttggttagctgttgcagctgtacaacacttttaatatgcatttttaaaaatcacttaaaattgagtactatataattcatctctgcatttttagtgcaaatctttagagcaatttctaatagagaaattttcagctcagctgttaaaaggaaaaggaaactttgaaactagactttactacctttttagtttcatagtatttctgaatatgattacaagattatgcaggtaaaatatagagtgaaactttacctgtgaattgaattataatttgtgtttttgttttgtttttaaggaagaataagttctgtatcaaacaagaatttattagataattttttggtcaataaaatacagtattcatttggattttcatctccagactagtattgttctagtcttggaatctgtattttctaatctgttagaaaatagagattgaaaattgatggaataatgtgaaaaagcaggtaattaattctccttgaacaaagcaaaactgaacagtcatatcacattgctattctccaaagcataatctcaaatggtttcatatcatggttgtgtattacttgcaatgggtgtgttaggatatgacagctttttaaaaaaatgagctgctggttatacaaagcaaatggcatatgaccaagaagctgtgatatgctagtgtttctttttatcatagtgtattactaggccaaataatgacaccttgaatatttttacatttattgcagaaaccttaaactttggaatttccataaggtttttatgtaatattctatttctagctttttagttttatcttgctgtactgtaagtttgaggatatttttcacctgcactcttaggaataagttcataattctgtttatggggctttcctcccataacactgcatttgtatattttctgtataaaatatgtgttgtgtattaacctttatcccatacagagagtggtacatgaatgactagttttctaagatgtcctttttattgtgaataaaatataaaagttaaaggccctctgctaagtcacataaagtacagcatataagttcatataggtacaaataaatgagtttgcagtgaattgggccttcaaattacctcaagtgacagatagtaagaaaagcttcttgagcaggtggaggtcactgaatcccctactatgcacttaccaagattttacttactttaatttactggaaattgattttttaaaaaatgactacactgtaacaagggaagggatctgggtttttttgttgttttattcttgttttttttaagtagttcaaattctgaaactgtgatttaaaaattttttacagtcaagcattctgattttgaacataactcccttccctttctgtgtaacaaaggtctctctgttatctcttaaattttgttacatctccctcagcctctttctttgtccgtctcccttctgtcattgtctatggatgtttacctctctgttctcctaaaagtttgaagattaggtcaactcttatttctagttcattggtaatttaatcttaatttttttttcgtgatttttgttggttgtataatctgctgacgtatttttatactcaagtgtagttttctattaaaaagaaaagtggttggattaaaaatagtaagctatgtaaccctcatgttactttcactttcaaatattgggtacctaaaacattacttcagagattatgtaatcctattatagtatgtttgctttcctttattgttggattttacattctgatttggctttcctccaaaaaatgtatatcatgaaagactagacagttatttgcaagtgtttagaaaggtgttaaaaatgtaaagcaaagagtcttaactttctcctaattgggagaaaaatgctttaacattactataataatattccaggtttggagggggtctccaggccccatatttgctgttaatagttggaccttttagaccatgtgttatttgcaatcccagaatgattgcttctgctattagttaaaaagatactattcttttctttctgtacaagtgcaatactccccttgaagtcttaaaaactatggtgatttttttttcttttctgacctattcttcctttagctaatgacaaaaagaaactcataaaagtcatagtatgttaaaggacacaacaagcaaagagaaaaacactccacaatcaaaagattacagaatgtggaaaccactagtctgatctcatggtatctttatttaagctaaatttccatggaaattagtaatcttttgcttgaaaaatgtgtcctaaagttgaactttttacagattgaatcttcttagaccctcgcccaatgctctaaattaagaacctaatacttaatatttttattttacttctccccttttagaaataaacttttaaataaaagcaaagcacttagctgagttttaaacacttacatatcacctattggagaaattttttttaaaaatatttggagcagtcctgttttcatacaaatttaagtaagaggtatttttcttatacatatttatatgtagtgtgctaattttctttttttatacctgtgtccctgtagtaaaactgctgtaatataaatacatgttttgttaaaagataacatttctttggcatttcttttaaaggcagttactgcatttctgcatttgtacagtatgtgtcttggccattttagatattctttctttaacaataccaaaggtaattagactattttaaagactaattgcttgacagtttctagggtattttgtgttttagaagcaaaaaaagaaaaaaaaataggtcaaaccagtaaacctcattttttttcaaactaataatttggggaaataaaaactattgtttaaaaaagaaatatatatatatatatataaatatatatgtaaagttaaaattccataccttgtatgtcaggtttgctaagtgtaatgtagtttttttaaggctcaaataccatacctcagaaaatgaggtttactatggaaatactgaaacagtctttgcagctgtgtgacaagtcactctactacatactgatttggagacctccgctaaatagttttatcactgcagactaaaatgtgggacttgtatcttctttgtttttaatgcacacacatacatgttctgtgcatgtatgtggttactgtgtatatgtgtatgagtgttgtatatgcatgtgtgagtgtgtgtctgtatgtgtgtacaactaaagaagctgcagaaactttgtaatactttgtgaaaaggattatattataaaggtttgtactgtctgagtgcacagctactggaataaatttagggaatctcaggaacaagcatataatttgtccaagatttatttcttctcagaagtgtaagtgcagtttttaattctgtatattatttaatattttaccaataaaataaacttctgacataaaaagtttgctataaaaaaaaaaaaaaaaaaaaaa

SEQ ID NO: 205 - DNA, 3110 bp, Homo sapiens
agccggctgatgtcactggcagcgggaagcatcagcagcctgatcacatgctggcccagtctgtaatgcagacgggataggggtgtgtgtgtgaggggagggggcctgtatggcaactgctcttgccccagcgtccccaaaagtgcagaggcagcggctgcagcatccagccagcttggatgtctggcctacttccaggactctgaagaaacagttacaagcaggatgcttttcccaacctctgcgcaagaatcttcccgtggcctcccagatgcaaatgacttgtgccttggcctgcagtccctcagtctgacaggctgggaccgaccctggagcacccaggactcagattcctcagcccagagcagcacacactcggtactgagcatgctccataacccactgggaaatgtcctaggaaaaccccccttgagcttcctgcctctggatccccttgggtctgacttggtggacaagtttccagcaccctcagttagaggatcacgcctggacacccggcccatcctggactctcgatctagcagcccctctgactcagacaccagtggcttcagctctggatcagatcatctctcagatttgatttcaagccttcgcatttctccacctctgcccttcctgtctctgtcagggggtggtcccagagaccctttaaagatgggggtagggtctcggatggaccaagagcaagctgctcttgctgcagtcactccctccccaaccagtgcttcaaagagatggccaggagcttctgtgtggccatcctgggacctcctcgaagctcccaaagaccccttcagcatagagagagaggccaggctgcaccgacaagctgcagctgtgaatgaagccacctgtacctggagtggccagcttcctccccggaactataagaaccccatctactcttgcaaggtgtttctaggaggtgttccttgggatattacagaagctggattagttaacaccttccgtgtttttggctctttgagtgtggagtggcctggtaaggatggcaagcatccccggtgtcctcccaaaggtaatatgcctaaagggtatgtgtatctggtcttcgaactagagaagtctgtccgatccttgcttcaggcttgctctcatgacccgctgagcccagatggcctgagtgaatattatttcaagatgtccagccgaaggatgcgctgcaaggaggtgcaggtgatcccctgggtattagccgacagtaactttgtccggagcccatctcagaggcttgaccccagcaggacggtgtttgtcggtgctctgcatggaatgctaaatgctgaggccctggcagccatcttgaacgacctatttggtggagtggtgtatgccgggattgacacagataagcacaagtatcccattggttctggtcgtgtgactttcaataaccaacggagttacctgaaagcagtcagcgctgcttttgtggagatcaaaaccaccaagttcacaaagaaggttcagattgacccctacctagaagattctctgtgtcatatctgcagttctcagcctggtcctttcttctgtcgagatcaggtctgcttcaaatacttctgccggagctgctggcactggcggcacagcatggagggcctgcgccaccacagccccctgatgcggaaccagaagaaccgagattccagctagaggagctggccttgcccagtggcctgtggcgcccaaagctggcaggtcaggcaagcagcctgcaccaccctgccactggcgaccagggagctggcttcccaaggacaagggaaaattgtagtcacctttgcacttgctgaatctgtctttgtttctgcactaattaatgcacattgagttttgtcaggttttgttttcagggggtgtaccaagggcaaggaccctctggcttaccctccaagcgactctgtagttttcccagattttagttcctcattttgcagatgaaaagcggggaaaaaaaaaaaaaaaaaaaaaactacgtgtccagaaggtattgaggtattgacacggatgcctacacctaggtttatttattaaaagcgcttttttacattccttgcaatactgatggtgatgatgcgcaggtctcattggtttcattcttgcagttgccatacagtgcctttccatttatttaacccccacctgaacggcataaactgagtgttcagctggtgttttttactgtaaacaataaggagactttgctcttcatttaaaccaaaatcatatttcatattttacgctcgagggtttttaccggttcctttttacactccttaaaacagtttttaagtcgtttggaacaagatattttttctttcctggcagcttttaacattatagcaaatttgtgtctgggggactgctggtcactgtttctcacagttgcaaatcaaggcatttgcaaccaagaaaaaaaaaattttttgttttatttgaaactggaccggataaacggtgtttgagcggctgctgtatatagttttaaatggtttattgcacctccttaagttgcacttatgtgggggggtggggttgatagaagtttttaatcacaaagtcacaggacttttttcttttgtaactgagctaaaaagggctgcttttcggtgggggcagatgaaggctcacaggagccctttctcttagagggggcaagtacccttcccttatatctttaatttgaggaatgtatgagataacagttgcagttgactgaaatgccactggaatttgaaaacttgacttttttttctttcctttttttttttttttttttttttaaaaagaaacaaaaaacccacaaaaactacttgcccctcctagggaagctgtgtgccaaagaaccagtgtcataacccctccctcctgctgagctgacgttgcattgttgcatatcccagctactctgtgggttttgtgaagctgtgtgtgaagtctctacctcattgtagtatatgcaggcaagactgcactctcctacagatgtgtggagtaagctgtggtgtagtttttttggcacataataaacacgttgcagcagaaaaaaaaaaaaaaaaaaa

SEQ ID NO: 206 - DNA, 6303 bp, Homo sapiens
ctcccggctccgtagtaagcatggcggcggcggcgttcgtggtccctcgggtgaaacagaaagcgggagctacgcggagagggagcgaagagcggggctgaggcggcggcgtcactgccaggaaacaaccccaacagtcagcgcgccggcggccgcggcggccctgagagctgactctgcagctgaggtagagagacaacgatcaggaaccctaagaagaggcgccagaggagccgccttctgcctcagaacggcgtgactcggagaattggagcgttattcagtatattaatgtcttattgataatggcagaacatccaccactactggatacaactcagatcttaagtagtgatatttctcttttgtctgcccctattgtaagtgcagatggaacacaacaggttattctggtacaagttaacccaggagaagcatttacaataagaagagaagatggacagtttcagtgcattacaggtcctgctcaggttccaatgatgtccccaaatggttctgtgcctcctatctatgtgcctcctggatatgccccacaggttattgaagacaatggtgttcgaagagttgtcgtggtccctcaggcaccagagtttcaccctggtagtcacacagttctccaccgttctccacatcctcctctacctggtttcattcctgtcccaactatgatgccgcctccaccacgtcatatgtactcacccgtgactggagctggagacatgacaacacagtatatgccacagtatcagtcttcacaagtctatggagatgtagatgctcactctacacatggaaggtccaactttagagatgaacgatctagtaaaacatatgaacgtttgcagaaaaaattgaaggatcgccaaggaacacagaaagataaaatgagcagtccaccatcatcaccccagaaatgcccttctcccattaatgaacataatggacttataaaaggacaaattgctggtggtataaacacaggatcagcaaaaatcaagtctgggaaggggaaaggtggtacacaagttgatacagaaattgaagaaaaagatgaagaaactaaagcatttgaagcacttctttccaacattgtcaaaccagtggcctccgacatccaggcaaggacagtagtacttacctggtcaccaccttccagcctcattaatggtgaaacagatgaaagtagtgtaccagagctctatggttatgaagttctgatctcaagtactggaaaagatgggaaatacaaaagtgtatatgtaggagaagaaacaaatatcactttaaatgatctcaagccagccatggattaccatgcaaaagtccaggcagaatataattctataaagggaactccttcagaggctgaaatctttaccaccttgagctgtgaacctgatatacctaatccaccaaggatagccaatcggaccaaaaattcactcactttgcaatggaaggcacctagtgacaatggttctaaaatccaaaactttgtattagaatgggatgaaggaaaaggaaatggagaattttgtcagtgttacatgggctcacagaaacaatttaaaattactaaactttcaccagcaatgggctgtaaattcagactatcggccagaaatgactatggtacaagtggttttagtgaagaagtcttatattacacctcaggctgtgctccttctatgccagcaagtcctgtattaaccaaggctggaattacttggttatccttacaatggagtaagccctcaggaacaccatcagatgaaggaatttcttacattttagagatggaggaagaaacttcaggatatggttttaagcctaaatatgatggagaagatcttgcttacacagtgaaaaatctcagacgtagtactaagtataaatttaaggttattgcttacaactcagaaggtaaaagtaatccaagtgaagtagtagaatttactacttgccctgataaaccaggcatacctgtaaagccttcagtgaaaggaaagatacattcacacagttttaaaataacctgggatccaccaaaagacaatggcggagcaaccatcaataaatatgtagtggagatggcagaaggttctaacggaaacaaatgggaaatgatatacagtggtgctaccagggaacatctttgtgatcgactgaatccaggctgtttctatcgtttacgagtttactgcatcagtgatggaggacagagtgcggtctctgaatctttacttgtgcagactccagctgtgcctcctggcccatgcctccctcccagattacagggtagacccaaagcaaaagaaatacagttacgatggggaccccctctggttgatggtggatcacccatttcctgttacagtgtggaaatgtctcctatagaaaaagatgaacctagagaagtttaccaaggttctgaagtagaatgtacagtgagcagccttcttcctggaaagacatacagcttcagactacgtgcagctaacaaaatggggtttggaccattttcagaaaaatgtgatattactacagcccctgggccaccagatcagtgcaagccccctcaagtgacatgtagatctgcaacttgtgcacaagtgaattgggaggttcctttgagtaatggaacagatgtcactgaatatcgactggagtggggaggagttgaaggaagtatgcagatatgttactgtgggcctggtctcagttatgaaataaaaggactttcaccagcaactacctattattgcagggtccaggctctgagtgttgtgggtgcaggccctttcagtgaagtagtagcctgtgtgactccaccatcagttcctggcattgtgacctgtcttcaagaaataagcgatgatgagatagaaaatccccattattcaccttctacatgccttgcaataagctgggaaaagccttgtgatcatggttcggaaatccttgcctacagcatagactttggagataaacaatccctaacagtgggaaaggttacaagctatattatcaacaatttgcaaccagatacaacatacagaatacgaattcaagccttgaatagccttggagctggtcctttcagccatatgataaaattaaaaactaagcctctccctcctgatccacctcgtctggaatgtgttgcctttagccaccagaaccttaagctgaaatggggagaaggaactccaaagacattgtcaaccgattctattcagtaccaccttcagatggaggataagaatggacggtttgtatccctatacagaggaccatgtcatacatacaaagtacaaagacttaatgagtcaacatcctataaattctgtattcaagcttgtaatgaagctggggaaggtcccctctcccaagaatatattttcactactccaaaatctgtcccagctgccttgaaagcccccaaaatagagaaagtaaatgatcacatttgtgaaattacatgggagtgtttacagccaatgaaaggtgatccagttatttacagtcttcaagttatgttgggaaaagattcagaattcaaacagatttacaagggtcccgactcttccttccggtattccagccttcagctgaactgtgaatatcgcttccgtgtatgtgccattcgccagtgccaagactctctgggacaccaggacctcgtaggtccctacagcaccacagtgctcttcatctctcagaggactgaaccaccagccagcaccaacagagacactgtggaaagcacaaggacccgacgggcactgagtgacgagcagtgtgctgccgtcatccttgtgctgtttgctttcttttccattttgattgcctttatcattcagtactttgtaatcaagtgaaaatataactttattttttaactctattacattttattttgtcatgtactaaaattatttctgtattgcttttataaaaaacagtggcatttagcactggcattgagactatagcacatcatttttgccattttcagtgcttatattgttaggtagaggctggcactttattagaatgcaagccacaaaaatatcaattttgttttttttgttagggtgggtcttctttttttctttccctctctctttttttaacaaatgccttcttatagaaaaactttctaagaggcaacaatttagaatggatattttgacgaatcggcatgagtgtaacagtgataacctgatctgtttgttttaaagattattaccaagtgaaaaattcagaatgaatagaatttacactaacatgctatataaaatgttaaagtctgatgctgtgaaagcaatctagtgctatatttctacctcctcatttgtcttaattatttggtaagtgggattatgatgagtaactggaggggcttagaaacaaaaactggatgaaagagtatgcatgaagaaaagcttctttgataaatgtggagttcttcattataaatatatattcatgaattcacagataagtacttaaagaacagacagtttacttggcctaaaaatattttgatgtttactcaaaaagtacctcttcaggtcttgagaacatggaaaagaattgagtgcttttaaatactttttagaaagtaatcataaaagtaaattgaatttcaaacctatttggcttctgttttgtgaacctttgaactatatgtatgtgtataagggtatacacatacatatatggcatataacaagtgtacacatatacacataacaagtgtagaagtatatattacatacatacactcactctgtctggtataggctaattttgaagaactcccataagtttctgctgcttctcccataactgctgccaccaccatcagaattcataatcaaacctaacctttttgtttggggcaccaaatctgaagacaaaattaatttgcaccagtaaacttcaagctgctttctttcttgaaaactaaacgtttaacgtataatgtctgtttggatactgttccaaattgttgattgcatgtggttaatgttgcattagagcactttgcaattgcataattcattaatgttttgtgagcttgcatttgtgagttattggatgatcagactgaattttgtcaagtatcacattgtacatcttgcctagatgtcgatgactgcaagtaataatacagtttataatgaaactatctacaattcttgttttagcacatctgttatccgtaaaacacctgtaactagcttttttaatttattatttgaattttaggatagcgaatcactaatttttagttgctgaggttggcattttagtgattattaagcacttctgtcagtctttgaaaaaagaacgtattttttgtgctttgaagatctctgaagaatttcttttataatagaatgggcatgtattgtaacagttttatgtcaaatgatctgtgctgtagaaaaacattaacccttgttcaaaaaagaaatggataaacttggcctttctaagtggtaagaatgacctgtcactataatatactgtatgtttacattttatttaaatttaatctcttatgtatagggtgataaccttccccagaaacaacagtgattgcgattgttttctagaaacttctttaaagtgccacatttggcagtacaaatgagtctgagtgtaatagcccagagatttatatatagttgaatgtctaaaatggtaaaatgtgccactgtgtcaagttacagtggcttatgtttttcatagtaattcaaatgaacttcctatttttgatagtaaatgtcatttaatagtatacttgccatttgagcctcactgcaaaattagtgcagaggagaaaacaatttttaatgtaatcttgattttacctcatatactgtacattccaaaaactctaaactttttaaagattatagatacactaccaaacatatcaccttaaaattgtataaggctgaatgaacttcatacaaatgaaaaaaatctcataaaaatacataaactatgtagcaaaagtatctgtaaaatccatggaaaataaaagttgtatcattctttttgagatacgtttattgtattcatatatattcattatttgctacctgtttaagaaagtgaaatgttatggtctcccctcttccaatgagcttaaaacatttttcccaacagtatataaatcttcaacatgagaggatgtatatttattatataaagcccagtaaagaataaaattagaagttttatcctaaaaaaaaaaaaaaaaaa

SEQ ID NO: 207 - DNA, 3318 bp, Homo sapiens
cgcgggcttgcgggcaggggctgcagggaggaggagaggacccgcgcccgcgggggctggcggaggcggggccgggcttccggacagaggccaatcgctgccctcggggcctccagcgccggctctgggccgaggcagccagagcgcggaagaggcctggaaatccacgcggattcccggagacggcgcctctgctctgcgggttcgtggcgaggaagtccacccactgctcccgggcgcaggtctgcaggtccgcgcccactgcccgcggcgccactgaccatgtcggtgactgatcaggcttttgtcacactagccaccaatgacatctactgccagggcgccctggtcctggggcagtcactgaggagacacaggctgacgaggaagctggtggtgttgatcactcctcaggtgtccagcctgctcagggtcatcctctcgaaggtgttcgatgaagtcattgaagtgaatctaatcgatagtgccgactacatccacctggcctttctgaagagacctgagctcgggctcaccctcaccaagcttcactgttggactctcactcactacagcaagtgtgtcttcctggatgcagacactctggtgctgtccaatgtcgatgagctgtttgacaggggagagttttctgcggccccggaccccggatggccggattgcttcaatagcggggtgtttgtcttccagccttctctccacacgcataaactcctgctacagcacgccatggaacacggcagctttgacggggcagaccaaggcttactgaatagtttcttcaggaactggtcgaccacagacatccacaagcacctgccgttcatctataacttgagtagtaacacgatgtacacttacagccctgccttcaagcaattcggttccagtgcaaaggtcgtccactttttggggtccatgaaaccttggaactacaagtacaatccacagagtggctcggtgttggagcaaggctcagcgtccagcagccagcaccaggcggcattccttcatctctggtggacggtctaccagaacaacgtgctgcccctttataaaagcgtccaagcgggggaagcacgcgcgtctcctggtcacacactttgccacagtgatgtgggggggccgtgtgcggattcagcctctggtgttggagagccgtgtgaaaattcaacacccagtgcgggcgtgccgtgtgcaaattcaccactgggttctaaccagcctgctcagggccttccggagccgacccagatagtggatgagaccctgtccctacctgaaggacgccgttcagaagatatgatagcttgtcctgaaactgagactcctgccgtgataacgtgtgacccactgtcccagccttcccctcagcctgcagacttcacagagactgaaaccatcttgcagccagcaaataaagtcgaaagtgtctcatccgaggaaaccttcgaaccaagccaggaactccctgctgaggctctcagggaccccagtctgcaggatgcactggaggtcgacctggccgtctctgtttcccagatctccatcgaagagaaggtgaaggaattgagccccgaggaagagaggaggaagtgggaggaaggccgtatcgactacatggggaaggacgcgtttgctcgcatccaggagaagctggaccggttcctgcagtaatccggcagctggtgggcgttgtgtgtagttagacaatgtcctgttgggtggtcctgttgcgtggagatctcctctggtcctttcaaagggaaacgctgttgaaccttgtgcctctatttatgcttaatccatttgagtgcctcacacaaaaaacgtagagtatagaaatccaccttaaagcccctcgccccaacttctccaccaacgccttctgggctttcttcagaggtcacttctacccttgaagctgtcggcaaaagcgagcagtaataacattctagtagactctcgatggtggtctccgctcttgcccgaaggacctctgaagtacgctggagctgtgttgtacaggtgctgtgagacctaccctattcagaattaaacctcactgcaaatttcctcccatcacgaagctaacaacactaatatacgtatttagcacctctgaggctttgccatggagacccatttctgtagggctaaggaaacatttagacgtggtgactgactttcatttggacttggcgaagtgtatctgagaaacacctcggctgtggtctctctgctttaaatcctaacaggacttcctagagcgttgacagaaattctactcgtggacgttgggaagaaagattgtaggtggcttggggaatgtgggtggcttagaggatctaaaccgattcacttcctggttgagaagcaacgagggcttgctctaaatcgtttagaggataacaggatctagagatgctctctgcttgacaacaaaagtcagggtgcagtcggtccacccttgactgctcttggcttggtctctaccctcactacctcagttctcaataacttagtgaatcactgccctcctcaaagccatttccactcagctctttccagagaattctcagttttatgagacgggaaactttatttcacgagaaagcctcattgtcagaagtatcttcattcaatgggcacaatatgctgtgtatctcaccaggtagctgtcaggggccaccgagagtgtcgttaaaaatgggcatggttgtaataaaggaggaaagtgcgacttttgaaatgtttggaaggtttatttctcatgcacattccagggaaaagcagagagtaaattagagacgggataggaaggccgtgggagaactcgatcctagcctgtgtcagctggatgtgtttacgtggagaggcgtggccactttttaggtcacctgaagcagtttagcctttggatagaggaacctgcctgaatttatggcattagtggtggcatttttttgtgtacaagatgtgggtgatggaggggctgtttctttttccgtgtgggtggttaataatcgtcagtctcggagggcgaggctcgtaggatatttcaggtgagtcagggttggatggtcatcggctttcagaaggagaccacgggaatgttcagggaaacaatgtcagcttctctgaggaccagaattcatgttcacgggcagtgatgagttggcttatggagtgagtccagtctggaattccgccgtgcattctagcctgtatcatctcatttggacaaatgctggcacgttgaaattaaaatgttaaaaaacagcaaaaaaaaaaaaaaaa

SEQ ID NO: 208 - DNA, 3115 bp, Homo sapiens
aaagcagtggtgttttaccactctgcagagaaagctaaggttgctaaccaaacaaaataactttacactgacaatgccaatttttacatttctttcagaacaagggacactcaaactaccagagaaacggaccaatggactgcgaagaactcctaaacaggtggatccaggtttaccaaagatgcaggtcattaggaactattctggaacaccacccccagctctgcatgaaggaccccctttacagctccaggccggggataccgttgaacttctgaaaggagatgcacacagtctgttttggcagggcagaaatttagcatctggagaggttggattttttccaagtgatgcagtcaagccttgcccatgtgtgcccaaaccagtagattattcttgccaaccctggtatgctggagcaatggaaagattgcaagcagagaccgaacttattaatagggtaaatagtacttaccttgtgaggcacaggaccaaagagtcaggagaatatgcaattagcattaagtacaataatgaagcaaagcacatcaagattttaacaagagatggcttttttcacattgcagaaaatagaaaatttaaaagtttaatggaacttgtggagtactacaagcatcattctctcaaggaagggttcagaaccttagatacaactctgcagtttccatacaaggagccagaacattcagctggacagaggggtaatagagcaggcaacagcttgttaagtccaaaagtgctgggcattgccatcgctcggtatgacttctgtgcaagagatatgagagagttgtccttgttgaaaggagatgtggtgaagatttacacaaagatgagtgcaaatggctggtggagaggagaagtaaatggcagggtgggctggtttccatccacatatgtggaagaggatgaataaattcaaatcccgtgttgcaccctgcaccaaaaatttcagagaagggataaatagaagcctgcacagcatcgtgaattaactgaagtgtttaaaaagctgcatttctggctgttcaacatcctccctccttagcccctcctaagtcttaatgctgagatttctaaagatgctggtactgacagattaatggcttgcctagagctgtgcaagaaacagcctgccagtctgtcattgtcagggaccagggcaaaaccaagagctgttcttcccagaagagccctgcaaacacattggttcgtgcttccctttacttcttctggtcagataccatgaatgccagtcatcagtaaatcttaatacacttttgctttattctcacatgccattcaccagattatttgatggtacaaagaagcagaagtgtaattttccttttcccagcatgacgaaaaattggagttctgccatttgagcagcttactggaaagatccagccttacttgtcttaaattgtccaacaaggtgactcattgcccggcaaacacttttaccctcagatgttactcatgatattataaaatatgaggccagtgctcaggtttgcatcataagtgagctatccctgaagggttttaattacttatttggtgtcctgattatatttgcaaacttctttataaaaggtgaaaaaagcacacaaaagagagggtgtcttcatattaaaccttcacaaccttcatgatttcataggattattttggaaatatagcacttgactttatgaaaggatctgggctaggtatattaagggtagttgccaataacctgaagaagctggcattgtttacagaaacagatcaagggctataatttatgtcattttatagcagcagtatctattaatacatgccttttcctcccatccacctcccccgcacacacacaaagatgacctgggacatgatttttttattcccacattttcttggagcacaaacaactttgttgaggattttggaaggaaagcacaactgggtcctttattcatttctgggacagaaagagggtcagtggacttttgtgggcctccagcttctctcagagtctccccctctgcagcccatcctgggagtgtattaactggagggaagatgggtcttgcagtacatttgttttgcccagccatcactcttttttgtgaggagcctaaatacattcttcctggggtccagagtccccattcaaggcagtcaagttaagacactaacttggccctttcctgatggaaatatttcctccatagcagaagttgtgttctgacaagactgagagagttacatgttgggaaaaaaaagaagcattaacttagtagaactgaaccaggagcattaagttctgaaattttgaatcatctctgaaatgaagcaggtgtagcctgccctctcatcaatccgtctgggtgccagaactcaaggttcagtggacacatccccctgttagagaccctcatgggctaggacttttcatctaggatagattcaagacctttacctcagaattatgtaaactgtgattgtgttttagaaaaattattatttgctaaaaccatttaagtctttgtatatgtgtaaatgatcacaaaaatgtattttataaaatgttctgtacaataaagttacacctcaaagtgtactcttggaatggattctttcctgtaaagtcttatctgcgactctgtctcgggaatgttttgtctgttgccgtcagccgaactttgttatggagggagcagcctcacacaagcagaaacactcctgtggatggtattgtagcatgtattgtttattttagtcaatagaccctctccttataaatggtgtttagtcttcctgttgcatttcatgggcctgggggtttcctagcagaggatattggagcccctttttgtgacattaccaattacatctttgtccacgtttaatactttgttttggaaaatttaaatgctgcagatttgtgtagagttctaataccaaagacagaagtaaatgttttccatatactttgtcttgcctgtatgcagccctcgtgtaatacggtgaattagagtggtatttcactttgtattattttgtaaatatgtcaatataataaatagtgactaaattgataaaaaaa

SEQ ID NO: 209 - DNA, 2645 bp, Homo sapiens
ttcattgggcatagatttcctctttgagaacatcaacctgatttttgagactttttgaaaaaattctttgtgaactacggagggtagaggtatcacacccaactatgaagatcagcatcctgctcatgttcctttggggattatcctgtgctctcccagtaaccaggtatcaaaataatgaatctgaggattctgaagaatggaagggtcatttggctcaggcaccaacaccacccttggcaaatgaagaccccagtgacagcactcagtcagaggagggcctgggctctgatgatcatcaatacatttataggctagctggtggcttctccaggagcacaggaaaaggaggagatgataaagatgacgatgaagatgacagtggagatgacacctttggtgacgatgacagtggcccagggcccaaagacagacaagaaggaggaaactccagactgggaagtgatgaggactctgatgacaccatacaagccagtgaagagagtgccccacaagggcaagacagtgcccaagataccaccagtgagagcagggaacttgacaatgaggaccgggtggacagcaagcctgagggaggtgactccactcaagagagtgagagtgaagagcactgggtgggaggtggcagtgatggggagagcagccatggagacggctccgagttggacgatgagggaatgcagagtgatgacccagagagcatcaggagtgaaaggggaaactccagaatgaacagtgcaggcatgaaatcaaaagaatctggagaaaacagtgagcaagcaaacactcaagattcaggtggcagccaattgctggagcatcccagtaggaaaatttttaggaagtctcgcatctcagaggaagatgacagaagcgagcttgatgacaacaacacaatggaagaagtcaagagtgactctacagaaaacagcaactccagagacactggcctcagccaacccaggagagacagcaagggtgactctcaagaagacagcaaggagaatctgtcccaggaagagagccaaaacgtagatggtcccagcagtgagtccagccaagaggccaacctgtcatctcaagagaacagcagtgagtctcaggaagaggtggtgagtgagtccaggggagataaccccgaccccacaactagttatgtagaagaccaggaagacagtgactccagcgaggaggacagctcgcacacactctcccactcaaaaagtgaatccagagaggagcaagcagacagcgaatccagtgagagcctcaacttctcagaggaaagcccggagtcccctgaggatgagaacagctccagccaggagggcctccagtctcacagcagctcagcagagagtcagagcgaggaaagccattctgaggaagacgacagtgactctcaagacagcagcagatccaaagaagatagcaactccacggagagcaaatcaagcagtgaggaagatggccagttgaaaaacattgagatagagagccggaaattaacagttgatgcctatcacaacaaacccattggggaccaagatgacaatgactgccaagacggctattagcatcagctgtcctaagaagcagttgtcacataaaggagtcttagggacttgaaaatgtatcatgataactataatttattgatgttttgatcaaaagaataaccagatgccatatttttcctgaaaggaattgctggacattacacttgtttttagggtgtcatcatttcacagaggtttaaatactgtggagtgacaccagaacacagccaaagaggctagaagcaagaaaggatctgcatgataactttgcagctgagatagttcctaattcatcaacgtaacaaacaaagctattgggtgtccatgatataccaggcactatgctaggtgttgagaatgtaaagcaggttaagacttgtttcttgctcctgaggagcgtatagaaggacccacaaagctacagagttaaagagggatatgtataagagaaacaagaattgttacaacccagtatggtgagtgccaagacagagagctatgaacacgatatctatctgggaacactgagaagggtgaccaatgcgttggagaacgagggagggcttcatagcagaagacattggagttggaaggttgcatagggtttcctcattggagaccgggaaattctattcttgggataaataatagtaaattctataggattcaatacttagtttgcaaaagcactttgaaattatggcacagtgagttgttttggataagaaaatctttttctcccaattaatttaccaattcatcatttttttttttttgtagaactcccataaacatcaccttactaatcactggtgatgataagaaggattgggtcaggaagagtgggagaaagaaattcctctttacgtagatactttttagctttattttttctaaaatcagtttgcgtgcaatgctagaaaaaaactgttctctgagtcctttacagagcaaaattctgtatgtaagattcaattgatttttgacaaataccatttgaaatattacctcaacataaaatacttgttttgtaataaagattataatacccagaagaaaaaaaaa

SEQ ID NO: 210 - DNA, 4978 bp, Homo sapiens
aggcggccgctgacagcaccagcatgtcttacagtgtgaccctgactgggcccgggccctggggcttccgtctgcaggggggcaaggacttcaacatgcccctcactatctcccggatcacaccaggcagcaaggcagcccagtcccagctcagccagggtgacctcgtggtggccattgacggcgtcaacacagacaccatgacccacctggaagcccagaacaagatcaagtctgccagctacaacttgagcctcaccctgcagaaatcaaagcgtcccattcccatctccacgacagcacctccagtccagacccctctgccggtgatccctcaccagaaggtggtagtcaactctccagccaacgccgactaccaggaacgcttcaaccccagtgccctgaaggactcggccctgtccacccacaagcccatcgaggtgaaggggctgggcggcaaggccaccatcatccatgcgcagtacaacacgcccatcagcatgtattcccaggatgccatcatggatgccatcgctgggcaggcccaagcccaaggcagtgacttcagtgggagcctccctattaaggaccttgccgtagacagcgcctctcccgtctaccaggctgtgattaagagccagaacaagccagaagatgaggctgacgagtgggcacgccgttcctccaacctgcagtctcgctccttccgcatcctggcccagatgacggggacagaattcatgcaagaccctgatgaagaagctctgcgaaggtcaaggccccaggcctcttcctacagccccgcagtggccgcctcttcagcacctgccacccacaccagctacagtgagggccccgccgcccctgcacccaagccccgggttgtcaccactgccagcatccggccttctgtctaccagccagtgcctgcatctacctacagcccgtccccaggggccaattacagtcccactccctacaccccctcccctgcccctgcctacaccccctcccctgcccctgcctacaccccctcacctgtccccacctacactccatccccagcaccagcctataccccctcacctgcccccaactataaccctgcaccctcggtggcctacagcgggggccctgcggagcctgccagccgtccaccctgggtgacagatgatagcttctcccagaagtttgccccgggcaagagcaccacctccatcagcaagcagaccctgccccggggaggcccagcctacaccccagcgggtcctcaggtgccaccacttgccagggggaccgtccagagggctgagcgattcccagccagcagccggactccactctgcggtcactgcaacaatgtcatccggggcccatttctggtagccatgggccgttcttggcaccctgaagagttcacctgtgcctactgcaagacttccctggcagatgtgtgctttgtggaagagcagaacaacgtttactgtgagcgatgttatgagcaattctttgccccgctgtgtgccaagtgcaacaccaaaattatgggggaagtaatgcatgccttgagacagacatggcacaccacctgcttcgtctgtgcggcctgcaagaagccttttgggaacagcctcttccacatggaagacggggagccctactgcgagaaagactacatcaatctgttcagcaccaagtgccatggctgcgatttccccgtggaggctggcgacaagtttatcgaagccctgggccacacttggcacgacacctgcttcatttgcgcagtctgccatgtgaatctggaggggcagccgttctactccaagaaggacagacccctgtgcaagaagcacgcacacaccatcaacttgtaggcggccaaggccgcctgtgctgacgaggcccggagctgctcctgctgctggcaacaaaggattcgggaggctgatgtttcttctgaggggaatggggagagagaggaagcgactgagccctttggaagtataattttaggttttttcttctgtacacagatcgtgcatttgcatagttcagactaggagccaaatgaagactcaaaaccaagctagttattaatccaagactggaattgtacttcagacatttagagcagaattccaagaactcaaaagtgaaaagcaacaagcagctttcccaaagcgatacacttgctttggtcaccagaggaggacagagcttagagcagctgtggagaatctgaagcattctgcggagttcttaagcgctcccctggcaaacaaattgaagtgccaaacagcactcgctgcagggtatttttagagtcatagctgagagcttgttagctaagacccattgggctttcctcaccaaaaaaggaagtgttattccattactagcgtcatggagctacctctgcgcatcagacttcagaccttgaacaaacttaaaaccttcttgggagcccggacgtccaaagagatgtcttctgggagccactgggcaattgccagggctccaggaagggctctggctcaggttgcagacagctgagaaaagatggccctgtcagccaccctctctcagtctgaaacatccaacatccccagaaggcttagctcctttttgaattgtgatgggaaagtagagttgggtttttccagttttgctctgtggtgtgtgagagatttttttaaaggctttgggttgtctttggcctttgtttagctttaagggttcgttagcatgagtgtccagtcgtgtgcatgaatttcaccccaacttgtgactgctcacttatgacgtctcccccagtaccctccatctcaaataggcttggtggcctgtggaaaagaagagagacagagagacagtgtctgaaacaggatggcagaataggctcacatgcccaaactctgggtggggaagaggaaacttactttctgccaccctcagtaagaacacacgaggaggcaggacctcccaccttcaggtctgcatcatccttttcaaatgttcctttaaatgcagcacactgagtttgtacaattgtgttaactgctggaagggacagatgcactgatatatatgcatttgctgttttggccaatattttgaaaatgtatgagctgagttgatctagctattatttaagtatttattgaagtagaggggccttcaaactactttatactagtgatagtttgagttaggtaagcatcttaaagctgtttggtgataaagaaggcagcttagattctgtggttggaaacagtgtagtcgcttccctttttaggaagccctgttaatatgctcattgaaaacatggcattgaagcaggcacttgcgtggatgtttctcacttgagcacgatatttaggctctcttccaactcactctattctgtcctcactcctgttttggatttttctctttgcatgtttgaaatgttttatgggaatgtattagaactcttttcttctaaggactgagacttccaggggattgccatcttacctgtctcttctccatgagggagaaggaagcagctagctatgtccctagctgcaggaagcccctattttttccaagcacgaagccaccagtctcccccagggagcatcaggaagggacatggatgtgctcctgccacagggcccttcctacctttggatctgtgagaaggtgaatacaaagcagcaggcagagtaaaatctgctgggactgcctggagatttgtcaggagctgcagacaagtaccttggagcattctgttatttttggaaagttcaaatatgcagggacaaggaggttgctgactgtactgacaggctctaagtcattttctccaaaaactatctattcaattatcaggggctggtcttgaggaaggaaaaaaaaaaaaaaacgttcccagaattcagtttccaaaatctctttttaaagggtttacacacacacacacacacacacacacacacacacacacacacacacacgatcattaaaaagtgtatgctctttaagaagaaaagtaaaatatctcaaaggacggtttcaccaccgtcctttattgaatcaatttttctacatttcagagcaagtgtagattctgagggactcctatttgccaaaaagacaaaactagcaaaaaaaaaacaaaaaaacaaaaaaaaaaccacttaaaaggtagcaggaaaagaaggtagttttgagtgtggttcactcagtgtctgtgagtctggtgtagtgtcaggagtaaggccgtgtctagctcaagtttacatttggatgtcctacaacactaaacaaaatttttcataatccatggtggggagcacactttggagctacatttcttgtctcctcattgttgacattaattaaacatttataggccaggcacagtggctcacgcctgttatcccagcactttgggaggccgaggcaggtgaatcacctgaggtcaggagtttgaaaccagcctggccaatatggtgaaaccccatctctactaaaaatacacaaaattagccaggtgtggtggcaggcgcctgtagttccagctacttgggaggctgaggcaggaatctcctgaatcctggaggcggaggttgcagtgagccgagattatgccattgcactccagcctgggcaacaggagcgaaactccgttgcaaaaaaaaaaaaaaaaaaaaaattataatcacaactttttgcaatggagtgacttatatctgcagcttatatctgcagtgtttgtgttaggaacctagcttttataatgtgttaactttttaactcagtattctggctttgggattttttgttttgtttttggaaacatttcagaagtggaatgtagcctgttaaaggtgtgcacaaaaatattttgcatgtgtttttttttttgcctgtgtgaattctactttttagcaaaaataaagccccccaaaggatgtgcaaaaaaaaaaaa

SEQ ID NO: 211 - DNA, 7640 bp, Homo sapiens
actgctaagagccccgactctagctagatccacgcagggcccgccagatcctcgaggaattgtagagcagaacctgggaggagacattagcatcccgtgctacaatggaccaaggcctcggcggagcgcgcagaagacaactctgggcccgctaaaccaacccaggatacccagagggaatctggaaaaattgcaatcaaaacatcatttctctaagaaaattttgggtaaccgaagttctggacaacagggcataccaattcaatcaccatgagttggagcttcctgactcgcctgctagaggagattcacaaccattccacatttgtggggaagatctggctcactgttctgattgtcttccggatcgtccttacagctgtaggaggagaatccatctattacgatgagcaaagcaaatttgtgtgcaacacagaacagccgggctgtgagaatgtctgttatgatgcgtttgcacctctctcccatgtacgcttctgggtgttccagatcatcctggtggcaactccctctgtgatgtacctgggctatgctatccacaagattgccaaaatggagcacggtgaagcagacaagaaggcagctcggagcaagccctatgcaatgcgctggaaacaacaccgggctctggaagaaacggaggaggacaacgaagaggatcctatgatgtatccagagatggagttagaaagtgataaggaaaataaagagcagagccaacccaaacctaagcatgatggccgacgacggattcgggaagatgggctcatgaaaatctatgtgctgcagttgctggcaaggaccgtgtttgaggtgggttttctgatagggcagtattttctgtatggcttccaagtccacccgttttatgtgtgcagcagacttccttgtcctcataagatagactgctttatttctagacccactgaaaagaccatcttccttctgataatgtatggtgttacaggcctttgcctcttgcttaacatttgggagatgcttcatttagggtttgggaccattcgagactcactaaacagtaaaaggagggaacttgaggatccgggtgcttataattatcctttcacttggaatacaccatctgctccccctggctataacattgctgtcaaaccagatcaaatccagtacaccgaactgtccaatgctaagatcgcctacaagcaaaacaaggccaacacagcccaggaacagcagtatggcagccatgaggagaacctcccagctgacctggaggctctgcagcgggagatcaggatggctcaggaacgcttggatctggcagttcaggcctacagtcaccaaaacaaccctcatggtccccgggagaagaaggccaaagtggggtccaaagctgggtccaacaaaagcactgccagtagcaaatcaggggatgggaagacctccgtctggatttaatcctggcgggcttaaaacctgtgcttttcatagtttatggtaagcagcagctcactgaataatgacttccattgagtaaacatttggctctggttatcttcagggatgctgttggctcatgatccaagctcaggggactctggaggcggggctgggctgagggagagaaagggaaacacagtgttcccaggcacatgttcttagcaataatacagttgcagaactttacatttgtgtcttccagatctggagaagaacagacatatttaaatcattcttgttgaacagtttttgtatgtacagtattatggtacttttttttttttagtatgagaactttttttgtatttgtacattgaactgctgtagttatacttttatattaaaggggaaaaagtccttataaataatgcctattaggctagtgctattactttgttcagcaaattctaccctggctttagagtttttaatagatgctacacctaataaaagtgcctctcatattgcaggaacgatttcagatgtgtaaggagactgaagaggagataccagtttttagtcttggaaagcaagttcacagtagaaggaggttgagatctttcttttatgtgagaaatctttgaatctcattcatgcgatcagagttgtagccaatttttgaaaaccttattttcaaaggaaataaatgattcactgtaggattcctttaaatatcaagcatcaccagtatatgctttgatggtatatgtatataacttaaagttctttcaaaagcctgatacagaaacgtgtccccagtttggtagcaatgtggaaaacctggctagagatgatatggagctgtccctcagaaagcaaagccatgcctggaatccctaataggctgcttagttgtgaacctgtttgatttgccttaagcctctatccagaaacctgcccgcttccgtctggttaagaagccagtggtggatattttctttgttaacattagaaatgcaaacattcccttgtcaaccaagaatactcaaagctacttgtattggaaatggcagaaggcctaaatccaaatttcttattttttataatttaccatagaagttttgtgattaaattcttacttctgccagtggaggtttatgcctgaaaggtcatggggtcctgtctgtaaatagacctaaagagaagtgcagtatttattctttgtaggcataatgtgtttgtcactgacaagcattcatgttcatcccactagtcttttattgcagtcttttattgtcattttcagccttatgttggagagctttgctttctcatcatgttcacattgtcttaagttttgtgagcttctgagaaagagcttggtaaaggtttaaaggggactttgttccaccagggagcattttatttgggcgtctcacccttttctaatgaaagctgttgtaagccacctctgacttggaaattctgaaagtatgaatattttttatatcttaattgtaaaatgccagttctccattatttagatgaatagtagaacactgcaccctttgtgcagtgtttttgtttctctactgcattcctacccccaccaaaaaaaagaaacttaaggaaatttttttttgagacagggtctccctctttcacccaggctggagtgcagcagcatgatctcagctcactgcagcctctgcctcccaggctcaagcaatcattccacctcagcctcttgattagctgggactacaggcatgtgccaccatactcggctaattctgttttaaaaattttttttgtagagatgaggtctcactatgttacccaggctggtctcgaacttttgggttcaagtgatcctcccgcctcagcctctcaaagtgttagtattataggtgtgagccaccatgcccagcctagaaaatttaaccttatcttttagccattcatttacttttatttgcttttttaaaaaaaaatctttaaattttagcctagagaagcacctcaggaactctaaacatcttaggcaaaaattaaactcaggtgagactgaaggagaaatttcagaaatacacatgtacctcatgggtaattaatagacatgcacagtttccttcaaatcaaatgtttaataaggaaattcatataattccaagaaaacaggcaaaatttggaatacataagcctagctaagataaagaactaccagttaattcttaacatcactggagcttccagcaggttttttaattgaaggacaaaaagtgtccatacatttgtgttatctcttcagagcctgagggagaagagagtggctttgcccagtggaaaggctggggatttgagaatgatacagggggaaggagtcaagcagaaatgccaggaagaaccaggcaaagacatttggcgccagaagcatccacttaatttctgtgaagagtgcccctggtgtttcatcttggcctgttttgatgagaatgttatcttttgtgtctggataacgcgtcagcttcttaaagtacatataaagatattctgtcacctccccacatgcacacacttttaaaatctatttttattctcttgctaaagttgtaattatgtcaagaattttccagctctaactgccttcttagtacatgtctttctgcctttgaagcatatgagtttgccaaagtcattctcccctaatgacatattgtggacttacattaagaaaatgggccaggcgcggtggctcacacctgtaatcccagcactttaggaggcccaggcgggtggattacctgaggtcaggagttcaagaccagactggtcaacatggtgaaactccatctctactaaaaatacagaaattagccaggagtgctgggtggacgcctgcaatcccagctacttgggaggttgaggcaggagaattgcttgaacccaggaggcagaggttgcagtgagctgagatcataccattgcactccagcctgcaagacagagtgaaactcttgtctcaaaaaaaaaaaaagaaaaaaagaaagtgagcctgttgatgtctagctaacccattggtggagtctgcattgaatctgtaagaatattgttctggatcatgcaggtgggatttgtataaaaagcctgtccaacatttagttctcactcgcatcagaatcatactgttttgaattgccatataagacatgctccatcatgacacttgcttctcctccaaatacaagttgagtgcttagtccttcacctgctagaatcaggatacaatcaacatgattatgttccttaacacacttggatttatgcagatgtggtgtgtcctttgctcttttttttcttaagacagagtcttgctcttgtcgctcaggctggagtgcagtggtgtgatttcggctcactgcaacctccgcctcctgggttcaagcgattctcctgcctcagcctcccgagtagctgggattacaggcaccaccaccataccaggctgattttttttgtatttttaatatagacagggcttcatcatgttggccaggctggcaggctggtctcgaactcctcacctcgtgatccgcccacctcagcttcccaaagtgctgtgattacaggcgtgagccaccgcgcctggcctgctcttaaaacccgttattcagaagatttgtaaaagaaataggctttttttttttttttggttaattcaaacgaggggaaaattagatagcattttcccctaaagaaatgttaatgttcattttgtggctttgttttcaagtttcaggagccatgtacatctcagaagtgttacgaagtgattagaaaaggcctctggtaaaagaccttcaaggaccaaccattattattggtcacttgtttgaacttggcgcttaaaaaaaaagttggactgtgatgctttggtgctctttatcacagacatcagtgatggtctgaaacactctctagcagtttatacgaagaatggacttacatgttatcagttacactcatgatttactcgttcagcttctacaagtccatactttatgctgtctcatttaagagacagtccacttctgaaaataaaatcgatagttgatgatacatttttggctagccagctttctgtaaaaggcaagtatgttagacatgcacagtttccttcaaatcaaatgtttaataaggtacttcaagaaacgcctttttaaaaatcaaaggttttggccaggcatggtggctcacgcctgtaatcccagcactttgggaggccaaggtgggcgaatcacaaggtcaggagtttgagaccagcctggccaacatggtgaaaccccgtctctactaaaaataccaaaaattagccgggcgtggtggtgggtacctgtaatcccagctactcaggaggctgagatgagaatcacttgatcccaggaggtagaggttgcagtgagccgagattgcgccattgcacttcagcctgggcaacgagtgaaactctcaaaaaaaaattcatagtaataataaagtccctgcatgcagtttggaaataaaatttaaactcatttatgtgtaataaatatgtaataattcacagtcaccatcaaatgttggaatcattgaattgcatacttgtactcattccggccacatcatgaagtgtttaaagatttgtatttgctgttgtccctatgtagttctattgatgtttggttttgttttttggggtttgttttgagcccaggctagagtgcaatggcacaatctcaactcactacagcctggacctccttggctcaagcagtcctcccacttcagcctcccaagtagctggtctgcaagtgctcaccaccacacctggctaatttttgtattttttgtagagacagagctctcactatgttgcctagactggtctcaaactcctgggcccaagcaatcctcccatcacagcctccgaaggtgctgggattacaggcataagccactgtgcccagcctgtttttaataatgatattaagtgggtttggttcatgtgttattaatcagtgttaataatcgtacttttttttttttttaaaagaaaccatggtattctaaaatcaggagtccaaataaaagaaagttctcggctgtgcatggtggctaacacctgtaatcccagcactttgggaggctgaggtgggtggatcactagaggtcaggagtttgaaacaagcctggccaacatggtaaaaccccctctctactaaaaatacaaaaattagccgggcatggtggtgcacacctgtaatcccagctactcgggatgttgaggcatgagatttccttgaacctggaaggcagaggttgctgtgagccgagatcgcgccactgcactccagcctgggtgacagagtaagactgtcgccaaaaaagaggaaaaaagttatccagtgcagtttctacagagataaaagaagtaatagttctggctgggtgtggtggcttatgcctgtaatcccaacactttgggaggccaaggcaggtggatcacatgaggtcaggagttcgagaccagcctggccaacatggcaaaactgtctctactaaaaatataaaaattaggtatggtggcacgtgcctgtacttacagctacttgggaggctgaggcatgagatgacaatctcttgaacccaggaggcggaggttgcagtgagctgagattgcaccactgcactccagcttgggtgatggagtgagactcaaataaaaaaggtactagttctgcatttcagagttggcttgttgaaccaggctatatgcttccaagatttaaatgtttttctgtattatactctcaattgtgttttaaaaaaatctcttacagaaatctctacctcaggcactaagtgttatgacatgggtagcatattgatattgaaaacttagctaggacttccagccttttaagataatttaaatgtaaaattaaatggttaaccagcaatctaatgtcatgtggtgtgcagtttggatattgcatgaacagctaaggaatcacctgttctagtgccaaagatcactcattgctaattttgttctgtacagcttatgtaatattttcatggtggagacggactctgtgtgctcagggccttgtctctaggaagattttgtcaattccaaatacagttttgaagattca

SEQ ID NO: 212 - DNA, 7296 bp, Homo sapiens
atggtggagcagggagacgcggcgccgctgctgcgctgggccgagggccccgccgtctccctgccgcaggccccgcagccgcaggcgggaggctggggccggggcggcggcgggggcgcccggccggccgcggagccgccccggaggcgggagcccgaggagccggccgccccggaggtgctgctgcagcccgggcgcctggagctgggcgacgtggaggaggaccaggtggtggccgtgttcgtggtcaccttcgacccccgctcgggaaacatggtagaatggtgcttacctcaagatattgaccttgaaggtgttgagttcaagtctatggccagtgggtcccataaaatccaatctgatttcatctatttccgaaaggggcccttcttcggcctggcctgctttgccaacatgcccgtggagagcgagctggaacgtggcgcgcggatgaagtctgtgggcatcctctctccctcctacacactgctttaccgctacatgcacttcttggagaaccaggttcggcaccagttggagatgccaggacattactctcatctggctgccttctatgaggacaaaaagggggtgctccatgctggtcccggcagaggcagcagcctgccccctgtctactggctgccttccatccaccgatacatgtaccctgagatgaagatcacacacccagctggctgcatgtctcagtttataaagttctttggagaacagatcctcatcctctggaaatttgccttacttcgaaagcgcattttgatattttctcccccacctgtgggcgtggtgtgctatagagtgtactgctgctgctgcttggccaacgtttcactgcctggcatcgggggcaccattcctgagtccaaacctttcttctacgtgaacgtggctgacatcgagagcctggaggtagaggtgtcctatgtggcctgcaccacagagaagatattcgaggagaagcgggagctgtatgacgtctacgtggataaccagaatgtgaagacacaccacgaccacctgcagccgctgctgaagatcaacagtgctgacagggagaagtaccgccggctcaacgagcagaggcagatgctgttgtactcccaggaagtagaagaagactacaacccttgtgaagaggacctcttcgtgctgtttttcctagaacaaaacaaccggatatttcagactttgttggaggtgtctgccagtcaagacaaaactctgacagcagagcatgcccggggcatgggcctagacccccaaggagaccggagctttctcctggacctgctggaggcctatggcattgatgtcatgctggttatcgacaacccctgttgcccgtaggaggagccaacaggactgggagccacttcacgtgggatgtcagcagcccggagttcaccccagggccccagagggcctcattttttattaagttgacacaaaggaatattgtttatactttccaacaaacataatttttgcaatttcctttctgcccttttccctagagataaggtgagatcaccttggttttgtgtcctgccatgttaggatattggaatctgccactttctcccagagctgctggtcctctgggcttggtcatgggagttgtatcactaggagtaggctgagctctggaaacattgggatggactgttcagaaagtctgtgtggtctttgtcccttgatgtatttgagaataagacaaccacctgtcccctgtggccttagatgttcatctgcctaaaggcagaaactagaccagatgatcttttaaggtttttagtagttctaggagtctatagtcttgggatcaaatcccttttcttgttcattagggcaactttatgtcttctctgtttacttgagtagggaccacaaagagggaaaaaaggatgtttctgacaccaaatatgagcttatcttatggtcagaatgaaagaggttgcttatcagtgagctgaaaactaaaattatagaatgaagcctggaaaccttcctcaaagtaacttgatggtggccatgcaatgtaatgttcctctttgtctgaaccttcctcttcttgggatgaattggtgaattgctaagggccaatgctggccttggagcttgcaagcaaattaattttccagtttagtctcttaagggttcaataatgctcttggagtaagttgggtatttttaaaggctgaagtttggactaccggaggatagagcaattgaagttcgagcaggatggagaagccactctaagtctcttcatctggacacgaattctctggaggcattagcagcagcacctctgggtcaacacagatttactggattccaaaatctagcaaggatctgagctggttaactcagagggtggagcatgatgctaacaagacggtttatcattttggacccctcacaaacacacttctctttagcagaggtgacattccttaggctaaataattggatccagggacataacagatttgttgagagaaaatgtggcagtgccttcacccgggacagtggtcaggaagccctgagcatccctgatggatttatccatcctcttctgaagtgctctgctctaggctgggtcctgttgccacctgcctgttctctggttggcttttgcaggagggcagcttacgtgtttgtcaaccagttagaaagccagttcctgtgggtcgagtttaggcctttttggccatagttgagaattttgacttgggatactgggttgttggtgacaaataatgtcttccttttcccccttcccgcctggctcggttatgggaatagccgtcagtgcatccatgtctgtgaccaacacccagccagactaatgtacacagcagggagaaataacattcaaatggtggttcacacatctcatctcaagataagattcttagggttcactgctttattcaaaagtgttttcactgtagctccttcatatggaatatcaaaactgaagaaattcacatgtggaaatgcaaatagacattgattaatcaaggtagcatctttatgtaaatatataaataagtttgggcattgaaatgtaaactgtacagctaatagacttttctcctctgcaatgtgggttgctgtcatttcagtaatgtgtatgtttacaaaagaaaaaaaaatctgtgtttcgaggttgaagcctcaccttttattctcctttacatgcaaccctctcttcttgcctctcaagggttgaggggtcctttctgtcaagtaatggttatttttcgtggtatcctgaggttcagggtgttttaagctgggggtaggtggttagaggcaggagtagaagtgaaaggaaaggtctgattctcctagaggacacaagaagacctcctttttctggaattagggaatctgccggaaggagctgtttgaggcatttctgctctgagccttctatatgcaaacactgcagttttaactgcaagctcagaagtgctggtgtaaacatagcagggtgagaatgaagttcctgttttttcctttgaatggtgagtcagggcttctgggttcccttaactttgtgcttgtctcggtagctttctgtctcacatctccacgtgtccaccctcctgctcatgcagagggccagggtatgggtggccccagaggagaacgtgccagtgaggcagtgccatgtttcaggtcataggggccttgggctcagctgaccccaatgcagaacttctccctttaagagagattccaataaattggtccttccctaccttgccagcttcttcataggaccagaaatcttgtgcagagcctctgcttggctgaacagcgtgtgctttatctcttcagttacctttgccactgttgagcatcctcagagtatgtcttgcctgggctatgaagtggagcctgtggcttcggaaatcacctttcgaagccttgctctatgccagattctgctccccaacatgacagattaacaggcacaacctaggatcctttgctaccagttctctactagggaattccacagtggcagcagaagctaggagccatgtggacctgcttttctgccagtcttgaaatattttctgagaaaccatctgcttttgttcagaagaaagtgctgaacatcgttcacagacttctaggtctgtaagctctttaggggcgggcattatgatgaccaccggcctcctggaggagggttggatacctgtggtgtgacaccttctgccaccatctcctgccgggcctcagccctcgcctgcctgagcaggcctagttctcctgtgaagctgtcagcctgatctcatgccacactgtgaaatgaactatgtgccagtttggaaatgattgctgacctgagatgctggctgggctgccctgttgttcctgaataagtcagaagaagttccaggtgggagtggaattcaggtttggggctcgttggtatccatgcaaaatatgacaaaggcctgttcaagagggcattttcaattctgtaggctcagcagatgatactgcccagcctttgggaaaatgtccagttggcccctggcttaggactctccacaaggagtttgaaatggtagggcttatcccctaccagactaaaagtatggcccaaattatgtgtttagaatttgcttggcctttaaacacgaaccattccctatgcctggtagagaccattccagtgtcagtgtcccacctgggacctgtacagtcctcagtaaattatgattgcaatgaattagaaggcttttgccttccatatccatcatccattatagcatctgtgcttccacctggttagggggagggaagctgaaatcattgatgtatcaatagaagtaatttagcttaggaacttgcatctataacttaccttgttttgttccactttaaagtcaagacaagaaagttaagatagcacacaggtgcacatgcttccagatgccacatgtgaacatttgttgatcatgtgactaccgatgacactttagctagaagataaattaaatcttagctaaatcattgtttttccttctggtggctatgaggatgaatttgctctcagtcttgatgcactgaaagcccttcaaacacagtaaaagatgaaatcactcatctttaaactgaggccttcagggaagcttttgtaaaggacagtaatgaattaggctttcagttttaggacatcaaccctccgagaaaaggcagaaacccgagggaccatttatttcccttcgaaactgtatagcccagggaatggattgagatgctttctccagaccctgtataggtcaaccttgcagaggtaaaggaggaggggcaggtggatgaataaaataggataatgctcagcttggcagtggacttgccttagtgtgatgacaggtctaacatgggcaagacaattagaatggggaccaatatgccaggcatgggcttttatctccctagtagatcccaagctagtaggcttggattctgccaaatggccagccctcctgtcttctccccgtaccttgtagttagaccgaggtgagaatcctgctgaccccagtcccatcccctctcatttcaggaaaacccttttgtgattcaggtagggggagaggaggagttaagggctccgtttactcccaagtcatggatttttaatattccatttttatcactaatatacctctcttcctagaagctactggagtattgagtgttgtgggaaaaggctaactgtgaattaagttaatgtttttcttataagaaatggaagtttatttttttattgatattactatgtgatgaactgagtatgcatatactgaaatggaaggaaattttaaaactattattctagaagaaatgggcagttttgtaatttggtggtggctgagaccccatagaagttttactatgtaaataatttggagagtgaataaggagattgtgctatgaaatcctgacagcgctctttaggaggcagacttgacagtcctaggaaggttgacataaaaataccaaccttcagtaaagctctagtacaaaaaagggtaaatgtcatcattcttatttttaggcctctttcttgagagaggtgggagtgggaggtagtgttataactggcactttaatttgtttttggaactagaatttaggggcagttggatgaaattgcaaatttagaaggggaataagaattttctagtgctatataaagaaatgatgatggagacaaaagccttgctttcctctttttagaatttattttcgatttttagcatactgtggggcttttagagctaatatgatctaaattcagaaaatttaattttcatagtaggccaggtgtgaattacttatgtttgctatagaatgcttatttagactaacaataaatttactttgctttctaaggccagtcagcgaatgtggggatgaggcaggatgttttaaatgagccagagatgatccacaaagtgaacagtcgacacagaggtctttgagttggatggttgcaaatatattgacattagagtgaaaactccttcctttgggtaaactaaagaaagataaagtatactaaaaaattttaagatggtgttatacaaaaaaaagtttgggtctaacgtgtccacaaagactgtcaagtgaagaatggtggagattcttggtgtttgagcagccaacctggatgagtgacttcagggacagagcagaggaaagcaaaatgaatttcctttatttacccaaaacttgttgactgaatttttgtataggtccgggaaaataagcctaaacaaatagttgtagccttagaaaaactgttttcccatttctttctgagttagaatcagcatagcctccctgtcgccttaaatgtaaaaatcctattttgattaataccccagcctaagagttatagcaatacgagagactgaatctatttttgtttcgggtctttacctcatagtatgaaattagtaagacactgcatagattttgccctgaatactggtgtgcccaggtatgccgtgctctctctctgtttccagtggtggtaattttaaggcctaaagaaagctggggttaatcctgaagctaaaagtaaatgtttcttgaattgattttgttctgtggtacaaataacatctatgaatatcatatctgtatatatctgaaccaagttgtgtgcagagaggttgatataactatatttacagaaaatgatttttacaattaaagttcacattttaacatgaa

SEQ ID NO: 213 - DNA, 3376 bp, Homo sapiens
tgatagggcagagaggagcccatgctccagctgcggggagtgcctgcccgaggagctggccagtgaagacaggtgcctgccagtgaagacaggtgcccacaagctggacacagggtcggccctgagacaggacagcagctgcggaatgttcccgctggctttctggagcgccagcgtcctgcttgggtctggccaggggcctctagccaggctgttgaggcgcccctccttgttgaagaggagaaacagtggccccctgggagttgctgggaggtgcctggcacagggcggcagggacagcatcatctatggggaaagcaagcccagcctcagggctgtcccgtccaaagacccttgtgagtccactgaggtcaaatcaatggagtcttcagaaaggccttccggagcagtactacagcctcacctggttcctgagccccatccttggcctcatcttcacacctctcattgggtctgcgagtgaccggtgcaccctgagctggggccgccggcggcccttcatcctcgccctctgcgttggcgtcctctttggcgttgcacttttccttaacggctctgccatcggtctggccctcggcgatgtccccaaccggcagcccattggcatcgtgctcacggtgctgggagtggtggtcctggacttcagcgccgatgccaccgaggggcccatccgtgcctatctgctggacgtggtggacagcgaggagcaggacatggccctcaacatccacgccttctctgccggcctcggcggagccatcggctacgtgctgggtgggctggactggacccagaccttcctgggcagctggttccggacccagaaccaggtgctcttcttctttgccgccatcatcttcacggtgtccgtggccctgcacctgttcagcatcgacgaggagcagtacagcccgcagcaggagcgcagcgctgaggagcccggcgccctggatgggggcgagccgcacggcgtccctgccttcccagacgaggtacagtcggagcacgagctggccctggactacccggacgtggacatcatgcgcagcaaaagcgactcggcattgcacgtgccggacaccgcgctggacctggagcccgagctgctgttcctgcacgacatcgagccctccatcttccacgacgcctcctaccccgccaccccccgcagcaccagccaggagctcgccaagaccaagctgccccgcctggccaccttcctcaaggaagccgccaaggaggacgagaccttgctggataatcacttgaatgaagctaaagtcccaaacggaagtggctcccccacaaaagacgccctcggcggctacaccagggtggacacgaagccctcggccacgtcgagctccatgcggcggcggcggcacgcgttccgcaggcaggcctccagcaccttctcctactacggcaagcttgggtcccactgctaccgctaccggcgcgccaacgccgtggtgctgatcaagccgtcgcgcagcatgagcgacctgtacgacatgcagaagcggcagcggcagcaccggcaccggaaccagagcggggccaccacctccagcggggacaccgagagtgaggagggggagggcgagaccacggtgcgcctgctgtggctctccatgctgaagatgcccagggagctgatgcggctgtgcctctgccacctcctcacctggttctctgtcatcgccgaggccgtgttctacaccgacttcatgggccaggtcatcttcgaaggcgaccccaaggccccctcgaactcgaccgcctggcaagcctacaacgccggggtcaagatgggctgctggggcctggtcatttatgccgccactggtgctatttgttcagccctgttacagaagtacttggacaactacgacctgagcgtcagggtgatctacgtgctggggacgctgggcttctctgtcggcacagccgtgatggccatgtttcccaacgtctacgtcgccatggtcaccatcagcaccatgggcatcgtctccatgagcatctcctactgcccgtacgccctgctgggccagtaccatgacatcaagcagtacatccaccacagccccgggaactccaagcgagggtttggcatagattgtgccatcctgtcctgccaagtgtacatctcgcagatcctggtggcctctgcccttgggggcgtggtcgacgccgtggggactgtccgcgtcatccccatggtggcctctgtgggctctttcctgggcttcctgacggccacattcctggtgatctatcccaacgtgtcagaggaggccaaggaggagcagaaaggcctgtcttccccgttggccggcgaaggcagggccggtgggaacagcgaaaagcccaccgtgctgaagctcacgcggaaggagggcctgcagggaccggtggagacagaacgcctgcaggtattgacgtctgtcagatctcgtcacattggctggtgccgcagctgttggagagtatttttctttatgattattttagaaaaaaaattttcttttccacaatgtggttctcttagaagaatgacgtatcttcttttcctcagcgagttggacacattgtgcccagggcagccctgtccttgggcagcgaccgcacaccaaagctgggaggaggctggtccggggggcctgggcagaagacagtgatttgcaggggtggctcccagacaccctgcccagggatgggctgggcaccacctgggggcggagcgtgagctccagacgagctcctgcgtgcgcgtgtgagtgtgtctgcgcccagccatgtgaccccgctcgtcccgtctgaaggactctcctaggaggccaggttgcccctccagaccgctcccaacgtcagggggaaggaaacgttgactttcactgcactttgattcgtctctaaaccatttgctggggattcctgagagcagagctcccagcgggccctgcctcccaagtcccgccgcaaggctacctcgggtgtgtggatgtgcgagggcctcccccgcttgcgaaggggacatgcgtgctggaacctgtcggaactccatgccttcctcgcctgctcacctgctcgacgctggaatcgggacaggtgcaaagggacgcagacgtctgggacagctaaggcccgtgtcaccggagggctccgcacagtcgttctggtttcaacgaataagcaaaactcgggcaagtactgcagctatttggaaatgttttccaaaccacagtctctttagaactaagcctatttgaaacggtcggtgtaggcttactgagatcaggagacagggaggccccgcacatcacacagataaagtcagacaattgtaatt

SEQ ID NO: 214 - DNA, 4287 bp, Homo sapiens
atgcgcgcgaggtgcgcaggctcgcgcctttttcccttttctaagctttctgtgttacccccggttccgctgtcttttctgtctacagtttgcgatccccgcgtccaggatggagcagctgaacgaactggagctgctgatggagaagagtttttgggaggaggcggagctgccggcggagctatttcagaagaaagtggtagcttcctttccaagaacagttctgagcacaggaatggataaccggtacctggtgttggcagtcaatactgtacagaacaaagagggaaactgtgaaaagcgcctggtcatcactgcttcacagtcactagaaaataaagaactatgcatccttaggaatgactggtgttctgttccagtagagccaggagatatcattcatttggagggagactgcacatctgacacttggataatagataaagattttggatatttgattctgtatccagacatgctgatttctggcaccagcatagccagtagtattcgatgtatgagaagagctgtcctgagtgaaacttttaggagctctgatccagccacacgccaaatgctaattggtacggttctccatgaggtgtttcaaaaagccataaataatagctttgccccagaaaagctacaagaacttgcttttcaaacaattcaagaaataagacatttgaaggaaatgtaccgcttaaatctaagtcaagatgaaataaaacaagaagtagaggactatcttccttcgttttgtaaatgggcaggagatttcatgcataaaaacacttcgactgacttccctcagatgcagctctctctgccaagtgataatagtaaggataattcaacatgtaacattgaagtcgtgaaaccaatggatattgaagaaagcatttggtcccctaggtttggattgaaaggcaaaatagatgttacagttggtgtgaaaatacatcgagggtataaaacaaaatacaagataatgccgctggaacttaaaactggcaaagaatcaaattctattgaacaccgtagtcaggttgttctgtacactctactaagccaagagagaagagctgatccagaggctggcttgcttctctacctcaagactggtcagatgtaccctgtgcctgccaaccatctagataaaagagaattattaaagctaagaaaccagatggcattctcattgtttcaccgtattagcaaatctgctactagacagaagacacagcttgcttctttgccacaaataattgaggaagagaaaacttgtaaatattgttcacaaattggcaattgtgctctttatagcagagcagttgaacaacagatggattgtagttcagtcccaattgtgatgctgcccaaaatagaagaagaaacccagcatctgaagcaaacacacttagaatatttcagcctttggtgtctaatgttaaccctggagtcacaatcgaaggataataaaaagaatcaccaaaatatctggctaatgcctgcttcggaaatggagaagagtggcagttgcattggaaacctgattagaatggaacatgtaaagatagtttgtgatgggcaatatttacataatttccaatgtaaacatggtgccatacctgtcacaaatctaatggcaggtgacagagttattgtaagtggagaagaaaggtcactgtttgctttgtctagaggatatgtgaaggagattaacatgacaacagtaacttgtttattagacagaaacttgtcggtccttccagaatcaactttgttcagattagaccaagaagaaaaaaattgtgatatagataccccattaggaaatctttccaaattgatggaaaacacgtttgtcagcaaaaaacttcgagatttaattattgactttcgtgaacctcagtttatatcctaccttagttctgttcttccacatgatgcaaaggatacagttgcctgcattctaaagggtttgaataagcctcagaggcaagcgatgaaaaaggtacttctttcaaaagactacacactcatcgtgggtatgcctgggacaggaaaaacaactacgatatgtactctcgtaagaattctctacgcctgtggttttagcgttttgttgaccagctatacacactctgctgttgacaatattcttttgaagttagccaagtttaaaataggatttttgcgtttgggtcagattcagaaggttcatccagctatccagcaatttacagagcaagaaatttgcagatcaaagtccattaaatccttagctcttctagaagaactctacaatagtcaacttatagttgcaacaacatgtatgggaataaaccatccaatattttcccgtaaaatttttgatttttgtattgtggatgaagcctctcaaattagccaaccaatttgtctgggccccctttttttttcacggagatttgtgttagtgggggaccatcagcagcttcctcccctggtgctaaaccgtgaagcaagagctcttggcatgagtgaaagcttattcaagaggctggagcagaataagagtgctgttgtacagttaaccgtgcagtacagaatgaacagtaaaattatgtccttaagtaataagctgacctatgagggcaagctggagtgtggatcagacaaagtggccaatgcagtgataaacctacgtcactttaaagatgtgaagctggaactggaattttatgctgactattctgataatccttggttgatgggagtatttgaacccaacaatcctgtttgtttccttaatacagacaaggttccagcgccagaacaagttgaaaaaggtggtgtgagcaatgtaacagaagccaaactcatagttttcctaacctccatttttgttaaggctggatgcagtccctctgatattggtattattgcaccgtacaggcagcaattaaagatcatcaatgatttattggcacgttctattgggatggtcgaagttaatacagtagacaaataccaaggaagggacaaaagtattgtcctagtatcttttgttagaagtaataaggatggaactgttggtgaactcttgaaagattggcgacgtcttaatgttgctataaccagagccaaacataaactgattcttctggggtgtgtgccctcactaaattgctatcctcctttggagaagctgcttaatcatttaaactcagaaaaattaatcattgatcttccatcaagagaacatgaaagtctttgccacatattgggtgactttcaaagagaataaaacactatttcccttgccttttcatactagggcagtatctcctctagctagtgcccatacagaaaattctatcaccatacaaaatttaatgcagtatttatgttttaaagcacaggtgtaccgaaaactgtgaaaagtctgaatttatgggttctatgcatgcatttttgcctaacctagagaaagagtttgataaatttttaccagctttgaagatggattaacttttgactttgagctttaaacttttaagtcagacatttcaggactaatttgattttgtagatatcattgtaagaactttatttgaaagactgaataaagggatttgatttgttttcatcatttaagcacagtcttgtgatgatgagaacataagtgtgattcttttctgtattttgaggtccctaatccaaagcccattttgctaggattttttctgctatcagatgtgttttcactctaaacctagtcttttatgacatgaattgattacttcctgttaattttctatcctcccttactatcctccttttttgttttcagtattcagtatttcagtattctagagtagattttgatataaaagaaaataattcttacatcatcttttgcaacaaattttgttttctgaattgataataaatttaaaaagttgattcctattttcacatatgttcatatgcccctatgtttgggggtatcactcagttttcccttttttgtgtaaagatgttttgtaaaacaaaattgtctcaaagtgattatattatatatataaaaagtaacagattttaacaaaggttaaaagattcttggggtaacagattcttctggggcttggaaatcttccatttctcttgagggttttttttaatgagtgttaaatatgttaaaatttttatttctacctcatgtgtttttttaaattattacttgaagttttttatttaataaattttttctactaatggaaaaaaaaaaaaaaaaaaaaa

SEQ ID NO: 215 - DNA, 9520 bp, Homo sapiens
gcctcctccccacacctgggaggggagtggtgcggcgcggcctcctcccccggcgctcgcaactcctgtccggccgtagctgcgccgccgcggcgggagtaaaggtcgcgccgccgggagcgagccggccgcggcgcctgcgggaagccggcggggcaggtcggagaagagcgagaagatcgagaaactccaggccagcccgggaacatggcgccaggcgggccagccgcggactgagagccgcggggcagccaggagccggggcccgagccccgcccggcccgggccatgtcggtgggcgagctctacagccagtgcacaagggtctggatccctgaccctgatgaggtatggcgctcagctgagttaaccaaggactacaaagaaggagacaagagcctacagctcagactggaggatgaaacgattctggaatacccaattgatgtacaacgcaaccagctgcccttcttacggaatccagatatcttggtgggagaaaatgacctgactgcccttagctatcttcatgagcctgcagttttgcataatttgaaggtccgtttcctggagtccaaccatatctacacttactgtggtatcgtacttgttgccattaatccttatgaacagttgccaatctatggacaagatgtcatctatacctacagtggccaaaacatgggagacatggacccccacatctttgctgtggcagaagaagcctacaagcagatggccagagatgagaagaatcagtccatcatagtcagtggggagtctggagccgggaagacggtatcagccaagtatgccatgcgctatttcgccaccgttggtggctcggccagtgaaaccaacatcgaagagaaggtgctggcatccagtcccatcatggaggccattggaaatgccaagaccacccgcaatgacaacagcagccgttttggcaagtacatccagattggctttgacaaaaggtaccacatcatcggggccaacatgaggacttacctcttggagaagtccagagtggtcttccaggcagatgatgagaggaattaccacatcttttaccagctctgtgctgctgccggtcttccagaatttaaagagcttgcactaacaagtgcagaggactttttctatacatcacagggaggagacacttccatcgagggtgtggacgatgctgaggactttgagaagactcgacaagccttcacactcctcggagtgaaagagtcccatcagatgagcatttttaagataattgcttctatcttgcaccttggaagtgtggcgattcaggctgagcgtgatggtgattcctgtagtatatcaccccaggatgtatacctaagcaacttctgccgactgctaggggtggagcacagtcagatggagcactggctgtgtcatcgcaagctggtcaccacctcggagacctacgtcaagaccatgtccctgcagcaggtgatcaatgcgcgcaacgccctggcgaagcacatctatgcccagttgttcggctggattgtggagcacatcaacaaggccctgcacacctccctcaagcagcactccttcatcggggtcctggacatctatgggtttgagacatttgaggtaaacagctttgagcagttctgtatcaactatgcaaatgaaaagctccagcagcagttcaactcgcatgttttcaaactggagcaagaagaatacatgaaggaacagatcccttggaccctgattgatttttatgataaccaaccttgtatcgacctcattgaagccaagctgggtatcttggacctgttggatgaagaatgtaaggtccccaaaggaactgaccagaactgggctcagaagctctatgaccggcactccagcagccagcacttccagaagccccgcatgtccaacacggccttcatcatcgtccactttgcagacaaggtggagtacctctctgatggttttctggagaaaaacagagacacggtgtatgaagagcagatcaatatcctgaaggccagcaagttcccactagtggctgacttgtttcatgatgacaaggaccctgttcctgccaccacccctgggaaggggtcatcttcgaagatcagcgtccgttctgccagaccccccatgaaagtctccaacaaggagcacaagaaaaccgttggccaccagttccgtacctccctgcatctgctcatggagaccctgaatgccacgacacctcactatgtccgctgcatcaagcccaacgatgagaagctcccctttcactttgacccaaagagagcagtgcagcaactcagagcctgcggggtgttggagacgattcgaatcagtgcagctggctacccatccaggtgggcctaccatgactttttcaaccggtatcgggtgctggtcaagaagagagagctcgccaacacagacaaaaaggccatctgcaggtctgtcctggagaacctcatcaaggaccccgacaagttccagtttggccgcaccaagatcttctttcgagcaggccaggtggcctacctggagaagctgcgggctgacaagttccggacagccaccatcatgatccagaaaactgtccggggatggctgcagaaggtgaaatatcacaggctgaagggggctaccttaaccctgcagaggtactgccggggacacctggcccgcaggctggctgagcacctgcggaggatcagagcggctgtggtgctccagaaacattaccgcatgcagagggcccgccaggcctaccagagggtccgcagagctgccgttgttatccaggccttcacccgggccatgtttgtgcggagaacctaccgccaggtcctcatggagcacaaggccaccaccatccagaagcacgtgcggggctggatggcacgcaggcacttccagcggctgcgggatgcagccattgtcatccagtgtgccttccggatgctcaaggccaggcgggagctgaaggccctcaggattgaggcccgctcagcagagcatctgaaacgtctcaacgtgggcatggagaacaaggtggtccagctgcagcggaagatcgatgagcagaacaaagagttcaagacactttcagagcagttgtccgtgaccacctcaacatacaccatggaggtagagcggctgaagaaggagctggtgcactaccagcagagcccaggtgaggacaccagcctcaggctgcaggaggaggtggagagcctgcgcacagagctgcagagggcccactcggagcgcaagatcttggaggacgcccacagcagggagaaagatgagctgaggaagcgagttgcagacctggagcaagaaaatgctctcttgaaagatgagaaagaacagctcaacaaccaaatcctgtgccagtctaaagatgaatttgcccagaactctgtgaaggaaaatctcatgaagaaagaactggaggaggagcgatcccggtaccagaaccttgtgaaggaatattcacagttggagcagagatacgacaaccttcgggatgaaatgaccatcataaagcaaactccaggtcataggcggaacccatcaaaccaaagtagcttagaatctgactccaattacccctccatctccacatctgagatcggagacactgaggatgccctccagcaggtggaggaaattggcctggagaaggcagccatggacatgacggtcttcctgaagctgcagaagagagtacgggagctggagcaggagaggaaaaagctgcaagtgcagctggagaagagagaacagcaggacagcaagaaagtccaggcggaaccaccacagactgacatagatttggacccgaatgcagatctggcctacaatagtctgaagaggcaagagctggagtcagagaacaaaaagctgaagaatgacctgaatgagctgaggaaagccgtggccgaccaagccacgcagaataactccagccacggctccccagatagctacagcctcctgctgaaccagctcaagctggcccacgaggagctcgaggtgcgcaaggaggaggtgctcatcctcaggacccagatcgtgagcgccgaccagcggcgactcgccggcaggaacgcggagccgaacattaatgccagatcaagttggcctaacagtgaaaagcatgttgaccaggaggatgccattgaggcctatcacggggtctgccagacaaacagcaagactgaggattggggatatttaaatgaagatggagaactcggcttggcctaccaaggcctaaagcaagttgccaggctgctggaggctcagctgcaggcccagagcctggagcatgaggaggaggtggagcatctcaaggctcagctcgaggccctgaaggaggagatggacaaacagcagcagaccttctgccagacgctactgctctccccagaggcccaggtggaattcggcgttcagcaggaaatatcccggctgaccaacgagaatctggaccttaaagaactggtagaaaagctggaaaagaatgagaggaagctcaaaaagcaactgaagatttacatgaagaaagcccaggacctagaagctgcccaggcattggcccagagtgagaggaagcgccatgagctcaacaggcaggtcacggtccagcggaaagagaaggatttccagggcatgctggagtaccacaaagaggacgaggccctcctcatccggaacctggtgacagacttgaagccccagatgctgtcgggcacagtgccctgtctccccgcctacatcctctacatgtgcatccggcacgcggactacaccaacgacgatctcaaggtgcactccctgctgacctccaccatcaacggcattaagaaagtcctgaaaaagcacaatgatgactttgagatgacgtcattctggttatccaacacctgccgccttcttcactgtctgaagcagtacagcggggatgagggcttcatgactcagaacactgcaaagcagaatgaacactgtcttaagaattttgacctcaccgaataccgtcaggtgctgagtgacctttccattcagatctaccagcagctcattaaaattgccgagggcgtgttacagccgatgatagtttctgccatgttggaaaatgagagcattcagggtctatctggtgtgaagcccaccggctaccggaagcgctcctccagcatggcagatggggataactcatactgcctggaagctatcatccgccagatgaatgcctttcatacagtcatgtgtgaccagggcttggaccctgagatcatcctgcaggtattcaaacagctcttctacatgatcaacgcagtgactcttaacaacctgctcttgcggaaggacgtctgctcttggagcacaggcatgcaactcaggtacaatataagtcagcttgaggagtggcttcggggaagaaaccttcaccagagtggagcagttcagaccatggaacctctgatccaagcagcccagctcctgcaattaaagaagaaaacccaggaggacgcagaggctatctgctccctgtgtacctccctcagcacccagcagattgtcaaaattttaaacctttatactcccctgaatgaatttgaagaacgggtaacagtggcctttatacgaacaatccaggcacaactacaagagcggaatgaccctcagcaactgctattagatgccaagcacatgtttcctgttttgtttccatttaatccatcttctctaaccatggactcaatccacatcccagcgtgtctcaatctggaattcctcaatgaagtctgaagatgcatgtttccagcattagtttgattcccaatgtgagcaagaaggaagtatatacagtaaagtaaattcaaggatctgttaaatctggtaaaagtagatcaaatcagagattgacagcctgtggagggtgctgaactatacagaattagacacaactatgtcattattttttgtacctactgctcagaataaaaacacttgaaatatggaagattttaagtttgatttcagtccaacacatatacataatttatagacaccaagcagtccccatagacatataaaaggtgtcaattctataaaacgaagctgcctagttttgatctttgcatagaactagagaatgtccaaattaaaataccaaatatatataagtcacataaattgccttcaaagggctttaacaaataatggtactaataaccatgataatggcatatactgacatttcccaaagtttgcaaaccataggtgtggttgagtttgtggtgagatgttttaagaacaaaaatatggggatgagacttctgagaaatattcccaaaatattttttaatggctgattatacacagacagtggtgtaactgacctccagaccagacattttgagtactggtttctgaagcaaaattagaagtgccagtcctcagtgtgctcaaacgcttttgtgttatcttgatttaatggaagagattattaaaatgctgctatcccaaactccaagtgagaaagatggaaaaatattttgtttctgatgctagtccatacactttccaagtcccacaaaactttcacaaaaatgtatataagctaaatattagaaacggataacaaacttgttttatttatagatgtaaaaaccaaacaagtcaatatgaaagcttttaatctcttaataccattaagcttccagtaagagcatcacataatgctctactgttccagaaaccaaatagtaaaacaaactaaagttcgcacatcagatcatctgaaaaaccttcaaaaataatcagttcagggatattatacaaaagtttgggttttttttttttaagagaataaaatggcttaggtcaactttcccttttcaggttattttcaacgtttttcaaatttagcacacaaaaaattgtaaatatctctcccacaaaataaggattttaaaaaagtaattcagtaatataacaggcttagatgtttgctgctcttagaattttttttaacttgtttttggtttcttcaaaagcaagcattcaattggaaacccatattctttccacacttttttttactgtcttttctgtatttcttgatagcagtatgctgttcccataagaaaaaaatggtatttgcaaatcatggaagaacagcctctgtattacattgagaaaataagatttatccatgaattggaagtagaacagcctgccttcaccctcttttactcaaccacccaacttaaaaggctcttggaaacacagcacactccacgctaccttctgcactgtgcccttagagcacagcttcctcagttgttctctgcatctcctggggcttaggccagtcttagcctgggttaaggctgctgacattgtgttccaatcagttgtcatgggcattatcccctctacatccacattaaacatgccggcttctcttgggcatcggcagagctgtgcctttttctttcagttacagttacataatcactgacgtccatgacacttacccatggatccatgtgctgacttcatttagaaggccaatctaaaacaactgggtttgtggctacctctttaaagttgtttgtgaaggataatttgttttttaatgcactttagtttgaaagtgagtctcttatgtaaggaccatccttaaaagaccaaaaatgccttgttagagtgttaaggagttttgacatgcagtggttccacaaacacagtggcttactatccttatacactgtcttataccatcattctctccatctctcttggtcactactctctgctgtcactggttaatcactaggtgccaagagcttactgaataaaagcttggcaattagaataaatggggagggaaggaccttatgaatagtccatttagcctaagaaatggcagatttagttcttctcttccaaaagataaaggtatatcctggaattgtacttaaaacttacagatgactaacaaatatatactttatatgtagttaatatttagatctgtcttatttaatacttggaggctagaagaagcatctttaggggaactatataatcttttgttagcattttctctgcattttaaaaaatcatttcaattcaaacatttatcagtgtcatgaaatcagtaatgactctttaacaattcaggtttgaactctgcattagatgtctctttaattttttaatatttaaaatttagttgacatttttttcaccaggtgcctttagcggttactaagataactgacatcagttgtttctctgaaataagtgttgctgtgggaataattttaatgttcaaggtgatatcatgggggagttttgtcttttaaaacattagaagcattttaaatattaagaatcaaatatttatagatcaaaacttgtgttttaagtattatacgggacctgtttacttatagtaaatgtgaatgtacacatgagttgttgctgaagctgacaagcatattacatacatgcattttccctgtgccctcatagttgcagttagagttccagtacctgtaggctcacctgggaggcagattagacccaaaggtagatgtttttcccctttccatgaagcatgtcagtgggagttgcttcctttgatttccctagtactaaattttaaggcttttgtaaaaacaaaacaaaactaggagcttggaacagttaaaaatcaacactgctaccatcaattcatcaaatatttacttagagctttcatacattaagattccagtaaccaataaattagaattcatttcttctgcataaagtaaattttcatacacttgacctactaagacagcaagggtgtcctaaattgaggcatttgtataatgcctgcataactaaatggtcactaaaatgggacagcatggggcaagaccttgtagttcttcacagaatatttgtggtcagtttctccaattaatttgctgcatgagccaaataaccataattcactttttatacccactggtgccataattagagaattagagggtgtagacagaggttaatgccaatgagaaacacaggacagggttttttttattataaaggtcattagatacaaaagattgtttttcaaaaaatttctaattctaacaaaggggatcaatcagaaatgaaactaagctactttctaaagtgacactgtatcagaataatccagatttgaatataacattttgccaccaactgacatttagatgaaggactgcctctctgaaagagttcagatcatattcaggggtgaatccaacaccatggaagaaagactactgatgaaaatattttcccactttgcacaaatctgtaaactacacctttgtttatagaaaaatgcttgtaatagtcactgtaatatttagctgtggataaaaatttgtggaaataaatacttttgaataaagaggtgtgccaaatctaaatgaaattt

SEQ ID NO: 216 - DNA, 5080 bp, Homo sapiens
ccgccgaccaccgaagggggcatcagagaccctcggagaaaccaagcccagggaggagcttggaaggcaaggagaagggattcctggtcacctcccttgctcttttcttcctggatgaaacaagaagataatcagggtgtctgtgcacaccaggactcagaagacaaagggatgggttctgattttgaggactctgaggacagggaaggggacccagaagaaagagaaatgggctctaatccacatgacacaaacaagagagaaggccatccggagccggagatgggctccaacccacaggactcaaggcacagggaagcagtgcccgacatctgcacagaggggcagctgagtgaggaagaaggcgtttctgtccgtggggaagaggatgaccaatccggtgtagctgacatggcgatgttcccaggactgtctgagtctgacagcatatcccggagcctccgggaggacgacgacgagagtgctggggagaaccggctggaggaggaagaggagcagccggcccctcccgtacttccctggaggcgacatctctccctggggagtcggcaccgaggtgacaagcccgcccaccgccgcttccaccggctccaccaccccatggccgtggacctcggggagctggatagcctggtggccagcatcatggacgcgcccaccatctgccccgactgcggggagagcttcagtcctggcgccgccttcctgcagcaccagcgcattcaccgcctggctgaggccgctgccgccgccagcctggagcccttcggcctggcgggcgagtgcgacgcgatggtgggcatgatgggggtgggtgtggcggggggcttcggggccgggcccccgctggcccggcccccgcgcgaaaagcccttccgctgcggggagtgcggcaagggcttcagccgcaacacctacctgaccaaccacctgcgcctgcacacgggcgagcggcccaacctgtgcgccgactgcggcaagagcttcagctggcgcgccgacctgctcaagcaccggcgcctgcacacgggcgagaagccctacccgtgccccgagtgcggcgaggccttcagcctcagctcgcatctgttgagccaccggcgcgcgcacgcggcggccagcggcgcgggggcggcggcgctgcggcccttcgcctgcggggagtgcggcaagggcttcgtgcgccgttcgcacctggccaaccaccagcgcatccacacgggcgagaagccgcacggctgtggcgagtgcggcaagcgcttcagctggcgctcggacttggtgaagcaccagcgcgtgcacacgggcgagaagccctacatgtgctccgagtgcggcgagaccttcagcgtcagctcgcacctcttcacgcacaagcgcacgcactcgggtgagcggccctacgtgtgccgcgagtgcgggaagggcttcgggcgtaactcgcacctggtgaaccacctgcgcgtgcacaccggcgagaagcccttccgctgtggccagtgcgagaagcgcttcagcgacttctccacgctcacgcagcaccagcgcacgcacacgggcgagaagccctacacgtgcatcgagtgcggcaagagctttatccagagctcccacctgatccgccaccgccgcatccacacgggcaacaagccgcacaagtgtgcgggctgcggcaaaggcttccgctataaaacgcacctcgcgcagcaccagaagctgcacctgtgttaggggctgggtccgcgggaggctgccgtctggggagcctgtggggggtagatatcctgggactgacccaggggaaggaagtggggaaggggcgggagggacaatctgagagtgactggggagcctttggtgtttggggtttcctgaagtgggaggagtgttgagtaagttggtctttcccggtgctatacttgcctcctctccacggaagaattgttcaggagatgcgcttggggtgatgacttccttaaatacacgctgtagggggtgaagagcttggaggaccaggcactttgaggaagggcagttcgtgggctggggtgggaacaggatggcgggcaatagactagggtaggccgcgatggcctgtagaaggttgcggggagagggtttaaatgagggttatggggcgaaataaaaccaagtataagtgattctatcttggtcccaccaagagtttgcccgatctccacacatcacctgttgtctcacaaaaagtaggggaaccttgtcagtcacataggacaggatatttaatgtacttttcctttctctgagccacagttagctgctattttgaggcatccaaggggaagtgggctgaaaaacgccacactcatttcaaggggcaatgtctggggtttagaaattcatttataactggttctctgatgtgggaaatcctgattctgtcccgggttctttgctacttccttgaaaatactctagcttcatgctgggtcaaggtggtttacctggatgacccccctcccccgccctcgcccatcccaggtgtgtgccacacccagtatttctttcaggtctcaactgtggtgttttaagtgcagggaaaaggaacaatcacagctatgtgtgactttccttttcccacctcaccttgatgtaggtgtttcaagtgaactttagaccaacagttgcccagtgacctgctaaaaagtcaactagctcagagttttgctggcctttatgtgagaaatccaagaaagtgttcacttttttgggatgcgagactccttggtctcatttgccttcactttgcatttgttagtgacctccactaacccccacttccatgcatattgacgagggatctagtctaagtaagaatgtcttttgcctgcgcgtggaggcacagtagaaatctcaaggctttacccagaagagcccagtcagggagaggtgtaaatgcaaaattgccaaatagcacaaacaatgaatgttttctggttgttatatagatgccaaaatagcactttgatatttgcaaagtgctttatgctttttaataattgttagctgtttctcacatcattgtgagttagatcagtattatgaccgctgtcttagggaaggcctgggaacaggagtgtgcaggctgtcctgaagagaggctgaggacagtgtgaataattgtagcctgaccttttgcattctccagctcagctgctaggaagacttacttgtcatgatttatataataaaattaaggacactgaaaattcttatgcttgatgaaaaacttaaggctagcctagaagggccaaacatgtccttattgacaaagctggtctttgtcgcctaattagggtatcctagctatgttccatttctagtaaggggctgtagttagatgactcttgtatagatttcagttacttatgctgaagatccctgtgctaggttagcctttagaagttagagttgtggaaagcagtattgttttcttctctagtgattgttaccctacacatttcatggaagcatcttcacaaaatatcagacacagtggaagggggaaaaaaagctacgagattgtttttacacttttagcaaagtttctgtggatgctagtaatttatacttgatcagttgtattctagtaaagaacctctttggggactgtaggaaagcatgtttttgtggttataaaaacacttaaaaatcctgataattctgggcttgtataatgcctgttgatcttgccctcttaatcagtttattgttattcacaaatgcaaataggttttcaaactacagacagttttgaaagacattaattctcattttcttctagtcaggagtaatacaagcaaacaagtgtccgttttgaattctgatttgtaatctgaatactaaacatattagacccacctgaaaataatatagccaatttctaggtaatcttactgctttgtgggtttctttccatgtacatctacctcttccagctgttttaagttttctcaagtctgtgcctatgaaatctcatccaacttttgattattcatggattgattatccgctttttttttgcttttttgctgccattgctatgcctggtctcgtctgcatcaaatatactacatatcagcaactttagagaatgggttcaacagggagtggagagtgaagctaatgtaaaatagtttagtggcagtgggaatctttggacttcatttacctctctcattatttctattaccatggataaaaaagtcagctgctacgttgatatcccttctatgagcacattcttagcagaagaaaacaatccaactaccaacacccgactctattggtgcatttaaaatgtgattccattttttcttacaattcttcagggaacttacctgcattaagtgaggttaaatgcattcaggaggttgtttgtttcttctatctagttttagaataatatttcttcggcaaaccctgctaactgcggttcacccttgaaaacgttaatctgaggactttttccaccaactcattaatgatggtggaagcaagtgtattatttgtttcctggagaatttgatgaagagcagtcttcctctgctgccctttactaagcaaaacctggagcaatttaaataggctaaatggttttgattaaatcttgagctccgagttggaaggagaaaatgagaagttaaccccttgagccatgtggtctctttacaatcaagagactgtacatatgtgaaaaaatacaaattaaggacctgtgttcatagacaatctaaactgtgtttctgaagtttgtgcacatttttcttcactgtaatgttattttacagctgtttgttaaaatagtgaataatttaatgatcctaaaagtaacaggtttcgtgtgagtgtgcttgtatacgtgagatttgccttattttcaggttgttttatttaacgatggttccttggacagcattctggtgttcagcaaccaatatggaatatttgtcattaaatccatatcagtcttttaccatgtcattcttctttgccacacattaaatgtcactcagctcta

SEQ ID NO: 217 - DNA, 6320 bp, Homo sapiens
aaacgcgccgcggggctgttagctcggctgggcacgggcggctccgtggcgcttcctgccacgccaggcctgcctgggccgcgccagcgccgctccaccgagggccgcgcgtcggccgccgccgggcctggatggggccttacctgccaggctgatcccttggagtagttctgaggcatgatgagtcatccgtgtgtgtctcttttgggcgttcctgttttaaatcctgccttggtccctcacctggcacaaggacaagtgctactggtgtcagacccatcgcccaacactgatcctgctaagtactctgaaagcacctccgcgacccgacaccagatgaagggggaagatgcccagccacaggagatggcgtccacaagcttcccaagggccagtggtcccagtcctgaattcagacagcacggggactctgacgggaagagagggagcccacagaatctgcccatagaacatcattttgcttgtaaagagtgtggggacacctttcggcttaaagtcctgcttgtccagcaccagagagtccacagtgaggagaagggctgggaatgtggcgactgcgggaaggtctttaggggggtggcggagtttaatgagcacaggaaaagccacgtagctgcggagccccagcccggccccagtagggccctggagaatgccgcggagaagagggagcagatggagagggaggcaaagcccttcgagtgcgaggagtgcggaaaacggtttaagaagaatgcaggcctgagtcagcatctgagggtccacagcagagagaagccctttgattgcgaggaatgcgggcggtcgttcaaagtcaacacccacctcttccgacatcagaaacttcacacttcggaaaagcctttcgcctgcaaggcgtgcagcagggatttcctggatcgccaggagcttctcaagcaccagcgcatgcacactggccacctgcccttcgactgcgacgactgcggcaagtccttccgaggggtcaacgggctggccgagcaccagcgcatccacagtggggccaagccatacgggtgtccccactgcggcaagctcttccgaaggagctcggagctcaccaagcaccggcggatccacacgggcgagaagccctacgcctgcggccttccgtgggccctctgacctcatcaagcaccggcgcatccacagcggactgaaaccctatgagtgcgacaaatgcggcaaggccttccgccggagctccggcctcagtcgccaccggcggatccacagtggggcgcggcgctgcgaatgcagccagtgtggccgcgtgttcaagaggcgctcggcactgcagaagcatcagccaacccaccacgagtagaaacgccctgtggtcccgcgggacagggacggagtccccagaggggatggcagagtcaaaggagatgaacagttttgtagcgcttatatattttgtcttccaaaaggttgagaccgatttatactgccaccagcaatttataagtgttacgttatgcccatcaagagtagcttgtaccatttaacttagtttggctagtttaactggtaggaagtaccatcaaggtatttcagtccacatgccttgaatccaagaatgagagaggacaaatctggatgtggggtagggaggggcttagaggtcatcaactccaagctccccccgccccagagaaacacacagagctgttccacgatggcgtcctcataatgtgatcccagctttcctgaagagaacgttgccctcatgatttttggcctacttgaatttataaatttttagggatgtaaatagaacactcaaatgtcttaaaatatttaatttattaatttagttatacatacatactgtaaatcacatattatataaaataatatattaatttagaaaataccccatttttgccaccctccctttcacgaaatcattttactctgactcctcaccgtcttcaccaacatgggaaccctgtttgagtcatcagacagtttcaagacacacccagtcacttccatccgagctctgcacggtcgctcagtgacgatcccttcatgaggctctcattagaaattttctcccaagccataagaccatatttgcagaacattaggacgatttctcttgtcgttttttaatctgtcctgtgactgtacaatataaccacttaaggtcatactttttcaaacaacctttaaacgtcttttcttttaaagcacccaaaatgtcattgtgaggccaaacgcctagtaacagttactgaatctgggttaaatgtcggtatctttttttcttaaaccatttcaatttggtgtcccctatacatatccaaaactagcatcgattggggttgttttgaactaatgggtcttgtcctcaagcagcactattttgttcaaaataaaatagttgagagcatgcccctaagaagagatacatctcaaggactcaagtgcagggtgacgcctccttttggaaatgagcctctcctggtatcaggcctagatggtacttctccagccttccgtttcttgttctataaaacaggggtgatcacagcacctacctccgaaggttatcacgaggactgccatcgtggctgcagagtgccaggaccaccggcctggtatggaggtacacactcagtgaaggccatctgctgtcattgtcattgtcatagttattgccgtcattctgtggcttgtcaattccagaactggggatagaccccaggcctcctgaccaccagtctcatctttctcttatgcgatgacttaaatggtgtttctgttttttgcatgcaaatggtccgttcatctcctttgactagttatcaacttaccttcggatatattaactttatgtagcagttctttctatattgatggtgatgttctcttttccaattttattgctttgctttttgtagcagttttattacgtttttgttgtgaaagcttttaatttttacatatccaagcattcattttttgtccactcagtcataactttcattgcttctgtagctagatatgatgacattttctctagaattttaattacaaacaaaaagctgcaaccccagcccatcagaaggtgagtacaccaggtgggcaggctggatggaaatgggccagagaagcaggctctttcctcatccgagatgcggactccctgtctatctgtgggcaccacttgactatccaacctgaccactgcggcacactggagatgctcccatcatagattagccagaactctgtgactgctcatcattatagaccccgccagcagcagtggggcttggcctcacctagatcaatggagtggtccaaacttggtctgggagcaagcagcccagccatcctttgagctcctgggagccttggcaatgctccgagtggattcagtgactgagcagcagattcacccaagaaacatctccttggacacaagaagacttgcctagaccacatcctcctttcagccggtgactctagaactagaaagagattggttcataggcttctgctgtgggcagctaggggaaaattcacccatgtgttctggcatcacttcctatagccacacctaagtgagggcaacagagcagaggctcggagaggaaccctgcccctccgatggcttgtgcgttatgctgatagaagctggcagcactgccctgggctatgatttgcaacagccatgcccaggaggagcactaaagcaaaggtttggagggcagtggaacccttctgaaagcctgtgtggcatagaagtagaagctggtcctcctgggtctgagctaccatttccagtgggctcccccaagaggaacagcagcaagggctagcgaggaacctgcccctccagtggcccacagaagccacagatagaagccagccccaccagggctgtgctgtgacttcccagcagctgtggctggggacagggacactaggagggcctggcaaggaagtgtgcccttctcgtgggcccaccaaggctgaggcagagcttcctagcagacacaacttggaagggcttctcaggcacccatcctgacccccaggctggagaggagccaaaagcacttgttacatagtgattccttttgccctgtgggcctcagttcttgcagtagttgtgaatctgtgtctgaaatcactactttcttctcggatcctttttctcttttcgagttgttaggatgtgttttgtacagctgtcatttgataaagaaggttgacctctaccaggggcaagtctggcacctttacctagaagtactctgccatgtcttgcccgttcatttatcgtttgttgggtttcatgagggatcccattgaagtagatcccttttatgaagggatcccattgaatgcagcattaactcagaacgtagcataaagtcgtcactgctcccagctgggacgtggtgtcttggcatcccttcctgccgtccttgactctttcccatcttcagttctataattttctcccaaacaaatgctcttttagagttaacactaaagatctggtctttgccgtcaaggttgacagaacagctgttcatggtgtttgcggtgaaacccgtgttctctttcaatgcagtctgtggctttaacgtgtgtcctgtaatttcgccaagatcatttcttgcctctggtaacttgggggtggatttccttgggctctctaggtgtactgctatgtcagatgcaaaatgtcacccagcttcctgtcacatatccttgtctgtgcattcatgcatctacctcattccggttttctttctaatctcatgtattcctgttgtgaggaaatgtgttcttttcccgatccttttgtagttcatacacatgacaattgggtttccacgcacgtgcatgagatgttcctccttcaaaccttgttactatgtcagcacattaactgcctggcatggaaaaagaaaaaaaaaaaagaaatatgttcttttcctaccatttgaaaaaaatcctccattgcttttattagagttttgaatacttgtgaaaattttcaaaagaaagtaattgattaccatttttgctgcttattacgatgagctgtgtccattagctgtgtcaccccactcttgcatttccagaatagtccctacccaattgcagcgggcatgtttttgagtggtgttgcattccatgtgcttgattttgtcctagaactggcacagcgcctgccctacctgcagccctgggttgtggccctgttgcgtaccatgtgatttgccaccccgcttctaggccatattaattcagccagaactgaacacctgacccaagggcagcaagcaatcatcagagcatagagctgacagaacatgatggaccacggacaccaccaggccttccagatctgaaatgcaaacaaggaaacagaagcttctaggcatcagaaggtgtggggagcagcacagtactcagaggagtgaggagcgtggcgcctgctgggaggaaggcctggccatggtatgttcttggatttctggcagcagccctcattggtccacgtgcgtccccactacagactccttgacttgagccagcttgagtgggtctctactcttttctattgtgttttgccacttggctgcttcctggccaagtcgcacctgactgcatgaacacctgttcaaacgtgtgttctctgttctctaagatgggtgaaagtcgatgccttctagtctcagtgaatttaacctgtgattttatgtctacgtatattgttcctttactgaacccaccacatgcgggccataaaatgagtgaaatcacagtgcaccctgttctcttatttttgaagtgtttcacgatttccagcatgtccatcagatggggggattgctaacttctctcttactcatgtacttacattctgtagttctcattgcatcactttggatgtttactttgaaaagcagaaactgtctctttaaacttggccctcaatgtcatttgcgtatctctgagaacaatagctatgtcccaccccagtttgtatttccgttggttgttggcacttttttctcattcccccatctcattaccttgtctgttttctggcactcactataatcagccttgcactagagctgtttgtggacttggcttcaccccctcctcctcagccctcccccacccattaaattgtgagctcttagaagacaggggtggcctttcatgtctgatcccctaccaaatctagcacagtgccttgcatcaagtagatttcaataaatatatgttaaatggca

SEQ ID NO: 218 - DNA, 11425 bp, Homo sapiens
gcgcgcgcgcaggctcttcagctggagcggacacacggtgtgcgaaccgaacagaataacccgcccccagcgggatgtgaaggactccgggtgaggccggccacgccccgcacggatgggaaggccattgtgactatgtggtgattacagttgtcttactactgagtttcctactgaaatcatggaggagaaacagcagattatattggctaatcaagatggtggaacagtggcaggagcagcacctaccttctttgtcatcttaaagcagccaggaaatggcaaaactgatcaaggaattttggttactaatcaggatgcctgtgctttggctagtagtgtgtcatcaccagtaaaatctaaagggaagatttgccttccagctgattgtactgtgggtggaatcactgttaccctcgataacaatagtatgtggaatgagttctatcatcgaagcacagagatgattctgaccaagcaaggaagacgcatgtttccttactgtcgttattggataacaggtttagattcaaatttgaagtatattcttgtcatggatatatctcctgtggataaccatcgttataagtggaatggtcgttggtgggaacctagtgggaaggctgaacctcatgttttggggagggttttcattcatccagaatctccttccacaggtcattattggatgcatcaaccagtatctttctataaactcaaacttaccaacaatacactggaccaagaagggcatatcatcttgcactctatgcatcgttacctgccgaggcttcatttggtgcctgcagaaaaggctgtggaggtgatacaattaaatggccctggtgtccacacttttaccttcccacagactgaattctttgcagtaacagcttatcagaacattcagattactcagctgaaaatagattacaatccatttgccaaaggctttcgggatgatgggctgaataataagccccagagagatggaaaacaaaagaacagctctgaccaagaagggaataatatttccagttcttctggtcatcgggtccgtcttacagaaggtcaggggtcagagatacaaccaggtgatttggatcctttgtcaaggggtcatgaaacatcaggcaagggtttggagaagacttcccttaatataaaacgagactttcttggtttcatggatactgattcagcacttagtgaagttcctcaattgaagcaagagatttctgaatgtcttattgccagcagttttgaagatgactcccgtgtagcctcaccgttagaccagaacggaagcttcaatgttgttattaaagaggaacctctagatgattatgactacgaacttggtgagtgcccagaaggggtcactgtgaaacaggaagagacagatgaagagacggatgtatactcaaacagtgatgatgatcctatactagagaaacagctaaagaggcacaataaagttgacaacccagaagctgaccatctatcttctaaatggcttccaagcagcccatcaggtgttgctaaagctaaaatgttcaaattagacactggaaagatgccagtagtctatctggagccctgtgctgtcaccagaagcacagttaagatttctgaactccccgataacatgctttccacatctcgaaaggataaatcttctatgttggcagaattggaatatttgcctacatacattgaaaattccaatgagactgccttctgcttaggcaaggaatcagaaaatggtcttagaaaacattcaccagatctcagagtggtacaaaaatatcccttactgaaagagcctcagtggaaatatcctgatatatctgacagcattagcacagaaagaatactcgacgattcaaaggattcagttggagactcactttcaggaaaagaggacttgggcagaaagagaacaactatgcttaagattgcaacagccgcaaaggtagtgaatgctaatcagaatgcctctccaaatgtccctggaaaaagaggaaggccacgaaaattgaaactctgtaaggcaggacgaccacctaagaacacaggaaagtctttaatttctacaaagaatacacctgtaagccctgggagtacctttccagatgtgaagcctgatctggaagatgtggatggtgttctctttgtttcctttgaatcaaaggaagctctagacattcatgcagttgatgggacaacagaagaatcttctagtctccaggcatcaaccacaaatgactcaggttacagagcaagaatttcccagttggaaaaggaattgatagaagatttgaagactttgcggcacaagcaggtgatacatcctggtcttcaagaagtgggcttaaaattgaattcagtggatccaacaatgagcattgatcttaaatacttgggagtacagttacctttggctccagctactagctttcctttttggaaccttacaggaaccaaccctgcctctcctgatgcgggatttccctttgtttctaggacagggaaaaccaatgatttcactaagatcaagggatggaggggaaaatttcatagtgcttctgcatctaggaatgaaggtggaaattcagaaagttcactgaaaaatcgttctgctttctgtagtgataagctagatgaatacttggaaaatgaaggcaagctgatggaaacaagcatgggtttttcttctaatgctcccacatctcctgtggtgtaccagcttcccactaagagtaccagttatgtacgaacacttgatagtgtactaaagaagcaatctactatttccccttctacctcttattctttgaaacctcattctgtaccccctgtctctcgaaaggcaaagtctcaaaacagacaggcaactttcagtggccgaactaaatcatcttataaatccattttaccataccctgtttcaccaaagcagaaatactctcatgtgattctaggagataaggttaccaagaattcttcaggcatcatctcagaaaatcaggcgaataactttgttgtgccaactttggatgaaaatatatttccaaagcagattagtttgcggcaggcacagcagcagcagcaacagcaacagggaagtcgccctccaggcttgtctaaatctcaggtgaagctaatggacctggaagactgtgcactttgggaaggaaaaccaaggacatacatcacagaagagcgagcagatgtatccttaacaactctacttacagctcaagcatccctcaaaactaaacctatccacacaatcataaggaaacgagcccctccctgcaacaatgacttctgtcgactgggttgtgtatgttccagtctagctttggagaagcgccaacctgctcactgccgccgaccagactgcatgtttggttgtacttgtttgaaaagaaaagttgtacttgttaaaggaggatccaaaactaagcattttcagaggaaggctgctcatcgagatccagtattttatgatactctgggagaggaggcaagggaggaggaagaaggaatcagggaggaggaggaacaattgaaagagaaaaagaagagaaagaagctagaatacactatatgtgagacagagcctgaacagcctgttcgacattacccattatgggtaaaagtagaaggtgaagtagatccagaaccagtttatatccccacgccttctgtcattgagcctatgaaaccattgttattgcctcagccagaagttttatctcctactgtgaagggcaaactgctcactggaattaaatctccacggtcatatactcccaaacccaatcctgtgattcgggaagaggacaaagatccagtctacttgtactttgaaagtatgatgacttgtgctcgagttcgagtatatgagcgaaaaaaagaggaccagagacaaccatcttcctcctcctccccatctccatcatttcagcagcaaacttcatgtcattctagccctgagaaccataataatgcaaaggaacctgattctgaacagcagcccttaaaacaactcacctgtgacttggaggatgattctgataaattacaagaaaagagctggaagtcttcctgcaatgaaggagaatcctcttctacttcttatatgcatcagaggtcacctggtggtcccaccaaactgattgagatcatctcagactgcaactgggaggaagatcggaacaagattttgagcatcttatcccagcacatcaatagcaacatgccacaatcacttaaggtgggcagcttcatcattgagttggcttctcagcgaaagagccggggtgagaagaaccctcctgtttattcttctcgtgtgaaaatctctatgccatcatgtcaagaccaagatgatatggctgagaaatctggatcagagactcctgatggtccattgtcccctgggaaaatggaggatatctctcctgtgcagacagatgccctggattcagtgagggagagattacatggaggcaaaggtctgcctttttatgcagggctttctcctgcagggaagcttgtggcctataaacgtaaacccagttcaagtacatctgggcttatccaggtagcatccaatgccaaggtggctgcatccaggaaaccacgtaccctgttgccttcaacatccaattccaaaatggcatcctcctctggcactgcaacaaatcgccctgggaagaatctgaaggcgtttgtcccagcaaaacggccaattgaaaatgctgctcaaattccagtggctactccacaggtctctcctaacacagtgaaacgtgctggacctcgattgttgttgattccagtgcagcagggttctcctactcttagacctgtctcaaacacacaacttcagggacatcggatggtcttgcagcctgttaggagtccaagtggaatgaacttattcaggcaccctaatgggcagattgtccagcttctacctttgcatcagcttcgaggctctaatacccagcccaacttacagcctgtcatgtttcggaacccagggtctgtgatgggaatccggttacctgctccttccaaaccctctgagactccgccatcttccacttcgtcctctgctttctctgtcatgaatcctgtaattcaagctgttgggtcttcttcagcagtgaatgttatcactcaggcaccatcattgctttcctctggagctagttttgtgtctcaggctggtacattgaccctgaggatttctcctcctgaaccacaaagctttgcaagtaaaacaggctctgaaaccaaaataacttatagctcaggaggacagcctgttggtacagccagtcttattcctctccagtctggtagttttgccttgttacagctcccaggacaaaagcctgttcctagctccattcttcagcatgttgcttcccttcagatgaagagagaatctcagaatccagaccagaaagatgaaacaaactcaataaaaagagagcaagaaacgaagaaggttctacagtcagaaggagaggctgtagaccctgaggctaatgtaataaaacaaaactcaggagctgctacctcagaagaaactctgaatgattccttggaagataggggtgatcatttggatgaagaatgccttccagaagaaggttgtgcaactgtcaaaccatctgagcattcctgtatcactgggtcacatacagatcaagattataaagatgttaatgaagaatatggggctaggaatcgtaagagttccaaagaaaaagtggctgttctggaagttaggaccatttctgaaaaagccagtaataagacagtccaaaatttaagtaaagtacagcatcaaaaacttggtgatgtgaaggtggaacagcagaaaggatttgacaatccagaagaaaactcaagtgaatttccagtcacctttaaggaagaaagtaaatttgaattgtcaggaagcaaagttatggagcagcaatctaatctacagccagaggccaaagagaaggaatgtggagactctctggagaaagacagggaaagatggagaaaacatctgaagggccccttaaccaggaaatgtgttggagcttcacaggaatgtaagaaagaggcagacgagcagttaattaaagaaacaaagacatgtcaggaaaattcagatgtgtttcagcaagaacaaggcatctctgacttacttggaaaaagtggaattactgaagatgccagagttttgaaaactgaatgtgattcttggagtaggatttctaatccttcagccttctccattgttcctaggagagctgcaaaaagcagcagagggaatggacattttcagggtcacttactgctacctggagaacagatacaaccaaagcaagagaagaagggtgggagaagcagtgctgacttcactgttttggatttggaagaagatgatgaagatgataatgagaaaactgatgattctattgatgaaattgtggatgttgtttctgactaccagagtgaggaggttgatgatgtagaaaagaataactgtgtagaatacattgaggatgatgaggagcacgtggacattgagactgtagaagagctctcagaggaaattaatgttgctcacctgaagaccacagcggcccacacacagtcattcaaacagccgtcctgtactcacatctctgcagatgaaaaagcagctgaaaggagtcgaaaggctccaccaattcctctaaaactgaagcctgattactggagtgacaaactacagaaagaagcagaagcgtttgcttattatcgccggacacacactgccaatgagcggcggcggcgtggtgaaatgagggatctctttgagaaattaaagatcacattgggattacttcattcttccaaggtttccaaaagtctcattcttactcgagccttcagtgaaattcagggactaacagatcaggcagacaaattgataggacagaaaaatctcctgactcgaaaacggaatattctgatacggaaagtatcgtctctttcaggtaagacagaagaagtggtcctgaagaagctagagtatatttatgcaaaacagcaagcactagaggcacaaaaaagaaaaaagaagatgggatcagatgagtttgacatatctcccagaattagcaaacagcaggaaggatcttctgcatcatctgtagatcttggacagatgtttataaataacaggagggggaaacctttgattctttccagaaaaaaagaccaggccacagaaaatacctcacccttgaacactccacacacctctgccaaccttgtgatgactccgcaagggcaattgctcaccctaaaaggtcccctattctcaggaccagtggtagctgtttctcctgatctcttagaatctgatcttaagcctcaagttgccggtagtgctgtggctctaccagaaaatgacgacttatttatgatgccacgaattgttaatgtgacatcattggccacagagggaggtttggtagatatgggtggcagcaaatatcctcatgaagttcctgatagcaagccatctgaccatctgaaagacaccgtcaggaatgaagataattccttagaggataagggtagaatctcttccagaggaaacagagatggcagagtgacgttgggtccaacgcaggtttttctggcaaacaaagattctggttatccacaaatagttgacgtttccaatatgcagaaagcacaagagttcttacctaaaaagatttctggtgatatgagagggattcagtataaatggaaagagagtgaatcaagaggggagagagtgaagtcaaaggattcttcatttcataaattaaagatgaaagatctcaaggactcaagcatagagatggaactgaggaaagtaacatcagctatagaggaagcagctcttgattccagtgaactgctgactaacatggaagatgaggatgatactgatgagacactgacttcactgctcaatgaaattgcctttcttaatcaacaactaaatgatgactctgttggcctggctgaactacccagctctatggatacagagttcccaggggatgctcggcgggcttttattagtaaggttcctcctggaagcagagcaactttccaggttgagcacttgggaactggtttgaaagagttgcctgatgttcaaggggagagtgactctatcagtcccctcctcttgcacttggaagacgatgacttttctgagaatgaaaaacaacttgcagaaccagcctctgagccagatgtccttaagattgttattgactctgaaataaaggattccctcctttccaacaagaaagctattgatggagggaagaatacttctggcctccctgcagagcccgaaagtgtgtcctcaccccccaccctacacatgaagactggcttggagaacagcaacagcacagacactttgtggaggcctatgccaaagttggcccctctaggtttaaaagtagctaatccttccagtgatgcagatggtcagagtctcaaggtgatgccttgtttggcacctatagctgccaaagttgggtcagttggacacaaaatgaacttaacagggaatgaccaggaaggccgggaaagcaaggtgatgcctacattggcacctgttgtggctaaattgggcaactcgggggcctcaccaagttctgcagggaaatgaacttacttgtccttaagcagaagccaggctgtgaggggaaatagatctcacctcctttctctgcaggcatctgtttgtttgtgtcttagaacttggatccttgacttcaatgatgcagtggataatgatgggagaaagggggtagggtgctgaccctggtataagaagtactctgaaattctgatcatgttaaaatgtgttacctcacttgtggtgctgggtcccctcatcctctctaagaagatgtgatccattactgaacatgaggtgcccctcttacccaaggaatttataacatgactctggctccacagtggtttctagttcttcccccacaagcgaaagagctgtttgcaactttggagttgctgtagactgaactgtagcttgtagctgttgaattaagtccaaaatctaaggaatgcgatggacttgtgcaaagggatccagaagagacactttttagttgatgtttcaagaatagggagagagaggatgggtaccatggaataccaaagtgaaggactttgtgtcattcagtaaaattttcttttttcatatcctaagtagctcccattccctcaccttttcaatcagaattaacaaattcaagccttcagtaaagtagggatgcttttaacttttattattaattattttgagatcttaaaaaaatagtagttctcccttattatttttgtgggcattgaaaagctcatttcacagtaccagagatttttactgggagtatatattttggaggtaggcatagagggagccctaccccttccacaaattacgttactcaagagacagctaaaataaaatgcattatctccccagaccagagacagtggccaaaataaaaaatcatggggctggaaatttcccaaatcaaaccagcctcctggtgcttgaaggtttcattcactattacctgcacaggatgtaaagaaaagtcacagtaggcactctttaccagggaaataaggcagtatttgaatcacaagatatattttttatctgcaaccatggatccaatgatctgtagagctttttcactcattaactgtcaggatatgaaggactgacagtctgtaaagatatttatatttttgtatagttgttttcatagatttctcaaaggctgaagttttcaacctagaagatgagatttgtattgagtatagaaatgatgtttcctatctagtttgtaaataatcatggtgcacttgaggggtctcttggaaactcctagggggtcaagaatcactattctgaaactgtatagactgggatttagctgctgcattttgcctttcttaaataattatattttggaatgtaacccctgttctgtcttcattgacaggatttgcttgtgttgttaaaacactaacacaagagcttccagtgcctgggccgtgcctaggtgatgctatttcttctatatctcctgtcttctttatcccaaatcccactcagcatatcttcagacctaggttgtaagaccaactttggattggatctagccagtgaattattatttccatggttggttccctttctgttaactctggtaatcaacagattgaaaacggtggaagaacttctgaaaattgcagtgggagcaaattcttgttggttttgtgctgcttgcctttctagatctgctcatcagcacttaaccttccctcctctaaaggttactaaagaagcctgaagtaggtaaagagtgctcctcagcttcttatccttccactctttacccagcagatttcattcaatgccttagccaaggagtccagcacctgtctcccctgctaataattgtccttagagatgctagtactttaatccaggtatagcagtttcccgttattttcttgcttgtcgttcccctacatttcctcctgatttcccaagactctctttgtggcttttgagggtcagccaaggagcaggcaagtgagtgaacaatcctcaggaaaagaaggaccattttagcttaacacttccttttttttttttttttttttaagaagaatataggtaaacaggtaatgattcttgattggagataccatttgactcttgatgagagttgtacgaagatggaaatgagggatgattccaggcgttttagggggaaggctgcagataccattctaacccccaagatactgtgttctcaagacctcttagaactaggtgttgtcagggataatttgaggagggcttagtcttcagaacaatcctgcagtcttgacagaaatctaaaatctccaaaaactcctaccctttaaccttaccctagggggaactgatctatgaatattacatgtgtgattatgaaaggtgaagttgagtgagaggagttgaggaacgtggaagacagtgagctctcaccctaacactataagaagcatgatctcaatagaccaataattcacctttttatacatctgtaaataaatggaatgtttttaagaatataattatgtcagatttagcattttcttttatatattaaatatatatatctttccttttctgctttcgaaaagtgactatttttttagaaatctaagaacagaagtttggtgattgaaaggtagaatatataaacctgaaataaagcagttaaaacaattaaagcagaaaaaaaaaaaa

SEQ ID NO: 219 - DNA, 5625 bp, Homo sapiens
acatccgggcttctgctactagtgagaggaagatggcggccgcggctgtggtggttcccgcagagtggataaagaactgggagaaatcagggagaggcgaatttttgcatttatgtcggatcctcagtgaaaataaaagccatgatagttcaacatacagagatttccagcaagctctctatgagttgtcatatcatgtaattaaaggaaatctaaagcatgaacaggcatctaatgttcttagtgacattagtgaatttcgtgaggatatgccctccattcttgctgatgtattctgcatattagacattgagacaaattgtttagaagaaaaaagcaagagagactattttacacagttggtattagcatgtttgtatttagtttcagacacagttctaaaggaacgcctggatccagaaacactggaatcattagggcttatcaaacaatcacagcaattcaatcaaaagtcagttaaaatcaagacaaaactcttttataagcagcaaaaattcaatttgttaagagaagagaatgaaggttatgccaagctgattgctgaattggggcaagatttatctggaagtattactagtgatttaatcttagaaaatatcaaatctttaataggatgctttaatctggatcccaatagagttttggatgtcattttagaagtgtttgaatgcaggccagaacacgatgacttctttatatctttgttagaatcttacatgagtatgtgtgaaccgcaaacactgtgtcatattcttgggttcaaattcaagttttaccaggaaccaaatggcgagacaccatcatctttatacagagttgcagcagtacttctacaatttaatcttattgatttagatgatctttatgtacatcttcttccggctgataattgcattatggatgaacacaaacgagaaattgcggaagctaagcaaattgttagaaagcttacgatggttgtgttgtcttctgaaaaaatggatgagcgagagaaagaaaaggaaaaagaagaggagaaagtagagaaaccacctgataaccaaaaacttggcttgttggaagccttattaaagattggtgattggcaacatgcacagaacattatggatcagatgcctccatactatgcagcttcacacaagctaatagcccttgctatttgcaagctcattcatataactattgagcctctctaccgaagagttggagttcctaaaggtgctaaaggctcacctgttaatgctttgcaaaacaagagagcaccaaaacaagctgagagctttgaagatttgaggagagacgtgttcaatatgttctgttaccttggtcctcacctttctcacgatcccattttatttgcaaaagtggtgcgcataggcaagtcatttatgaaggagtttcagtctgatggaagcaaacaagaagataaagaaaaaacggaagttatccttagctgtttgcttagcattactgaccaggtactacttccatctctttctttgatggactgcaatgcttgtatgtctgaggaactatggggaatgtttaaaacatttccatatcagcatagatatcgtctgtatggccagtggaagaatgaaacttataacagtcacccacttttagtaaaagttaaagctcaaacaatagacagagccaaatatatcatgaagcgcctaaccaaggaaaatgtgaagccttctggaagacaaattgggaagttgagccacagcaatccaaccattttgtttgattatatcttgtcacaaatacagaagtatgataacttaataacacctgtagtagattcattgaaatacctcacttcactgaattatgatgtcttggcctattgtatcattgaagctttagctaatccagaaaaggaaagaatgaaacatgatgacacaaccatctcaagctggcttcagagtctggctagtttctgtggtgcagtttttcgtaaatatccaattgatcttgctggtcttcttcagtatgttgccaatcagctaaaggcgggcaaaagttttgacctgcttatattgaaagaagtggtacaaaaaatggcaggaatagaaattacagaggaaatgacaatggagcaactagaggctatgactggtggagagcagctaaaagctgagggtggttattttggtcagatcagaaacactaaaaaatcctctcagagattaaaggatgctctattggaccatgatcttgcccttcctctctgtctgcttatggctcagcagagaaatggggtaatctttcaggaaggtggagagaaacatttgaaacttgtgggaaagctctatgaccagtgtcatgataccctggtgcagtttggtgggtttttagcatctaatctgagcacagaagattatataaagcgagtgccttcaattgatgtactctgtaatgaatttcatacaccccatgatgcagcatttttcctgtctaggccaatgtatgcccatcatatttcgtcaaagtatgatgaacttaaaaaatcagaaaagggaagtaaacagcaacataaagttcataagtacattacatcatgtgagatggtgatggcgcctgtccatgaagcagtggtctccttacatgtttccaaagtctgggatgacatcagccctcaattctatgctacattctggtcattgacaatgtatgaccttgcagttccacacaccagctatgaacgagaagtcaataaacttaaagtccagatgaaagcaattgatgacaatcaggaaatgcccccaaataaaaagaaaaaagagaaggagcgctgtactgcccttcaggacaagcttcttgaagaagaaaagaaacagatggaacatgtacagagagttctacagagattgaaactggaaaaggacaactggcttttagcaaaatctaccaaaaatgagaccatcacaaaatttctacagctgtgtatatttcctcgatgtattttttcagcaattgatgctgtttactgtgctcgttttgttgaattggtacatcaacagaaaactccaaatttttccacacttctttgctatgatcgagttttctctgacataatttacacagttgcaagctgtactgaaaatgaagccagtcgatacggaaggtttctttgctgcatgttagagactgtgaccaggtggcatagtgatagagccacatatgaaaaggaatgtggaaactatccaggattccttaccatattacgggcaactggatttgatggtggaaataaggctgatcaattagactatgaaaattttcgacatgttgtacataaatggcattacaaactaaccaaggcatcggtacattgccttgaaacaggcgaatatactcacatcaggaatatcttgattgtgctaacaaaaatacttccttggtacccaaaagttttgaatctgggtcaagctttggaaagaagagtacacaaaatctgccaagaagaaaaagagaagaggccagatctatatgcattggctatgggctactctgggcagttgaaaagtagaaagtcatacatgatacctgaaaatgagtttcatcacaaagacccccctccgaggaatgcagttgccagtgtgcaaaatgggcctggtggtgggccttcttcatcatcaataggaagtgcatctaaatcggatgaaagcagtactgaggagactgataaatcaagggagagatctcagtgtggtgtgaaagctgttaataaagcttctagtaccacacctaaagggaattcaagcaatggaaatagtggctctaacagcaacaaagctgttaaagaaaatgacaaagaaaaagggaaagagaaagaaaaagagaaaaaagaaaagactccagctactactccagaggccagggtacttggtaaagatggtaaagaaaaaccaaaggaagagcggccaaataaagatgaaaaagcaagagagaccaaggaaagaacgccgaagtctgacaaagagaaagaaaaattcaagaaggaagaaaaagctaaagatgagaaatttaagaccactgtccccaacgcagaatcaaaatcaactcaagaaagggaaagagagaaggagccatccagagaaagagatatagcaaaggaaatgaaatcaaaggaaaatgttaaaggaggagaaaaaacaccagtttctgggtccttgaaatcacctgttcccagatcagatattccagagcctgaaagggaacaaaaacgccgcaaaattgatactcacccttctccatcacattcctccacagtaaaggacagtctcatcgaactcaaggaatcttcagcaaagctctacattaatcatactcctccaccactgtccaagagtaaggagagagaaatggacaagaaagatttggacaagtcaagggaaagatccagagaaagagagaaaaaagatgaaaaggacaggaaagagcggaaaagggatcactcaaacaacgaccgtgaagtgccaccggacttaaccaagagacgtaaagaggagaatggaacaatgggggtttcaaaacataaaagtgaaagtccttgtgaatctccttatccaaatgagaaagacaaggaaaaaaataagtcaaaatcttcaggcaaagaaaaaggcagtgattcatttaaatctgagaagatggataaaatctcctccggtggcaaaaaggagtccaggcatgataaagaaaagatagaaaagaaagagaaacgggacagttcaggaggaaaggaagagaagaaacatcataagtcctcggacaagcacagataatgaagactttccatcaaggtgagatcggactggaactgttcggctgcgaccagaaatttattttcctgagtaaattgccgagaattaagaatgaagagggccatttgcatctccttaaattattcagttacctgctttattgctccatgtggaaaacttaaaattgttaagttgtgcattactgtattttaacttgttgcttagtttctacatgtttattttcagtaatggctgaaagtgttaactgttccatacttttagcacaatgtgctgcataaggttacctgtgtacagagttttactttagattaactaaatattgcctgggttcagtttttatttccattctgaaatgcttcctttttattgtttgaaactgaaaataaacaattgttgaacccttttgattttacctcattttaaaactgttttaatttattatttggcttgttcttaatattagtcactaaaagcagtgggagcattgtcttatgaaatgcttaggaatcattttatatagtacatgtacaacattaaacgtgtttaaaaaagaaaaaggtaccagcgatcacttgtcccttgccattttttcttgtaattatgttagacaaatcttggcggcggggggatcaaaacataattgttttaattctacagctgtaggagctttgtattgctgaactttcatctggaaaagtttcacagtgacatttttaaaagagaatttttttatctgccgaattctaccagtgtaaccttttttctaaataaacaatagttttctcaaatggttgtaaaaaaaaaaaaaaaa

SEQ ID NO: 220 - DNA, 1754 bp, Homo sapiens
cccggcatccctcgggcggcggcggcggcggcggcgaggcgaagcgaaggaggagtgtgtgcggcggggccggcggcgggtaaaggcgagaaggctgcaggagaccgagggggagccgggccggtggggccgccgccgccgccatgcaggaaatcatcgccagcgtggaccacatcaagtttgacttggagatcgcggtggagcagcagctgggggcgcagccgctgcccttccccggcatggacaagtcgggcgctgctgtctgtgaattctttttgaaagctgcctgcggcaaagggggcatgtgtccgtttcgccacatcagtggtgagaagacagttgtgtgcaaacactggctgcgtggcctatgcaagaaaggggaccagtgtgagttcctgcatgagtatgacatgaccaagatgcccgagtgctacttctactccaagttcggggagtgcagcaacaaggaatgtcccttcctgcacatcgaccccgagtccaagatcaaggactgtccttggtatgaccgtggcttctgcaagcacggtcccctctgcaggcaccggcacacacggagagtcatctgtgtgaattacctcgtgggattctgcccggaggggccctcgtgtaaattcatgcaccctcgatttgaactgcccatgggaaccaccgagcagcccccactgccgcagcagacacagcctccagcaaagcagagaaccccgcaggtcatcggggtcatgcagagtcaaaacagcagcgcgggcaaccggggaccccggccactggagcaggtcacctgttacaagtgtggcgagaaaggacactacgccaacagatgcaccaaagggcacttggcctttctcagtggacagtgacagcagctggagccagctccgagcagcccgggggccccgctgttgggagtgtgcatttaactgtttcatgcgcttgttggcgcgactgtggctcgagctggcccgcagacacgtgggtttcatcactctgaggggccacgtctgttagtttcctatcattttgccttagtattttttgaaaaagggacatgtgtcctgtgggtccctgcagtcgacatcatgtttggctgggcatcgatgcctcctttctgggactcccggcacaactcccctcatccagggagggaggcagctgctggggaggggcttggctaggtagttctgtgtggcggtggtcattcccctcattaaacaccagttcttggtgacgccaggggctggtaggtcattcaaagctgtggccagctcacgcctgcttcctccctccctgccctgctgaatcctaaagctgtgcctatatctgtgatttgaatgagggagccctttggggcaaattcaggtgcccccattgcctcaggctggccctggtcccaggtggcagcggttgaggaggggtacagggctctcaagcctgaggttttcttctctgggcttaattttctcttggggtacgtgcctgacagtgtttaaggtgtccgttgaactggagttgcagacttttaaatagatgaccccttcagatcatctgtgcctacctcctgcccatcaggcgtctacactgtcactcagacacctgtggcatgtggaggagactgccctgtcctgagcctggaaaatgtgaaactgtctcctgcaacctgctgggcatgtgggcctggctgtgttcaattgcaagaacaatttttatgaaatggattaaagcttgttttttaaaaa

SEQ ID NO: 221 - DNA, 3199 bp, Homo sapiens
ttggtgggacgatttctcaggagcacgacttccggcctgaaaaggaagtctcctcctttttctcccaaaccacttcttcccccctaccccccgccacgcgaggctgcggcgcacgattgaagaatgtcccggattccactggggaaggtcctcctgaggaatgtcatccggcacacagatgctcacaataagattcaggaggaatcagatatgtggaaaataagagaactggaaaaacagatggaagatgcttaccgggggaccaaaaggaaaatgctacccagcagttcaagccggatgcgcagtgatggttttgatgaagaaagtcaaagatactattggaggccaaagaatgaaatttctgggacactggaagatgattttcttaaggctaaatcctggaataaaaagttctatgattatgaagcaaacatgccagacagatggggtcacagtggttataaagagttataccctgaagaatttgaaacagacagtagtgatcagcaagatattaccaacgggaagaaaacatctccccaggtaaagtcatctacccatgaatcccgcaaacacaagaagtcaaagaaatcccacaaaaaaaagcagaaaaaaaggtcacacaaaaaacagaagaaaagcaaaaaggaagccacagatataacagcagattcctcgagtgagttctcagaagaaactggggcttctggtacaaggaaagggaaacaaccacataaacgcaagaaaaaatccaggaaaaagtctctcaaaaaacctgctttattcttagaggcagaaagtaacacttcacattcagatgattcagcatccagcagttctgaggaaagtgaggaaagagacactaagaaaaccaaaaggaaaaagagagagaaaaaagcccatacctctgtagccaacaatgaaatacaggagaggacaaacaaacgcacaaattggaaagtagctacagatgaaaggtctgctgagagctcagaggatgactaaatgggaaacacttttgttttccacatgactgtggatatttacagttcttactccttgtggttttgccagtgactcttgttcagcacggggcctgaggtcagagctgtcttgtgccatctgtatgttctgacagacgtcttgtcttctattttggcgttaagcttgatccccttttcttgttaaaagggaatctggtattttgttatgaaggtttcttgaagagattatttttttttgcaattaattacgtttagtgtagagtgcatatacagcaaattaaaggacccagaaagctggatccaatagtgacctgggtacaccaatcggaatattgaatttggggaagtcaagggctgggatcaagaggtggattggaactaatgccatgtaggatggtatgacaaggcaacactgtattgctctctgtttatatagcaggtgtcacaactaacttgtctttagccttggtgctttgatccttctatattttgaccccacaggtgtggtccggtttacttaatcaggacatgggcctaagaacaaaccttttcccttcatgataacatccatagacaacttattagaagggactagagtttttgcaaatttccctgctggatggggcctatagctatacttagtatatgcctaaacatggtaattggatagtaaatggttttctagttccattgctgtatatttgcctaaatggacttgtgttcaaattatttcttcaattgtcatagataatcctgtaccaaatggggaagaattaggaaataatcatgttgtctaatggtactctggattcagggcagcaactgccatttaaatgttgtcttgttcatttctaaatctgttcatgaagtttaggttttccctgaaactaagttgaattatttccaaaatgaaacaggcttctcagggacatatccacttcttcccagtctgcctttggattaaagcaccaagcagagaccacattaattccctttgctatactgtgatccttagtatgttaattcttaagaaaccaacatatcactgaaagaaggctggcagaacgcaagtgcattttttcactgtgggaagaaagatcaagtgacgtattattttttcctggttgtcacttaatgggctgagtaaaaagcttgaaaactcagactttcggtcttggttctgccactcattggttatgaggaggcccagagcaggtaagttcaccttcctggccttactttcctgatgtgtaatacggaattacttcacagtagcatgacagtataagacaccagcagtagatacaactatgatgacattccatgagttggtatttttagttctaactgctaaatttgttctctttacgggacagatttctaataaagtgcttggtcttaaaatacatggttggacagaggtgccctatcccttaactatgagcaggtgctaccttttgggatatttattttaaattttaatactttggtactcaattgtcagtgttccatggtgtgtatttttatttttgggattagtgggggtctaaagggagaagaatagtctctaattactacctcttaacctaaagcaattattttgttcctggagcaagttaaatctttgttggaaggagctttggccatatattttttagcatgcattgtttctgtgccctgaaagtacctgaaaggttttaagcacagactcaggaaaatgtgccagtagaacaggccatctccaggaaattggctctatttgggtcctgaccttcccttcctcccaagttagcaggcttgttctttcgcaaggaatacacatcttgcctttttttttttttttttgccatgttttccttttcttggtcatgtataagcaataaagctgttttttgttcttcatctttcttaaccccaaattttcttctatgccttaggcttcgatggttcttccaacccccttaatatggcttagggtggtttttcaaaacctacaatcccccatttgcactactggccatggaacatttatttctagtgttcctgccaatcagagatctctatattaaattctaaaatgggattaaaagaagagttggagaattcacacttattgagtaactgatgtcatacaacctggaatttctgaattccaaataaataaatttcactctttgaaaaaaaaaaaaaaaaaa

SEQ ID NO: 222 - DNA, 1740 bp, Homo sapiens
gtgcgcgggggcccgaccaccgcggggccgggacgcgatggcggcggcagagcccgcgagctcgggccagcaggcgccggcagggcaggggcagggccagcggccgccgccgcagcctccgcaggcgcaagccccgcagccgcccccgccgccgcagctcgggggcgccgggggcggcagcagcaggcacgagaagagcctggggctgctcactaccaagttcgtgtcgctgctgcaggaggccaaggacggcgttctggatctcaaagcggctgctgatactttggctgtgaggcaaaaaaggagaatttatgatatcaccaatgtcttagagggaattgacttgattgaaaaaaagtcaaaaaacagtatccagtggaaaggtgtaggtgctggctgtaatactaaagaagtcatagatagattaagatatcttaaagctgaaattgaagatctagaactgaaggaaagagaacttgatcagcagaagttgtggctacagcaaagcatcaaaaatgtgatggacgattccattaataatagattttcctatgtaactcatgaagacatctgtaattgctttaatggtgatacacttttggccattcaggcaccttctggtacacaactggaggtacccattccagaaatgggtcagaatggacaaaagaaataccagatcaatctaaagagtcattcaggacctatccatgtgctgcttataaataaagagtcgagttcatctaagcccgtggtttttcctgttcccccacctgatgacctcacacagccttcctcccagtccttgactccagtgactccacagaaatccagcatggcaactcaaaatctgcctgagcaacatgtctctgaaagaagccaggctctgcagcagacatcagctacagatatatcttcaggatctattagtggagatatcattgatgagttaatgtcttctgacgtgtttcctctcttaaggctttctcctaccccggcagatgactacaactttaatttagatgataacgaaggagtttgtgatctgtttgatgtccagatactaaattattagattccatggaaacttgggactgttatctacctctaactgtgtaacattttagacttcttaataacctaaatatttaaaataatgaatgtaacaccttttttagttcactgattctgaagtgttcttccctaatactttctttacttcacaaaacttcaaccataaaaacaaagggctctgattgctttaggggataagtgatttaatatccacaaacgtccccactcccaaaagtaactatattctggatttcaacttttcttctaattgtgaatccttctgttttttcttcttaaggaggaaagttaaaggacactacaggtcatcaaaaacaagttggccaaggactcattacttgtcttatatttttactgccactaaactgcctgtatttctgtatgtccttctatccaaacagacgttcactgccacttgtaaagtgaaggatgtaaacgaggatatataactgtttcagtgaacagattttgtgaagtgccttctgttttagcactttaagtttatcacattttgttgacttctgacattccactttcctaggttataggaaagatctgtttatgtagtttgtttttaaaatgtgccaatgcctgtacattaacaagatttttaaaaataaaattgtataaaacattcaaaaaaaaaaa

SEQ ID NO: 223 - DNA, 11260 bp, Homo sapiens
gtgtcacgtgctcgcgtcgcagccaatcgcggggcgacgctgtcctgggagcgaggaggctgtggtgagagacggaccgagaccggagatgttttcaagcccggctccggcggctttacaggcggctgcagcggcgacgaagacaacgacagcgacggctacgccgaagcactcgttccgggggtgaagcctcctgcgccggccttgcctcggatccaggatgagaagactgataaaagaagaagctagctgaacagctgtaaaatgcccaaatctgggttcacaaaaccaattcagagtgaaaattctgacagtgacagcaatatggtagagaaaccatatggaagaaagagtaaagacaagattgcatcctacagcaaaactccaaaaattgaacgaagtgatgtgagcaaggagatgaaagagaaatcatccatgaaacgtaaacttccttttactattagcccatcaagaaatgaagaacgagattcagacacagagaaagaaggtccagaaaagaagaagacaaaaaaggaagctggaaataagaaatccacaccagttagcattctttttggttatccactctctgagcgaaaacagatggcacttcttatgcagatgacagcaagagacaacagtccagattccacaccaaatcatccatcacaaacaacgcctgcccaaaagaaaactcccagttcttcatctcgacagaaagataaagttaataaaagaaatgaacgtggtgaaactcctttacacatggctgctattcgaggagatgtgaaacaagttaaagaattaataagtttaggggcaaatgtgaatgtgaaagattttgcaggttggacaccactgcatgaagcttgcaatgttggatattacgatgttgctaagatacttatagcagctggagcagatgttaacacacaaggattagatgatgacactccactccatgattctgctagtagtgggcacagagatatagtaaagctgttacttcgtcacggtggaaatccatttcaagctaataaacatggggagcgtccagtggatgtagcagaaacagaggagttggagttgctactaaaaagagaggtgcctttatctgatgatgatgaaagttacacagattccgaagaggctcaatctgtaaatccttctagtgttgatgaaaatattgactctgaaacagagaaagactctctcatctgtgaaagtaaacagatacttcccagtaaaacacctcttccatctgcccttgatgagtatgagttcaaagatgatgatgatgaagaaattaataagatgattgatgataggcatattcttaggaaagaacaacgaaaagaaaatgaacctgaagcagaaaaaactcatttatttgcaaaacaggagaaagccttctatcctaaatcatttaaaagtaaaaaacaaaagccatctagggtcttatattcaagtactgaaagttctgatgaagaagctcttcagaataaaaagatttctacttcatgttccgtcatccctgaaacatcaaattctgatatgcaaaccaaaaaggaatatgtagtttcaggtgaacacaaacagaaaggcaaagttaaaagaaaattgaaaaatcagaataaaaataaagagaaccaagagctaaagcaagaaaaggaaggaaaagaaaatacaagaataacaaacttgacagtaaatactggactagattgttcagaaaagaccagagaggaggggaactttaggaaatcttttagcccaaaagatgatacttcattacatttatttcatatttccactggtaaatctcccaaacattcttgtggattaagtgaaaaacagtcaacaccactaaaacaagaacatactaaaacatgtttatcaccaggaagttctgaaatgtcattacagcctgatcttgttcggtatgataatacagaatctgaattcttgccagaaagttcaagtgtaaaatcttgtaagcataaggaaaaaagcaaacatcagaaagatttccacttagaatttggtgaaaaatcaaatgccaaaataaaggatgaagatcatagtccaacatttgaaaattcagattgcacactgaaaaaaatggataaagaaggtaaaacattaaaaaaacataaattgaagcataaagagagggaaaaagaaaagcataaaaaagaaattgaaggtgaaaaggaaaaatacaaaactaaggatagtgccaaagaactgcagaggagtgtggaatttgatagagaattttggaaagagaatttttttaaaagtgatgaaactgaagatctctttttaaatatggaacatgaatccttaacattagaaaaaaaatcaaaattggaaaaaaacatcaaagatgataaatcaaccaaggaaaagcatgtgtcaaaagagaggaactttaaagaggaacgagacaagattaaaaaggaaagcgagaaatcttttagggaggaaaaaataaaagatctaaaagaagagagagaaaacatacccacagataaagactcagaatttacttctttgggtatgagtgccattgaggaatctatagggcttcatttagtggaaaaggaaatagacattgaaaaacaagaaaagcatataaaggaaagtaaagaaaaacctgagaagcgatctcaaattaaagaaaaggacattgagaagatggaaagaaaaacctttgaaaaagaaaagaagataaaacatgagcataagtcagaaaaagacaaattagatcttagtgaatgtgttgataaaataaaagaaaaggacaagctatattcgcatcacacagaaaaatgccataaagaaggtgagaagagcaaaaatactgctgctattaaaaaaactgacgacagagagaaaagtagagaaaagatggataggaaacatgacaaagaaaagcctgaaaaagagaggcatctagcagaaagcaaagaaaagcacttgatggagaaaaaaaataaacaatcagataatagtgaatacagtaaatcagaaaaaggcaaaaataaagaaaaagacagggagctagataaaaaggaaaaatctagagataaagaaagtataaatataactaactccaaacacatacaggaagaaaaaaaatcaagtatagtagacggtaataaagcacaacatgaaaaacccttatcccttaaagaaaaaacaaaagatgaacctttgaaaactccagatggaaaagaaaaagataaaaaagataaagatatagatagatacaaagaacgagacaaacataaagataaaattcaaataaatagcttactcaaactaaaatctgaagcagataagcctaaacctaagtcatcaccagcatcaaaagatacccgacctaaagaaaagaggttagtgaatgatgatttaatgcagacaagttttgaacgaatgctaagccttaaagacctagaaatagaacagtggcacaaaaaacataaggaaaaaattaagcaaaaagaaaaggaacggttgagaaaccgaaactgtttagaacttaaaataaaagataaagaaaaaacaaagcatacaccaactgaatccaaaaataaagaacttactaggtcaaagagttcagaagtgactgatgcatataccaaggagaaacaacctaaagatgctgtaagtaacagatcacaatctgttgacaccaaaaatgtaatgactttagggaagtcatcttttgtttcagataatagcttaaacaggtctcctagatcagaaaatgaaaagccgggtctcagctccagatctgtatccatgatttctgttgctagttcagaagattcctgccatactacagtgacaaccccaaggcctccagttgagtatgactctgactttatgttagagagttcagaatcccaaatgtccttttcccagtcaccttttttgtcaattgccaaatctcctgctcttcatgaaagggaattggacagcctggctgacttgccggagcggattaaaccaccatatgcaaacagactttcaacatcccatcttaggtcatcttctgtagaagatgttaaactaattataagcgaggggagacctaccatagaagttcgaagatgtagcatgccttctgtcatttgtgaacataccaaacaattccaaacaatatcagaagagagcaatcaaggtagcttattaactgtgccaggagatactagtccttctcccaaacctgaggtattctcaaatgtgcctgaaagagacctttcaaatgtatctaacatacattccagttttgcaacttctccaactggagcttcaaacagcaagtatgtttcagctgatagaaatctcatcaagaatactgccccagtgaacactgtaatggacagtccagtgcatttagagccatctagtcaggttggtgtgatccagaataaatcatgggagatgcctgttgatagactagagacattaagcaccagagactttatctgcccaaattctaacatacctgatcaagaatcctctcttcagagtttttgtaattctgaaaataaggtattgaaagaaaatgctgattttttatccctgcgccagactgaactgccaggaaactcttgtgctcaggatccggcatcctttatgcctccacagcagccttgctctttccccagccaatcactttcagatgctgaatcgatttctaaacatatgtctttgtcatatgttgctaatcaagagccaggtattttacaacaaaaaaatgcagttcagattattagttctgctttagatactgataatgaatctacaaaagatacagaaaatacttttgtcctaggagatgttcaaaaaacagatgcctttgtcccagtgtactctgacagcactattcaagaagcatcaccaaactttgagaaagcttatactttacctgtgttaccatcagaaaaggactttaatggaagtgatgcctctacccagctaaatacacattatgcatttagcaaactaacttacaagtcttccagtggccatgaagttgagaatagcacaactgatactcaggtcatttcacatgaaaaagaaaacaaactggagagtttggttttaactcatttgagtaggtgtgattctgatttatgtgaaatgaatgcagggatgccaaaaggaaacctaaatgaacaagatccaaaacattgtcctgaaagtgaaaagtgtttgctttccatagaagatgaggaatctcaacaaagcattttatcaagtctggaaaaccattcacagcagtcaactcaaccagaaatgcataaatatggtcagttagttaaagtagaattagaagaaaatgccgaagatgataaaactgaaaaccaaatccctcaaagaatgactagaaacaaagcaaatacaatggcaaatcaaagcaaacagattcttgctagctgtacactattatcagaaaaagacagtgaatcctcatctcctagaggaagaataagattaactgaagatgacgatcctcaaattcaccatccacggaaaaggaaagtgtcacgtgtacctcagcctgtgcaagtgagtccctctttactacaagcaaaagagaaaactcagcaatctctggcagccattgtagattctctaaaactagatgagattcagccatacagttcagagagagcaaatccatattttgaatacttgcacataaggaaaaaaatagaagaaaaacgcaaattactgtgtagtgtgattcctcaagcacctcagtactatgacgaatatgtaacatttaacggatcatatctcctggatggaaaccccttaagcaagatttgtattcccacaattacaccaccaccttcactgtcagatccacttaaagagctttttcgacaacaggaagttgtaaggatgaaactacgtttgcaacacagtattgaaagggaaaaactcattgtatccaacgaacaagaagttttgcgagttcattacagagctgcaagaacattggcaaatcaaacactgccatttagtgcttgtactgttttgctggatgccgaagtatacaatgtaccattggactctcagtctgatgacagtaaaacttctgtgagggatcgctttaatgcaagacaattcatgtcttggttacaagatgtggatgataaatttgacaaattaaagacctgtcttttaatgaggcaacaacatgaagctgcggctttaaatgctgtccagaggttagaatggcagctcaaactccaggaacttgatcctgccacctataaatctatcagcatttacgaaatccaggagttttatgttccccttgttgatgttaacgacgactttgaattgactcctatatagcagtcagtacttcctgatggtattgtcctaaactggtgatgctcaagcattatactgtggaatactgccttttgacaaaaatactcatgcctttacaattgttagtaaagttcgattatagttggttatgtagtaaacactgtcattttataaaaaatgagaattattttggatcttagatccaaacacagtttctaatagaaaactattatttatattgggaaaggtaactattgcattagagcatgttggcagactggtaggtatttaaaaagttgagaatctgctaacagcgctggaagttgttagcgctctaagtaataagataaccactagtattcaaatctctttcaggttttattaaaaaatatatatcaataaactaaaaggttcaattcctaccaaatagtttctaatgtgggagaaaaacttggcacaaaatttcttcagtttattatctgtaaattgtacagttttctttttgaaagttttaatattgtcttcctttttaataacttattttatacatattgtgcagatgtaaatcttgtaattaatggtcaaactgtataaagggattggtagtcaaaacatgtacaaagaaatacctgtaaaactgttttgtctcatgttttattggaccaaagttgtggtttgtatggagtgtagtagtagtgtgtacaggtagaaaacttttaaatacagcatgcaggtgtttcagttagcttgttttcatcaccataactgcaaagatgtggcttagttgtattgcatgcttcctataatttaactctccataattgatgcctgcagtagtgtaaggcatttcatactagtctcctctagtagacctgtgacttactgtgttggacatattatttagacttagtcatacaaagaaacttagctcttttttcatctcacagtaaagcctatttccccaggaaaaaaataaatgcctttgaatgaaaattctgaaattgtaaatgtctattttaatattcacctatgaaagaatctgtgaatatatgtaaatacgtttaataaattttattggtcatgttaaatcattgtaaaacttttttacattgcttaatgttttaagcttaatagcctttgcacttttaaaataaaaaccaagtatgcaaatcaaagatatttggtagtcaaaataagtaaaagaaatataggaatattccagtcaatctctgaaatgtttatgaaaaacaggttaatatgttgtatttttttccttgtatcaagatgcaaaacataatttgcaaaattttataattgaaataaaacttggtatgctgttttataataaattagcaatatactttaaaaaaaatccagtttctcctataacatgatgtaaattaaatattcaggaatatttcaggtctgaaatctgctgctgaacttgttagacatttttgaaaggaaaattaggttagcgtacaatttatcataaatatatgaggtaaaatttgcaaaactttccacagtactttcttgaattataatactgaatgttttctgttccgatagagaaaagtgaagcaaatatgtgaggaatgaagtgatctagtgcaagttggtaattccagctaatgggagagaatgtaaatgtgcaaaggtacatattaagcttagggatttttgaatttttacgtcagtttatattttaattcttactgtacttggcatgcgcaataaagcagcacatgtaaaaaaaaaatacacagtgcaaggactttattataaaggttggatgtagttttccttagaaatttaggtgagagattttggccttttttattggataaattgggccagaaaggcagggtagatttcgaagcactggttctgttgaagttaagtttattaagcctgggaacattaaaagctaatttataaaagcaatactttttaatatgaaaacttactgcaaagtttgtttatacttttgcctaaaaaggaaattggatgggatactgtggcaaatcataaaaaaccagataattgaactttgaagttatagaaaatcagagaggggtaagtttatagggcattttgttctgatggttcaaccagaggtctgggaaatagcactgttggcccaaacagaacaggcttttagaagataaaagcgacaagaaggaatctggtgaattttagtcatcccagctttttagtcttaaccacagttctcactctcttaaatggtacctcaaaaagctggagcctctctgccatgattatgcttctacaaatttcttttataaagagactcaaagctaatgatagcttaaaagaaaagttaatgccttctcattggaaatgtataatcaaataagtagttaagggcttttggtattaaagatattctgaagctctgaaatgctagaaaaaaatttggaatggagtatatgcctgaaaaggttttggattcagaaagaaaaaggatggttagtttaatcagtgattctttttaaactcttcaaatatcatgaacaagatactaaattgtacctaaggatttgtatttctttacaatttgttctaaatatctgtttaatgactagttgatatttgtgcatgttatttaataaagagttatatttttatagaaaaaaagagtgaaatgtgtgctaactgtttttttacttaattttacttgggcagctagcaaaattgcagaaatatgcatcctgggaaaagaaacagcctttgaagaattagcctttcaagttcaaatctatttaataatgagaagtctcacaagtgaatttttaagtacaggcatacctcagacgtactttaggttccagaccatctcagtaaagcaaataccacaacaaagcgagtcaggaggaattttttggtttcccagtgcatataaaagttttgtttatactatattaagtgtgcaatagcattatgtctaaaaatatgtacataagtttaaaaatattttattgctaaaaatggtaacaaagtgagcacatgctgttggaaaaagagcaccaatagacttgcttgaagcagggttgccacaaaccttcaatttgtaaaaaacgccaatatgtacaaagcacaataaagcaaagcacaatagaacaggattgcctgtattagacatgctacaaacttcataactggaaacatctcaaagaccccatgaagctcatttgaatgggacttaacaattagacagttattttagaaattgagtgcagacctaaatacatagttttccaaaaagaaaattattgtctctgatatcttaaaacataaaaacccaaaattttatatagaagaaattgactctgtaaaacgcaatgaaatagtcctctttttaaacagtttaaaggaagcattttcaccgtttgtaaaaattatttttaaatatttagggcaaaatttttgttagataataatggaaaagcttgtgtgagtttagtggttaaaatatcttgtaattcatcattatttaagtgacttcttgggagccgtctttgtacctaaaatggagtttttttttaagcctccacagagatagtcacccaaagtatttccagtcagtaaaagtagaattcatagaaaaaactgaggcaaattaaaacaattccattaatcaaaatggctttaaacaaattaagtattagcataaaaatagcaaaaagtacaactaaaaaaatggttgggttttcccagtggttaaatgctatataataactgcaaataaaagtttttttgtacatggacagcgtcctcataaaagaaaataggccaggccaggcgcagtggctcgcgcctgtaatcccagcactttgggaggccaaggcgggcggatcacgaggtcaggagatcgagaccatcctggctaacacggtgaaaccccgtctctactaaacaaaatgcaaaaaatcagccgggtgtggccgcgggcgcctgtagttccagctactcgggaggctgaggcaggagaatggcgtgagcctgggaggcggagcttgcagtgagccgagatcgtgccactgcactccagcctgggcgacagagcgagactccgtctcaaaaaaaaaaaaaaagaaagaaaagaaaataggccaatatggtgaaaccctttctctactaaaaatacaaaaattagccaagcgtgacggtgcctgcctgtagtcctagctacttgggaggttgagacaggagaatcgcttgaagcctggaggcggaggttgcagtgagctcacgccactgcaccccagcctgggcaacaagagtgaaactctgtctccaaaaaaaaaaaaaaaaaaaaaaagtatatcacatatgtagcatgtgtttacaagtttaaaaggcaccacctatgcactcatcactcaagagaatatcaataactttctcagttttttttcattgttatagtctgtattcaataaaattacccagatcttaactaggcagtttgataaatcctgacaaatgtaaacactcatgttaccatcacccaaattaagatattgtaaaacattttcattactctagaaagttcactcatgcctctctccagtcactacccctgaggcagccactgtgctgatttcccatcaccatacattagttgtacctagccttgaacttcatagaaatagagtcatacatacttccttgtctgccttgtttctcaacatgatgttttgaaattcatccatgttgcacctaacagtaatgagtcgtaatttattaatgagtagtagtgtattgtacaaatttgtttattcgttctcttgttggtatttggattgtttccagtttgggactattgttaataaacctgtgaatctgcaagcctaaaaaaaaaaaaaaaaaa

SEQ ID NO: 224 - DNA, 7856 bp, Homo sapiens
cgcgatctgctgcagctcggccgggagacggcgcgacccggcggcggggccacccgcgagtccagcgtcgccgcagccccccaatgcggccgcgagaagcagcgggggggcaggcgatcgaaggagccttcacgtaaatgggtccagtcatgcctcccagtaagaagccagaaagctcaggaattagtgtctccagtggactgagtcagtgttacgggggcagcggtttctccaaggcccttcaggaagacgatgacctcgacttttctctgcctgacatccgattagaagagggggccatggaagatgaagagctgaccaacctgaactggctgcacgagagcaagaacttgctgaagagctttggggagtcggtcctcaggagtgtcagccccgtccaggacctggacgatgacacccccccatcccctgcccactctgacatgccctacgatgccaggcagaaccccaactgcaaacccccctactccttcagctgcctcatatttatggccatcgaggactctccaaccaagcgcctgccagtgaaggatatctacaactggatcttggaacattttccgtattttgcaaatgcacctactgggtggaaaaactcagtgagacacaatttatcattgaataagtgttttaagaaagtggacaaagagaggagtcagagtattgggaaagggtcgttgtggtgcatagacccagagtatagacaaaatctaattcaggctttgaaaaagacaccttatcacccacacccacacgtgttcaatacacctcccacctgtcctcaggcatatcaaagcacatcaggtccacccatctggccgggcagtaccttcttcaagagaaatggagcccttctccaagatcctgacattgatgctgccagtgccatgatgcttttgaatactccccctgagatacaagcaggttttcctccaggagtgatccaaaatggagcgcgggtcctgagccgagggctgtttcctggcgtgcggccgctgccaatcactcccattggggtgacagcggccatgaggaatggcatcaccagctgccggatgcggactgagagtgagccatcttgtggctccccagtggtcagcggagaccccaaggaggatcacaactacagcagtgccaagtcctccaacgcccggagcacctcgcccaccagcgactccatctcctcctcctcctcctcagccgacgaccactatgagtttgccaccaaggggagccaggagggcagcgagggcagcgaggggagcttccggagccacgagagccccagcgacacggaagaggacgacaggaagcacagccagaaggagcccaaggattctctgggggacagcgggtacgcatcccagcacaagaagcgccagcacttcgccaaggccaggaaggtccccagcgacacactgcccctcaaaaagagacgcaccgaaaagccccccgagagcgatgatgaggagatgaaagaagcggcagggtccctcctgcacttagcagggatccggtcctgtttgaataacatcaccaatcggacggcaaaggggcagaaagagcaaaaggaaaccacaaaaaattaaaaacaagtcactgatttgttttgaacttacgaccatttggtttcagcatgtcaggagatttctaatgatttgtggcaatatcagcaattttttttcttttttcttgtttttggtttggttttctttcttttcttttccttttattttgttttaatttgccccctcttctttgttttggacccttaagaattttatttttaaaggagattgaagccatagaactcatattgacactcagctgttttacaaaagcttttcattatctgaagacaaaaccgaaaaagccaaaattaccattgcttcctccagcttgtcagaaacctgtggctgaatccgcagggatgtcaacgtcaatatcacaggaacacacattcggcacctagaaggcacgtgggcaaagtaatcatcgttcaggcccaacccttaggtttaaaaagtcaggttgtccatcccattgggttcactgagtgaaggcacataaagcaattgaggaggaggaggaacccctcgtccccctaggagcagacccaagcttgtggcaccaggcatctgatggtgccaggaaagccactggaattgtcacacggcgagcacagagggccggccaccagtcctcgatgcttctgaaccctgaagcccgatgacatcttacgaggtggacgttggactgttcatgcgcatcgggtgtcagtgactcatggagaagaaatggggtaaatttttagtgatgttgctaatcattgaattctgttctctattaaattaagaaaatgttccaaaagccataagcctgaagattggccctgtgcacgcacgcacacacacacacacacacacacacacacacacacacacacgaaggagagagagagaaaactgatggggaaaacaagctgtgtcttcttaactgcccaagtgaaaagcaaccaagtccaggaaattacaatagctgttaaggaaaggaaataatggtacagatctttttctgtctatcaaaactatttgatccaagtgaaaaaaaaaaaaaaactagaaagctacggaacctgccattagtattgtggtgtatttttaagattaaaggtacactgatggacaaaaaaaaaaagtaaaacatggcaaaaaataaaataactcctatactgccctcaaaatggagtttgcaattaatatcaggatttatctttgcaaaaatcagtgatttccacattcagccagtatagccagcagaaatttctgatccacaatgcatggattcctttgaagaaaaaaaagaaaaagagaaaaaaatcacaaaaacaaactttttttattcaaaagtaacaaagttcttgtaaggtaaataatgtatttagcatgaagcatgaattattttcatataaatatagaaaatagagaaaaggctatgcctgtaatttttaagcccttaggcttagagtttcttttggttttcttcttttttctttccttttctttgctttctttttttcctttttgtttttgtttttgttttttgtttttgtttttttttcgggttattttgttttggttttttgaagcaggtgtttaaggtttaaccttcttcagggacaaattctgactgttggggaacttactctgcaatataaaaatatcttcatgctctggtagggcttggatggttgaactctgtactgccttgtgtgcacttcagccccgaccccctctgattctctgttgaaaagtgtgtcctttctctctgtctgtacatgtttaacatgacgcaataatttgagggcaaacttagtagtgagtgtgtatgatagaatcaagagaattatgggacgcttacttgagaaaatcattaccatgatttggttctaggaaaaaggcagtgaataattatgcaaattagccagaagaaggggaaccgtgctaatgggccttattgggtgaggggacgagatggggttcatgtgaaggaggaagcgatgccgaggtaggaaaggccagccccagacatcctatcgccacaatgccatgtcgcaataggaagcaggggccggccatcgctaccttcagcacactgaccaacctggaattaagaccacctagattgcgagagctgaatttagaaaccagacaacgtcatgcagcccagaaactcctgttgttacctttgcctaagaaattttctttaatggcgggggcggggggcgggggtacaaagagaaatctctaaaagaatatgatcttccatccaagtggagggaaactttaaaacaaaaacacccagtactgtggctcaggatatgatgcgtgaggagagggagggaacagagatgaccttaacttttaaaaaagggactgctgtgggccaaagccaagcccatctgccaggacgaggtaatgtcagagctccatcagcccggacagtgggaactaactggtgcattccccacacttaccttccggtgggttgctgatgagagaacctgaaaaaacctacacctctacagcaggtcgaattcatgacctgaagctgaatacttccagcatatttattcagggtgtaggtgggaataaagtatcttcgcagtgctctgttccctccgtctccccagacatctgacaccctaaaagccatccacagctatggaacctgagcgacaccttgatttgtgttgtcacctgaccaagcctaaagacctccagctcagtcccccaccttcatcccaccccacagatgataaaattcagacctctctcctgaaaggcagaggttcaacattcaggactgtttctggccgaggacttcttccaattaaaacccccaccgtgggctgtctcccctcatttcatttttctaaaggggcagaggcctcttttagaaaataataaaatgcaatgtgtgtgatttacttttctgatctctttgagaaatagagaaatataaaagtgtgttcttaactccagaaccactctttttgcataaatacctcatcgggcagctttctaagtgtgattttcctgagtctcccttcgttggatctgccggaagacttgtcggggaacctttagtgagggtacttcttcctatttttcttctgtttttggaggcatacacattatgcataaccaaaacaatggctcaattgtgtttaactttgtattttgattgttgagaacaaaaacaaaaagtatcaatgtgtatgtggctgtttgtagtgaatttattggagaatgaggttgtccgtgtccttaacaagccaaggggcaggaggcaccctctcttatcccctcctccaagagcagtagagaatttaagcacaagcctatttgtgaaagaatattttgcttaagtgtcattcactttagtcttggaattccttcccaaacgtcaggtgttcttttagcttccaaactagcatatgtatccattagtctgacagatcgcctgaacaccattaagaggtgtggcgtttttgctttcatttctcctgctgggagaagtggcggttcatgtgtcattccagtatctcacatactcacacggggcaggggggagggggaaacggggaactatagcaatatttaaagatgctttggaaaccaaccgtgaacacatcaacaccacgacgtctacgattacttgctattggccctcggatacatttaagagaaagagacagtcactcttttttttcttaaatgatatacatataaacagttatttttatcctattataattgtcttttgtctttatctagtactatgtggaaagggtttgcatcatagatttttcccagccttataatataccataagctcctacttccctgcccctccctaatcagtattctttcaagagttctttggtgaagccatctatctgaaactaaaatgaaccaaacccatatttcactggtggttggagaaaaccatggccaaaacgattgtggcaggtctcaatcttgggagtttttaagaaggaatgtgccagaggccgattcccaagaacagagttttcttttgttttgcagaggcattcaatgtgtctagtgcttgctggccacagcagttactaccacagagccttctgggaggggccgttgtgttgaaggaggctcctgcctgagggacagcatcaggcagtgggctctgtagagtgagaaccaggtggaggccttctgtgcccagctcagagttctgcaccacgccaggactgcccaggccaagggctactgacgcaagttccactcattccactctgtggggggcgccttgggcctctcctggaagggctcttggagaaggaattggagttacgtacaagtgacctaaatgggaagcttttctagatgagattggattaaattccatgtgatttctctttccctttaatccaggttgggactcgtttctttctggtggatcacagctgcccagatgttgcaattgatttttatgtttctgtagagaagtatttttctttcatcttcaggattttttttgccaccaaaagaaaacattggaactctgtgtttcctcttgattgtgacttcccagtgttgacagttaagtccttagtgtcgtaggtcccagcccaccaatactatatcaaacactgttatgcacataatgcagcactgtgatctaatttaaataatacttttttattatttatactactatatataatatacatcaacacttttgctatataacctaagtgataaccctcttttagttacctgccaaactctggacttggtttatattgcagttaacacagttacaaagctgtaatggtgtctttttttcctttgtaacggaatgtgtaaatcaaagtatatacattgtgtggtgttcctgtttctggagtttcatgaggatttacacatggcattcagtgttctgtatagatctgcctacctttgtgaattcatctgttaacccctcttcctttgagagagcaccggcgatggtggttaactccttgtgttttctctctctcctactggttattcttgaattaagcacagactcgtcagctcggttgctttatcatgaataatgtgtgtgaccttgcagttcttccacagttcagcaaacaagtgctagcttcactgaccaaaaattaaggaaggaaaacacagtttttaaaacgatccatcttttaacagccgaaaccgatgtgtctatggtgctgcaccttgctgttgtacttctgaaatcagacgtgtgtgaacgatcatttctgacttaaccgtgagatgctcacgagtacccttcctgttgttttgttagcattgaaatcgagactatttatttggaatatatacaacagtgtttttccactgtatttcatttgcaaaagttgagaactgctttctctaccttttgcaaaataattgatattccatattggattctcaaagacttcgatatggtgaacctattaaacctagaaattgtattcatcctttcatgactgtggcctgagttccccagcccctctcctccttttttttagatgagatttagcacactctcagttatttaaacatgcaacatttcttgagtatgtatgttgaggccatctgagctcatagctgattcagtaaccagtttcatgctgtgtcattcacactcactacttaatactgccatggtgaaaatgtggaggaaaaatgtatccatgtgtgtctgggaagcatatacacttgtacattttttaatactctgattctgtaacatttctgagttttgttttgttttacagaaaaaaaaaaaaagtgataaagcaatcagaagaccaagaggtttactattgatgcttagggtcgtctgaccttggctggccaatagacctacacggccaaattaatttacgagagtaataatttttcaaaagccaattttttttctgtattttctgtatgaaactgccaatatcatgaatagaaagggagaaccataaaggagaaagaacgtgatgttctgttatgttcatgtaaacctaaagaaacagtgtggaggcaggcgcgatcagccgaactctagggacttggtgttgcttggaaggcatccatacctgcattttgcattcttcgtatgtaatcatattgccaaagacaaactatttcatcatttattgtaaataacacttttccccagacctaccataaagtttctgtgatgtattgtcttccagttgcaataaaaattactgagttgcatcaattgaagaaaaacaccaaaaa

SEQ ID NO: 225 - DNA, 6124 bp, Homo sapiens
atgcctagtctagtggtatctggaataatggaaagaaatgggggctttggagaactaggatgtttcgggggaagcgctaaggaccgagggctgctggaagacgagcgcgcccttcagctggctctcgatcaactctgcctcctgggtttgggggagccccccgcccccacggcgggcgaggacgggggaggtggggggggcggcgcccccgcgcagccggccgcccccccgcagccggccccgccgccgccgcccgcggcgcccccggccgccccgacggcggcccccgcagcgcagacgccccagccccccaccgcccccaaaggggcgagcgacgccaagctctgcgctctctacaaagaggccgagctgcgcctgaagggcagcagcaacaccacggagtgtgttcccgtgcccacctccgagcacgtggccgagatcgtgggcaggcaaggctgcaagattaaggccttgagggccaagaccaacacctacatcaagacaccggtgaggggcgaggaaccagtgttcatggtgacagggcgacgggaggacgtggccacagcccggcgggaaatcatctcagcagcggagcacttctccatgatccgtgcctcccgcaacaagtcaggcgccgcctttggtgtggctcctgctctgcccggccaggtgaccatccgtgtgcgggtgccctaccgcgtggtggggctggtggtgggccccaaaggggcaaccatcaagcgcatccagcagcaaaccaacacatacattatcacaccaagccgtgaccgcgaccccgtgttcgagatcacgggtgccccaggcaacgtggagcgtgcgcgcgaggagatcgagacgcacatcgcggtgcgcactggcaagatcctcgagtacaacaatgaaaacgacttcctggcggggagccccgacgcagcaatcgatagccgctactccgacgcctggcgggtgcaccagcccggctgcaagcccctctccaccttccggcagaacagcctgggctgcatcggcgagtgcggagtggactctggctttgaggccccacgcctgggtgagcagggcggggactttggctacggcgggtacctctttccgggctatggcgtgggcaagcaggatgtgtactacggcgtggccgagactagccccccgctgtgggcgggccaggagaacgccacgcccacctccgtgctcttctcctctgcctcctcctcctcctcctcttccgccaaggcccgcgctgggcccccgggcgcacaccgctcccctgccacttccgcgggacccgagctggccggactcccgaggcgccccccgggagagccgctccagggcttctctaaacttggtgggggcggcctgcggagccccggcggcgggcgggattgcatggtctgctttgagagcgaagtgactgccgcccttgtgccctgcggacacaacctgttctgcatggagtgtgcagtacgcatctgcgagaggacggacccagagtgtcccgtctgccacatcacagccacgcaagccatccgaatattctcctaagccccgtgccccatgcctccggggcccactccactgggcccaccctggacctgttttccactaaagccttttggaaagcggtgatttgaggggcaaggtgcttagagatactcgctcgctggggaaggggggagggaggcagtggtggctggagggtgcgccactttcagagcctctggtcaccctgtcctggaaagattgggagggggccagactgaaaattttactagagttacaactctgatacctcaacacacccttaaatctggaagcagctaagagaaacttttgttttgccagaggtggccactaaggcattctgacgccctctgcccacctcccccgctgtgtgtcactccaccccttcttccgaggagggggtgggtaaaagggagagggagaattaccacctgtatctagaggtgctctttgcaatccctaagccctctggtcctgacctccgacctcctaacatgaccctttacctcccaccccacccccatatcctgtttgggaaactgtcaccagtttccagcagtgtaagggagttggagtcctatcagaagttgcatagatcttctaggggttggggagagaagcatgtcaatcgtttctgtggctgaaaggctcagaagccatctgtccccacaaagctgggctagaggaatctggagaggagtcctcctctctgcccctgtcccctgcagtgtttcccttcactctctccgcctatcttcccttcctttgggatcttccctttcctcaactctttcctttccctccagctctttgctttgctttcttttggtggctgtcactcccagctctgtcttgttccttgtctttgtctttcttcccttccccctgcccctgcccctaccagcccagctttggggacaccatccttctggggagaagtagggggaggaatatttggatggtccctccattcctcttcaggcatctggaggccctctcccccactcctccaaagaaacatctcaaattattgatggaatgtatccccattctcagtgaaaatgtgaggaggggactaatactggggtaaagggtcaaacccccaccttcatcactatgggcattatatttagggagtagttcttgggctggattttctggttgtggaagtgggggcgccagagtagtgtgtctgctatttaaaggagcaggaaagggcgtgaggcaggaggagagactggtggagggaagagctgctcctcccatgcagtgcccgactccctgcacccctctcaacctgacctgaacctttattgaatccttattagcttgaatccttattagcttgaatcctccatgcaaatcatggagtctgtgtcccacctgatgtggttgaggagaagccaggtcttcaaagaggggtcagcctggggcaaagcaggactggggggaggtgggcagcagggcctattctgagaatcacatattgttacaggccttgcaccccctttgctgcttccctcctgctcatttggggctgccaccagctctccaccctcctggttccgctggccgggccaagagaggatggagggatgggagtcccaggagatccttgtaaatagtggggtgggactgttctgagtgatcacccgagcacttaaagctccagagtcccattcttcctggatggagcaggtggaggtgcagaggggatttcctcctctccttcctcctgtcgagaattaacacctctccacagccttcccctccagaacaccagccagggaggggtggggaaggaggtcacagccaagaaaactgccctgtgacgacttccctccttcccgcctatgtgagccatcctgagatgtctgtacaatagaaaccaaaccaaatgggcaccctcggttgccggggggcaggtggggaggggggtgggaagaagggatgtctgtctgtcgtccccctccccctctccactctttacccacaaaggcagaagactgttacactagggggctcagcaaattcaatcccacccttaccaattgagccaaacctagaaacaaacacaaaacacgaatagtgagagacaaaatagaggagagaaagagagcatgagagggagcgagacaggcgaccaacacagaggagagaaaacaaaaatagcaaaaaaaaaaaaaaaaagcagttctttataatttaatattctattttaataaaggcgtttattaccatataaatgtagcaaagaacctgggctaatatgaaaaaaaaagactttttattaggtaatttattatatgaaaaggatattttattttatgataaagtgatccttaaaaaaataaaaaaactttagaaggtttagaatatatgtagggagagaagaagaaaaaaatacatttgtattcagagttaaatcttaaaaaaaaaaagtgtttttaatatatgtttgggtttacgttgcttttttcccccactttttttttggggaggaatgtcatttgcttttcttgggggagcatcccgggggtgaatggtggagagaggagctgggggaacccggtccctcctgggacccttccagtagattggatttcactccatggactcctcctcccctctccccctccccctcaggggagccggcagagccaaacaaagaaagggattaacaagaaaggaagaagctgtaggactaaggactgaggatcctggggtgtcccccaccactttcccctgccctgtcgcaggggcaagtgaggagggggaatccagaattaaggcctagcaggcctataggaaccctcagagatgtgtgagatttaagagatctagatttttttttaaccaaaaacaagagagaaagagaagaaaaagagaaaccgaggggtttaaaagaaaagaatactacaaaataataattattaataataataattcaaatttatttcatataatcctagagagagaaagaaacaattactagttacttagtagacaatattaagatagcttaaagtttagtagcattgagggcccctgggtccagtagaatgtataaaagttgtaaggaaaagataaatagaggagggaagtggctgagtccaccctgagttgcccaatcttcagataccagggttggatcaggttgctagtttaagattgggagcttccagtctgctggggttgattctgagaatccttggatttttaaattgtaggacaaagaaatgaggggttcatttcccagggtcttggaaaggatgcacactgatcatctcaataagacaggggctgggttgggggcagcagaggaggccaagcacattcacctgcacccctagtacctgggcagcccatactccaatgtggtatgtcccctcctggggctcccagctcaaaccctcccatgcctgcttcccccaggcctaactgaggaagtccttcttgaagtgtgacctcggtccacttctctacagattgatttaagagcctgggaagtcattccacaaacagacacacatgcacacacgcttctcaccttcagagcttcaagagcactgaggcgatcagtcccctacccctgttcccatccagctttccacttagctttgacctccatggcagcagtagcagtaacaatctcagtaattgttctttaaagctgactcgttcttcacctacttgcaaagtgctttcttgtctcataaaagttagattccaagaaggacttcccacggagtggagtggaaacactgtccttgaaggcctgggagaaaggcatccccatgggcacagaggctggggaaaggcacagggactttgggtgaccctaaccctgaccctctgctccagttcacctccatctatatgtgttcaggtaggggtcatctactgtaccctggcctgggaacacattgccctccccacacaaaactggagggcttggcttctgcgtgtgagaaatcaacatttttaaagcacttgccttctaccaaccccagcttgcaatcactgggccttcccctcctatccaaggggttggaggggccccttggctctccttttggcaggaggagcctgcttcattacaccaatgactctgccatccccctccctggccctagaccccaaacacatctccctctacccaatttactcttctcgccccacctagggacagattccccctgctctttttgtcctagaaaccccgctagtttgggatggtagcgtctggggtggggagggcttccccttccccactcgagggtgcgggtggggaagggggggtgggtggagacagccctggggcagggaggatggtctctccactgtagaaagtagagtaggattgtggtcagacttaatttgaggcatctagtgaagacacgtacaaatccaccaaggaaaaagatttcaaaagcaaaataaaagcgggaaataaaacagacccaagaataatcaagtcaaagtgatgttgcacaaaatgcagagaaaccaagaagggggagggttaatgtattaaatgtgctattaagaacttaattttattaaaagtactattacttaa

SEQ ID NO: 226 - DNA, 3071 bp, Homo sapiens
atgacttttcctgaagcggacattttacttaaatcgggagagtgtgctgggcagacgatgctggacacgatggaggcgcccggccactccaggcagctgctgctgcagctcaacaaccagcgcaccaagggcttcttgtgcgacgtgatcatcgtggtgcagaacgccctcttccgcgcgcacaagaacgtgctggcggccagcagcgcctacctcaagtccctggtggtgcatgacaacctgctcaacctggaccatgacatggtgagcccggccgtgttccgcctggtgctggacttcatctacaccggccgcctggctgacggcgcagaggcggctgcggccgcggccgtggccccgggggctgagccgagcctgggcgccgtgctggccgccgccagctacctgcagatccccgacctcgtggcgctgtgcaagaaacgcctcaagcgccacggcaagtactgccacctgcggggcggcggcggcggcggcggcggctacgcgccctatggtcggccgggccggggcctgcgggccgccacgccggtcatccaggcctgctacccgtccccagtcgggcctccgccgccgcctgccgcggagccgccctcgggcccagaggccgcggtcaacacgcactgcgccgagctgtacgcgtcgggacccggcccggccgccgcactctgtgcctcggagcgccgctgctcccctctttgtggcctggacctgtccaagaagagcccgccgggctccgcggcgccagagcggccgctggctgagcgcgagctgcccccgcgcccggacagccctcccagcgccggccccgccgcctacaaggagccgcctctcgccctgccgtcgctgccgccgctgcccttccagaagctggaggaggccgcaccgccttccgacccatttcgcggcggcagcggcagcccgggacccgagccccccggccgccccgacgggcctagtctcctctatcgctggatgaagcacgagccgggcctgggtagctatggcgacgagctgggccgggagcgcggctcccccagcgagcgctgcgaagagcgtggtggggacgcggccgtctcgcccggggggcccccgctcggcctggcgccgccgccgcgctaccctggcagcctggacgggcccggcgcgggcggcgacggcgacgactacaagagcagcagcgaggagaccggtagcagcgaggaccccagcccgcctggcggccacctcgagggctacccatgcccgcacctggcctatggcgagcccgagagcttcggtgacaacctgtacgtgtgcattccgtgcggcaagggcttccccagctctgagcagctgaacgcgcacgtggaggctcacgtggaggaggaggaagcgctgtacggcagggccgaggcggccgaagtggccgctggggccgccggcctagggcccccttttggaggcggcggggacaaggtcgccggggctccgggtggcctgggagagctgctgcggccctaccgctgcgcgtcgtgcgacaagagctacaaggacccggccacgctgcggcagcacgagaagacgcactggctgacccggccctacccatgcaccatctgcgggaagaagttcacgcagcgtgggaccatgacgcgccacatgcgcagccacctgggcctcaagcccttcgcgtgcgacgcgtgcggcatgcggttcacgcgccagtaccgcctcacggagcacatgcgcatccactcgggcgagaagccctacgagtgccaggtgtgcggcggcaagttcgcacagcaacgcaacctcatcagccacatgaagatgcacgccgtggggggcgcggccggcgcggccggggcgctggcgggcttgggggggctccccggcgtccccggccccgacggcaagggcaagctcgacttccccgagggcgtctttgctgtggctcgcctcacggccgagcagctgagcctgaagcagcaggacaaggcggccgcggccgagctgctggcgcagaccacgcacttcctgcacgaccccaaggtggcgctggagagcctctacccgctggccaagttcacggccgagctgggcctcagccccgacaaggcggccgaggtgctgagccagggcgctcacctggcggccgggcccgacggccggaccatcgaccgtttctctcccacctagagcgcccctcgccagcccgctctgtcgctgctgcgcggccctggcccgcaccccagggagcggcgggggcggcgcgcagggcccactgtgcccgggacaaccgcagcgtcgccacagtggcggctccacctctcggcggcctcacctggcctcactgcttcgtgccttagctcgggggtcgggggagaaccccgggacgggggtgggatggggtaagggaaatttatatttttgatatcagctttgaccaaaggagaccccaggcccctcccgcctcttcctgtggttcgtcggccccctcccccggctccgcgctgctcttagagggggaggggtgtcactgtcggggcactcctagccctacctccggcccttgcgaccacacccattctcactgtgaatctccccgctggggtcggagcgtcgggcagagttggggagtggggaggggactgagccggccggagggccccccgcacccccgctcccacccaccccgggactgataatgtgaagttcctcattttgcacaagtggcactagccccagggccaacccttccttcctcagtcaccaagggcggggagttctggagtcggaaggcgaagagcctaccaccaggtctcccactcccgcggtgccctcccttcccttccctgcggccccggaccatatttattgcatgcgccccggcggccccccatcccgagcccaggctgggctgggctggaacgcggtctctttagctccctcctcttcgtttgtatatttcctaccttgtacacaggctcttccagagccgcttccattttctatactcgaaccaaacagcaataaagcagtaaccaaggaaaaaaaaaaaaaaaaaa

SEQ ID NO: 227 - DNA, 4987 bp, Homo sapiens
ggggcagcaggtgctggccaccacattgtccagcaaggtggcagcagaggcctcctaggtccccttcctaggaaaggagcctgggctgccctgatgagtctcctgtctctctctctcccgcaggatgaagatgagacgctacaagctctttctcatgttctgtatggccggcctgtgcctcatctccttcctgcacttcttcaagaccctgtcctatgtcaccttcccccgagaactggcctccctcagccctaacctggtgtccagctttttctggaacaatgccccggtcacgccccaggccagccccgagccaggaggccctgacctgctgcgtaccccactctactcccactcgcccctgctgcagccgctgccgcccagcaaggcggccgaggagctccaccgggtggacttggtgctgcccgaggacaccaccgagtatttcgtgcgcaccaaggccggcggcgtctgcttcaaacccggcaccaagatgctggagaggccgcccccgggacggccggaggagaagcctgagggggccaacggctcctcggcccggcggccaccccggtacctcctgagcgcccgggagcgcacggggggccgaggcgcccggcgcaagtgggtggagtgcgtgtgcctgcccggctggcacggacccagctgcggcgtgcccactgtggtgcagtactccaacctgcccaccaaggagcggctggtgcccagggaggtgccgcgccgcgtcatcaacgccatcaacgtcaaccacgagttcgacctgctggacgtgcgcttccacgagctgggcgacgtggtggacgcctttgtggtgtgcgagtccaacttcacggcttatggggagccgcggccgctcaagttccgggagatgctgaccaatggcaccttcgagtacatccgccacaaggtgctctatgtcttcctggaccacttcccgcccggcggccggcaggacggctggatcgccgacgactacctgcgcaccttcctcacccaggacggcgtctcgcggctgcgcaacctgcggcccgacgacgtcttcatcattgacgatgcggacgagatcccggcccgtgacggcgtccttttcctcaagctctacgatggctggaccgagcccttcgccttccacatgcgcaagtcgctctacggcttcttctggaagcagccgggcaccctggaggtggtgtcaggctgcacggtggacatgctgcaggcagtgtatgggctggacggcatccgcctgcgccgccgccagtactacaccatgcccaacttcagacagtatgagaaccgcaccggccacatcctggtgcagtggtcgctgggcagccccctgcacttcgccggctggcactgctcctggtgcttcacgcccgagggcatctacttcaagctcgtgtccgcccagaatggcgacttcccacgctggggtgactacgaggacaagcgggacctgaactacatccgcggcctgatccgcaccgggggctggttcgacggcacgcagcaggagtacccgcctgcagaccccagcgagcacatgtatgcgcccaagtacctgctgaagaactacgaccggttccactacctgctggacaacccctaccaggagcccaggagcacggcggcgggcgggtggcgccacaggggtcccgagggaaggccgcccgcccggggcaaactggacgaggcggaagtctagagctgcatgatctgatagggtttgtgacagggcgggggtggcggcggcccctagcgctatctccctgcctcctgccggctccttggttcttgaggggaccaggagtgggtggggagtgggggtgggggtagggtttccctactgaagcccttgtgaatcaagggtcaggcctttgagctcagaaaatatccctcctgttgggagagggcgcaggccgtgacgtctgggtggcccttatgactgccaagactgctgtggccaggaggtgccactggagtgtgcgtggtggtccctgggtagcgggggagggtaggcaggattggggaagagagcctgcaggatctcaccaggcagcctctggggggtggccaggccgggaaaaagcccaccatttggcatccctgggccttgggctccgtgtgggagaccggcctgccaggaggacccagggctctgtaagtagatgcatttgggtccaggaggaagcgtggacacctcgtagggaagagatgaaaaagccacatcctaccaagaggaggtgctgagggatgctttgcagtgtagtcagaagtgctgggccagatggagacagaactccaccccctgccgcaaaggacaggacctggctgccctgggatgctggtgcctgagtctgtctctgtgcacccctcaggctgtcgtgagccaacacaggggcctggagaaccctgaggagctttccttttggttctaaacccggcgttgacgttccttctccctttcacattgctgtcttgtggactgtgcactcagtccttgcaaggccaagagtccagttgtaggtgtggccttgagggggaagtggggaggagaagactgacatgagtcctctgcacggatccgtctctccctccccatcaccccttccttctgacacccagtcccagctgtccactgtcccaggtgcagtcactgttgtgcccttccttggggcaggctggctgggggccagaaaggggccatgaggctgtcttgggcccaaaaagggacaataaggccagttgtatgcttcctgttcctcatagcttgccttggtggggatgtctttgttggagttgattctgagctgctgtgattaggagaccctgaaatacagtggtttaagcaagatggaagcttgtttctaattagtctagattgagatggcccagagctggtagggcagctctgcgtttcttcatacgcaccttccaattctgggtacacagcggctgctccagcgcccaccctcctgtgtgcatccaagcctgggggaagcagaaatagacaagagggcacacccactttttgctaaaggcatgagccagaattggcaggctcacctctgctggcctctcattggctgggactcagtcacatggccacaagcagctgctagggaacctgggaagtgtagtcttcagcggggccgccatgtgcctggcctcaccttgggagttatcttattgatggaggagaagagaatggatatgggggaccagtagcatctctgggagagggggagggagcagcaataactcagtcgtcggatccagctctcattgtcagagtttccggaacagcttgctcctgtttccctcactgtgcagcccagggctgggggcagtgaggagcttgcagctctgtgggaaggggaaacaccccctcccctcggcccctcagacgctacccaatgatgccggtttgcagagttggcctgtggaatggctcatgtttgtgcgtgtgtgtgtgtatatttatgggcatgggtgcatgcttggtgtgtatttgtacatgtctgtattgctgtgtccctgtaaatacatgcttgtgtatggatggaagaggccaggcccaggcctggcctcttcctcgggcctgtggccacacctcctgcagctccccaaaatgactgaggcagaaagcccttggggagcctagaaagcaaagctaaaggggatgcagggtctgtctgtctgtctgtctttcagtctgaggaatgagaatcctgacctgagggctgtgcagctgagagcccactacctccccagcccctctcggccccagccgcatcatcccacctgtcccctcccccccacctccagtggggctttctccagatgtcttatggttgggggtttcctgatgggccaggagaggagggcatcttcttgcgacagcactgtctgggttaagtgcccagtgagggcatggtgtggggagctggcctcagaggagccgctggtgggcaagcgtgaagtgggctgaggggctctgagccactttgctcccatctaggggactgccccccatggaactcctttgaagtcacagcagccttcctttctgtttgctcttggggctgagaggtggctcaaacactcggggtccctatggctctgggtcaatctaggccaggctgcaccccatggacagggagtctcagggctcctgatcatgcccaggccctggcctggggcctccctccttggcagctttcccacccccacgcccctggcatcctcagttgctatgggatgcccctccagggcaccagctcagggctaagcgaaggaagataggagcagctcagagctgccaggctctgccttcctcacagacctggtggggcaggtcctgttcacagcagcaggagtgaaggcctggccatcggtggagagggcagctgtcagagggctgggggccagggcacaggattgaagagtttcacatatcatcacagcatacactgggaatttggtgggggcagaagaacccagggccactccctcaatatgaagggaaaccaagctgaatgtgaccaccggcacactgctgccatgtcccatgtccacctttctccccgggaataactggccctgagacccctagacccaaggaggcctgtccatgccaagcatccgggaagcatggctggccttatccacccatgggtcacgtcggttcccaggggcagcatgggagatctttgggggcaacagggagagtctgggtggggagacgggacttgtccaagcagaaggcaggaccctgggaaatgcataatgtaaggacatcaataatagtattattttttttgtaagggaaaatcaatatgtacattctgaaatcattttctctgtaaatggttggatttcatttcacccttaaagggatgcttaaaggagaagataatattaataataaaaacagctacaaagtctgaaaaaaaaaaaaaaaaaa

SEQ ID NO: 228 - DNA, 7693 bp, Homo sapiens
gcggcggcggccgcggtggcagcgaaggcggcggcggcggcggcagtggcagtggccgctgcagccccacactccgccgccaaactggaggagcgacggaagccagaccccaggaggatggaggatgaagctgtcctggacagaggggcttccttcctcaagcatgtgtgtgatgaagaagaagtagaaggccaccataccatttacatcggagtccatgtgccgaagagttacaggagaaggagacgtcacaagagaaagacagggcacaaagaaaagaaggaaaaggagagaatctctgagaactactctgacaaatcagatattgaaaatgctgatgaatccagcagcagcatcctaaaacctctcatctctcctgctgcagaacgcatccgattcatcttgggagaggaggatgacagcccagctccccctcagctcttcacggaactggatgagctgctggccgtggatgggcaggagatggagtggaaggaaacagccaggtggatcaagtttgaagaaaaagtggaacagggtggggaaagatggagcaagccccatgtggccacattgtcccttcatagtttatttgagctgaggacatgtatggagaaaggatccatcatgcttgatcgggaggcttcttctctcccacagttggtggagatgattgttgaccatcagattgagacaggcctattgaaacctgaacttaaggataaggtgacctatactttgctccggaagcaccggcatcaaaccaagaaatccaaccttcggtccctggctgacattgggaagacagtctccagtgcaagtaggatgtttaccaaccctgataatggtagcccagccatgacccataggaatctgacttcctccagtctgaatgacatttctgataaaccggagaaggaccagctgaagaataagttcatgaaaaaattgccacgtgatgcagaagcttccaacgtgcttgttggggaggttgactttttggatactcctttcattgcctttgttaggctacagcaggctgtcatgctgggtgccctgactgaagttcctgtgcccacaaggttcttgttcattctcttaggtcctaaggggaaagccaagtcctaccacgagattggcagagccattgccaccctgatgtctgatgaggtgttccatgacattgcttataaagcaaaagacaggcacgacctgattgctggtattgatgagttcctagatgaagtcatcgtccttccacctggggaatgggatccagcaattaggatagagcctcctaagagtcttccatcctctgacaaaagaaagaatatgtactcaggtggagagaatgttcagatgaatggggatacgccccatgatggaggtcacggaggaggaggacatggggattgtgaagaattgcagcgaactggacggttctgtggtggactaattaaagacataaagaggaaagcgccattttttgccagtgatttttatgatgctttaaatattcaagctctttcggcaattctcttcatttatctggcaactgtaactaatgctatcacttttggaggactgcttggggatgccactgacaacatgcagggcgtgttggagagtttcctgggcactgctgtctctggagccatcttttgcctttttgctggtcaaccactcactattctgagcagcaccggacctgtcctagtttttgagaggcttctatttaatttcagcaaggacaataattttgactatttggagtttcgcctttggattggcctgtggtccgccttcctatgtctcattttggtagccactgatgccagcttcttggttcaatacttcacacgtttcacggaggagggcttttcctctctgattagcttcatctttatctatgatgctttcaagaagatgatcaagcttgcagattactaccccatcaactccaacttcaaagtgggctacaacactctcttttcctgtacctgtgtgccacctgacccagctaatatctcaatatctaatgacaccacactggccccagagtatttgccaactatgtcttctactgacatgtaccataatactacctttgactgggcatttttgtcgaagaaggagtgttcaaaatacggaggaaacctcgtcgggaacaactgtaattttgttcctgatatcacactcatgtcttttatcctcttcttgggaacctacacctcttccatggctctgaaaaaattcaaaactagtccttattttccaaccacagcaagaaaactgatcagtgattttgccattatcttgtccattctcatcttttgtgtaatagatgccctagtaggcgtggacaccccaaaactaattgtgccaagtgagttcaagccaacaagtccaaaccgaggttggttcgttccaccgtttggagaaaacccctggtgggtgtgccttgctgctgctatcccggctttgttggtcactatactgattttcatggaccaacaaattacagctgtgattgtaaacaggaaagaacataaactcaagaaaggagcagggtatcacttggatctcttttgggtggccatcctcatggttatatgctccctcatggctcttccgtggtatgtagctgctacggtcatctccattgctcacatcgacagtttgaagatggagacagagacttctgcacctggagaacaaccaaagtttctaggagtgagggaacaaagagtcactggaacccttgtgtttattctgactggtctgtcagtctttatggctcccatcttgaagtttatacccatgcctgtactctatggtgtgttcctgtatatgggagtagcatcccttaatggtgtgcagttcatggatcgtctgaagctgcttctgatgcctctgaagcatcagcctgacttcatctacctgcgtcatgttcctctgcgcagagtccacctgttcactttcctgcaggtgttgtgtctggccctgctttggatcctcaagtcaacggtggctgctatcatttttccagtaatgatcttggcacttgtagctgtcagaaaaggcatggactacctcttctcccagcatgacctcagcttcctggatgatgtcattccagaaaaggacaagaaaaagaaggaggatgagaagaaaaagaaaaagaagaagggaagtctggacagtgacaatgatgattctgactgcccatactcagaaaaagttccaagtattaaaattccaatggacatcatggaacagcaacctttcctaagcgatagcaaaccttctgacagagaaagatcaccaacattccttgaacgccacacatcatgctgataaaattcctttccttcagtcactcggtatgccaagtcctcctagaactccagtaaaagttgtgcctcaaattagaatagaacttgaacctgaagacaatgattatttctggaggagcaagggaacagaaactacattgtaacctgtttgtctttcttaaaactgacatttgttgttaatgtcatttgtttttgtttggctgtttgtttattttttaacttttatttcgtctcagtttttggtcacaggccaaataatacagcgctctctctgcttctctcttgcatagatacaatcaagacaatagtgcaccgttccttaaaaacagcatctgaggaatcccccttttgttcttaaactttcagatgtgtcctttgataaccaaattctgtcactcaagacacagacacgcacagaccctgtcctttgcctctattaagcagaggatggaagtattaaggattttgtaacaccttttatgaaaatgttgaaggaacttaaaactttagctttggagctgtgcttactggcttgtctttgtctggtagaacaaaccttgacctccagacagagtcccttctcacttatagagctctccaggactggaaaaagtgctgctattttaacttgctcttgcttgtaaatcctaatcttagagttatcaaaagaagaaaaaactgaaggtactttactccctatagagaaaccattgccatcattgtagcaagtgctggaatgtcccttttttcctatgcaactttttttaaccctttaatgaacttatctgttgagtacattgaagaatatttttcttcctagattttgttgtttaaattatggggcctaacctgccacttattttttgtcaatttttaaaacttttttttaattactgtaaagaaaatgaattttttcctgcagcaggaaacatagttttgagtagttctacctcttatttgtagctgccaggctttctgtaaaaattgtattgtatataatgtgatttttacacatacatacacacacaaatacacaatctctagggtaagccagaaggcaagatcagattaaaaacaccatgtttctaagcatccatttttccctttctttaaaagaaacttaactgttctatgaaggagattgagggagaagagacaaactcctatgtcatgagaataaccgatgttctgataatagtagcatctaggtacagatgctggttgtattaccacgtcaatgtcctatgcagtattgttagacattttctcattttgaaatatttgtgtgtttgtgtatgtgctctgtgccatggctggtgtatatatgtgcaatgttagaaggcaaaagagtgatggtaggcagagggcaaagtcattgaatctcttatgccagttttcataaaacccaaaccacatatgaaaaaatccattaagggtccaagaagtctgtccatatgaaaatgagggtaaatatagtttatttcccaggtatcagtcattataattgatataatagctctaacatgcaatataaaattcataggagtattaatagcccatttacacatctataaaatgtaatgggattgcagagctgcagagtacagtgtaacagtactctcatgcaatttttttcaggatgcaaaggcaattattctttgtaagcgggacatttagaatatatttgtgtacatattatatgtatgtatatttcaaagtaccacactgaaaattagacatttattaaccaaatttaacgtggtatttaaaggtaatatttttaatatgatacattacatattgtgaatgtatactaaaaaaacattttaaatgttaaaattataatttcagattcatataaccacaactgtgatatatcctaactataaccagttgttgaggggtatactagaagcagaatgaaaccacattttttggtttgataatatgcacttattgactcccactcattgttatgttaattaagttattattctgtctccttgtaattttgattacaaaaattttattatcctgagttagctgttacttttacagtacctgatactcctaaaacttttaacttatacaaattagtcaataatgaccccaattttttcattaaaataatagtggtgaattatatgttattgtgttaaaacctcacttgccaaattctggcttcacatttgtatttagggctatccttaaaatgatgagtctatattatctagctttctattaccctaatataaactggtataagaagactttccttttttctttatgcatggaagcatcaataaattgtttaaaaaccatgtatagtaaattcagcttaacccgtgatcttcttaagttaaaggtacttttgttttataaaagctctagataaaactttcttttctgatcatgaatcaagtatctgtggtttcatgcccctctctatacctttcaaagaactcctgaagcaacttaactcatcatttcagcctctgagtagaggtaaaacctatgtgtacttctgtttatgatccatattgatatttatgacatgaacacagaatagtaccttacatttgctaaacagacagttaatatcaaatcctttcaatattctgggaacccagggaagtttttaaaaatgtcattactttcaaaggaacagaagtagttaaccaaactaacaagcaaaacctgaggtttacctagtgacaccaaattatcggtattttaactgaatttacccattgactaagaatgaaccagatttggtggtggttttgtttctatgcaaactggacacaaattacaacagtaaatttttttataagtgcttctcccttctccatgatgtgacttccggagataaaggattcaaaagataaagacaaagtacgctcagagttgttaaccagaaagtcctggctgtggttgcagaaacactgttggaagaaaagagatgactaagtcaagtgtctgccttatcaaaagagcaaaaatgcctctggttttgtgtttgggagaaaaatatcttggacgcactgttttccttgataaaagtcatcttctctactgtgtgaaatgaatacttggaattctaattgttttgtgtgccaggggcagtaatgtccctgcctcttctcccaatcaaggttgaggagtggggctggggagaggacttaactgacttaagaagtaggaaaacaaaaacctctctcctcagccttccacctccaagagaggaggaaaaacagttgtctgctgtctgtaattcagtttgcgtgtattttatgctcatgcaccaacccatacagagtaaatcttttatcaactatatactggtgtttaatagagaatgattgtcttccgagttttttggttccttttttaactgtgttaaagtacttgaaatgtattgactgctgactatattttaaaaacaaaatgaaataatttgagttgtattacagaggttgacattgttcagggatgggacaaagccttcttcaatccttttcatactacttaatgattttggtgcaggaacctgagattttctgatttatatttcatgatatttcacatttgctcttcacagcatgagcatgaagcccagtggcaccaaatggctgggtacaatcaagtgatattttgtagcacctcactatctgaaaggccatgagttttcagatgatttcattgagcttcattgcagcctgaaattttaaaaaagttgtgtaatacgccaaccagtcaagttgtgttttggccagagatttagatatgtccaatttcctggctcatttcattgtgctctatgggtacgtataaaaagcaagaattctgtttcctaggcaaacattgcaactcagggctaaagtcatccagtgaaacttttagagccagaagtaactttgtcccagtcctacaatgtgaaaagagtgaatagttgcctctttttagccattttcatggctggtacatattcgtacgcattacttttcagaatcaatacgcactttcagatattcttatttttattctcttaagtctttattaactttggagagagaaatgatgcatctttttattttaaatgaagtagatcaacatggtggaacaaaatgataaagaacagaaaacatttcaatatattactaataactttttccaatataaatcctaaaattcctataacatagtattttacagttttatgaagctttctattgtgacttttatggaattaagagatgaagaagatgagatattttagcatttatatttttcaaaattatatgtatacttaaaaataaagtaactttatgcattta

SEQ ID NO: 229 - DNA, 2905 bp, Homo sapiens
ctcttcccgtgggcggggttaccagtcggtgcggttgggatggtgccactgcgcagccgcgagagggcggtaccacggcggcagcgacatgggggggcgcggagcagacgccggaagtagtggtggtacgggtccgactgaggggtactcgccaccggctgcgtccacccgagcggctgcgagagccaaggcccgagggggtgggcgtggcggccgccgaaacacaaccccctctgttccctctcttcgcggagcggcgccgcgtagcttccatccgccagctgccatgagcgagcgcctccgtcccaggaaaaggagaaggaatggcaacgaagaagacaaccatcttcccccccagaccaaaagaagtagcagaaaccctgtctttcaggattcctgggacacagagacagtacctgtaatgagaaacagtaaagaaaacagactaagaggaaacaaagcgttctgcgcgtcttcaggcagtgacagtggtgggagcagcagcagcagcagcagcagcatcaatagcccggacagggccagcgggccggaaggcagcttgagccagaccatggccggatccagccctaacacgcctcagcccgtgcccgagcagtccgcgctgtgccaaggcctctacttccacatcaaccagaccctgagggaggcccacttccacagcctacagcaccgagggcggcctctgacatgatgtgccggcagtttcttgccttctgtgaagggacagcgctgtgcagatttgatatttcaacttacaacttgttttaaaagaaaaattgcacacgaaaaatgcctgttggcttttcagtctatatttgaaataacaggttaacaggcagttgtttacttgtggttttgctgcactattgcaatttcaaaggggctttgaagcaattttttataggattcttttgagggagggtatcaaatctatgtcaaggtagtggtttgaggaaaactcattctgtgtgttgaatccatagtatgtcccattcagactgatttccaaatctgtcaactagaaactctactttatgtaaagggccttttaaaaatgcgggatcttcaattttttttattcaataaactagtaaagagtatctagtttccatgaaaaaacataagtttttttccaaaatataggaagcttgattcagtcttgcactgaaattaactgccatactacctctcagtatgtagatgttctattgaaagtactctctcctgtgtaacaggagaacaatcagatccaattcagactgtcagtgaagcacactccctaataatagtctctactctttgttatatatttgtatttccagagagaatgtcttttagattcttgtatacccagataacttctgtgtcactattccaccagagtctgcacctcagactttagtaggaaacatggcacagttctgcaagtaaagtaatatgtaatgactttttgtcctacaaacttggtcagtcagcagcttacatgatctcattgacaattccaccttgtagtgtcaacaattaaggtgttgttgaacgctgataaaatgtaagctacctgaactgatgtctaaagcaacaagtattgtgaaattttgggacaaggattaacttgatgcttaaagtaacccccaacagtaactagggggccacattccatcagtgaaactggaaagattggtgtggctgagaatcagatgagcagaggcacctttagaagaaataatgtggtagtatttatttagggagagacagatgtgttgccatgttacttagtcatactagagagccagccaagtttgaataatgaaggtgcagacgtgttgtcttcttcactgacaagctgtctgaacaaggagccaggaactgtcgggtcaccagctgtggagcgtgccggggggacaacctgccattggatgtagagaaaagtgccttagagttggcctgagccctcctgcccactcgccctccgcgcgacgccactcggagtccacacggcacacacaagcggagctgagaagcacgatggctctagtcagaggactttgctgtcggtccagatttgaagaggacacggaacagcatgagcctttgtgacaaaactagaatttggaaatgaggactgtcttgggaaaagggtagacacaggcacttctctccacagcctgctaacctaatgtgggcagaactgaaagatcactgcagtggaaactgttctggaagaggctgcaacatagcccatgcttagggactggatggtttttgcaagagctttttttttttttaaactaccatctcccaacttttaaagccagatacttgacaaggattttagatcttaatgggttcgatggtagggaatacggaaaggatacactgctaatattgtgtctaacaataaagcaaacaactcgatgctgtaagaagacaagctgtttgagctttcaaacacacatgcacacagcacaattcagaaatacccaggaggattcctgcaggcttaacagttggcatcgtactgaaatgaaacgtgtattaacaagaaaatgtcaaacttttggggaaacaaattttctgttacttcccacccaactaaaagggaagataaaaccatcatcaccagaacaaaacagattttctccaaacaagtacaatgatagtgccgggttggcagttaactctttcaccctactaaattcaagagctcatctccaccctgtcctgtatattttctacatttctattaagaggctacttggtagtgtcagcgggcatcttttacaccttctagtagctcaagctagtaaaaccttgtacttctctattgcgccgccattaaaagcagcattagtgcattttgtcattcaaaaaaaaaaaaaaaaaa

SEQ ID NO: 230 - DNA, 3635 bp, Homo sapiens
cacaacaacacccccacccccgtgtgtgcagccgtgttgccgcccgctgtgctatgagcagtcagagcgccgtctccacaagagtttacaaatgaaaatggaggaaatgtctttgtctggcctggataacagcaaactagaggccatcgctcaggagatatacgcggacctggtcgaggattcttgtttgggattctgctttgaggtacaccgggctgtcaagtgtggctacttcttcttggacgacacggaccctgatagcatgaaggattttgagatcgtggaccagccgggcttggacatctttggacaggttttcaaccagtggaagagcaaggagtgtgtttgccccaattgcagtcgcagcattgccgcctcccgctttgctccccatctggagaagtgcctgggaatgggtcggaacagcagccgaatcgccaaccgccggattgccaatagcaacaatatgaataagtctgagagtgaccaagaagataatgatgacatcaatgacaacgactggtcctatggctcggagaagaaagccaagaagagaaagtcagacaagaaccccaattcccctcgaagatccaagtcattaaaacacaaaaatggggaacttagcaattcggatccttttaagtataacaattcaactgggatcagctatgagaccctggggccggaggagcttcgcagcctgctaaccacgcaatgtggggtgatttctgaacacaccaagaagatgtgcacaaggtccctgcgctgcccacagcacacagatgagcagaggcgaaccgtacggatttattttctcgggccctcggctgtccttccagaggtcgagagctccctggataatgacagctttgacatgactgacagccaggccctgatcagccggcttcagtgggacggctcctctgacctctcaccctctgattcaggctcctccaagacgagtgaaaatcagggatggggtctaggtaccaacagctctgagtcacggaaaaccaagaaaaagaaatcccatctgagcctggtagggactgcctccggcctaggttccaacaagaagaagaagccaaagccaccggcacccccgacgcccagcatctatgatgacatcaactgacttgggtgcaagggatagcctttggctgagcagagccctctctcctgacccccacccaggtggcatagcctggcaaatggacggctgctgggggttggggcttgggaagcttggtgggccaggcaggcagaggatccgattatgcgcccctggggggtgtcaaagtcctctgcaatggagcacgactcctcggcgtgcaggactcagacctggacatattatgccttggacataagtttggtggggaggcggttttcctatttattctgtgagttactggatgtccagctaggccaggggcctgacctgggcactgtgccagggcactgcctgccccccaccccaggaactggactaagccctgctgaggggcaatgtggcgacccgggaggctgtgggttggaagctgagcctggagggggcctgcctcggccgccctcagcaatgtgaatgggtccggtgcttggagctgaggggcaaggctgggcatgtcctgtctgtgtgcagaatcttatcaaatgcccccagtcccaggggtaggcaggcacagagtgctgtctgctgaggtgggcgtccagaactgccgccaccttccctgcccctcacaggggcagccctttcccctcagtccccatgggcctccttggcagcaggagctgtccttttgttgggtgccaggaaagggcctccagcctctacagcttcaaggaatgggaaagggagggtaggaagagggagaagtgtcagaattcctccccctgcctctcctccctgacccagggctggtgaggagtggggccccaaggtgagagggaacggtgctgctttatttgaaatgttttcttacctcattccctgccccaggaagggacccagcctcaccctcctggggtggccccgtgttcctcctgcccaccctgccccactgccctaccggggcagcccaggttcccaactgctgcttccacccccttcaccttgactggcttcagttcctctcagcgctcctgcctccaaagcgtgccctgtttcccttccttagcgcttttaagttatttattctgtacttgtggtttggggctctgaggaaaatcctaatcttgtgcctctccccctttgctaggagttgggtgggaagagagggtggcctctgtgccccaggttgtcagtggaggggaaggggtgtcactgcccctctgtgggactgtcatgccagtgtgcccacctgcctggtctacatcctaaagagatgtaccgtcccccctccatgcgggcaccaccactcccaggagccaagctggaggaccgcgacctgggctgggagcagagctgactgacatgggtggaggtgaccctgagccaagttctctggcacttgctggacatgtcccctaccctcttcccaagaggagccatcccacatttgggtagttagtacccaggactggttggactgatcgggttagggaccctagagggttaagggaacaacagagatggggctgcaatgccctgtctggaactccgctctcccgctggggtggttctgattgtggctcatgcctggttgcaaattggtttttaacccacaaattgtgattattttttaaaaagccaaacagattttggcaggagttagaataaatcccggggcctgggcttctctattcttggccctccgtagtctccctccgagaggaggccagagggagaggaggatctcagcaggcctctagccgcttccagatgcagtctggggagtgggctgaaggtgaagggaggaaggctgtgggccactctcccttctgagaggcagctgcagctcaggccctaatacactctttgccctgtggcctctcccttttccccccttctggttggaggagggagaagtgggaagtagcttgggaactggtttgtccacataaacttccccattgttccttggcccgccctcagggcagagccccctgcccaggctgggtaagagatgggcttggtccagcagggaccctgagggaacaaacccttttccttctggggagagagtgccccccctaccatgtagttgaacaggggctaggagctccccactcccctccctctaacagcaggctgtgtgggtttcaattcccatccttcccaccccggctaggtgtcgtccaccctgtatcctgtgtctgagtgtgtgtgggggggttctgtactaatttccatggccggtggcttttccttccatgcatcactcccccccgcatgcccaggggccacccgcctggcattaccgcatgctggggtcattgggggaggggggtggggctcacgctgtcctgtggtcttgagatttttatttttgcatatgtaatccattctgtacaggtagctaactttgtaaacgctgtgtattccctctgcccccatggctgctggtgtaaataaactgcatctcccgttggtaaaaaaaaaaaaaaaaaaaaaaaaaaaaaaaaaaaaaaaaaaa

SEQ ID NO: 231 - DNA, 8767 bp, Homo sapiens
ggagccaggtgccggcagggcagccacaccctggggccccctgttctggaggggcagagggtcgggccgatgcgaaaaagccgcggaagctgccttaggcgactttctgggcctgcatcgccggacccagcagcccgctgtcgatcggttgctaagtgacgccagcgcgcagtggcgcgtgcgcggccacggcggagtgcgtgaaagcggacgcgcgccgcagcagccggggcggcggcgaggacggcggccacggaagcggccaagggggcggtggcgcagagaggggtgcggagcgggcggaagaggcgtctgtgtcgcagcttggtctcagaggagcatcgctgggaacaacgactatcgtctattccacaagatgagtaacagccaccctcttcgcccctttactgcagtgggggaaattgatcatgtgcacattttgtctgaacatattggtgccttgttgattggggaagaatatggcgacgtcacattcgtggtggaaaagaaacgttttcctgcccacagggtaattttagcagccaggtgccaatattttcgagcattattatatggtggaatgcgagagtctcagcctgaagcagaaattcctctccaagacaccactgcagaagcattcacaatgctactcaaatatatctacactgggcgggcaacgctgacagatgagaaggaggaggtgctgctggactttttgagcctggctcataaatatggatttccagagctagaggattctacctctgagtatctctgcaccatacttaacattcagaatgtctgcatgacttttgatgttgccagtctctactcacttcccaagttaacttgtatgtgctgcatgtttatggataggaatgctcaggaagtcctctcaagtgaaggtttcctctccctttctaagacagcacttttaaacatcgtgttaagagactcatttgcagctcccgaaaaagatattttcctagccttattaaactggtgtaagcacaattcaaaggagaatcatgctgaaatcatgcaggctgtgcgtttacctctcatgagcctcacagagcttctgaatgttgtgaggccttcaggactgctgtctcctgatgccatcctggatgccattaaagtgcgatctgagagccgggatatggacctcaattatagaggcatgctcataccagaagaaaacattgcaactatgaagtatggagcccaagttgtaaagggggagctgaaatcagccttattagatggtgatactcaaaattatgatttggatcatggattttcaaggcacccaattgatgatgactgccgttccggcatcgagattaagctaggtcagccatccattatcaatcacatacggatactcttgtgggaccgagatagccggtcttactcatacttcattgaagtgtcaatggatgaacttgattgggtcagagtgatagatcattcacaatatctgtgtcgttcttggcagaaattatattttccagcccgtgtctgcaggtatattcgaattgttgggactcacaacacagtgaacaagatttttcacattgtggcttttgaatgtatgtttacaaacaaaaccttcactcttgagaaggggctgatagttcccatggagaatgttgcaacaattgctgattgtgccagtgtgattgaaggagtcagtcggagccgaaatgccttgctgaatggggacactaagaattatgactgggattctggctacacatgtcaccagctaggaagtggtgcgattgtggttcagttggcacaaccgtacatgattgggtcaatacggttactactttgggattgtgatgatcgaagctatagctactacgttgaggtttctaccaaccagcaacagtggaccatggttgctgacagaactaaagtctcctgcaagtcctggcagtcagtaacttttgaaaggcagcctgcctccttcatccgtatcgttgggacacacaacacagcaaatgaggtgttccactgtgtccactttgagtgtccagagcagcagagcagccagaaggaggaaaatagtgaggaatcggggacaggggacaccagcctggccggtcagcagctcgactcccatgcgctgcgggcgcctagtggcagctcactaccctccagcccaggctccaactcacgctcccccaaccggcagcaccaataaaggaggcagcgggcctggtgtgacttggtgggctcgggcaacggcaggaaacggtctcctccctgagcaggggtctctgttgactgcccccacctctgcccctttccagggaggagccgacctagctgcaaaagcagacaccgaacaggttttctcccaaggacagaaaggggctgctttgttcttctcaatttatccaaatcaggcaggtctcaagggggagaaaatgggtcttcaatcttcatcaagtccaccattaacaccctacctctctaatctagcccaggcgcagggaacaggaggaagtcatagacaggcctgtgttggaatacaaaaatggcacgcaaacactcaggcggaggagaaagccattgggcctttgctacctggaggcaccctttaggaatgggcctccatagagtgttcattctgctggaatacattgccctggcaactaaatgattttttatttgttttagttattctccactcagtgaatcataggtgttccggatctatttgaaatgctcaaacagcaaatcactagttttaatcccttttgatgctataattttccttccttggttttgaacggttcagcttgcggggacagagacccatcgtgcatgtctcctaaatgagacacggatgcagctcatcctggcacttgggccacagaggaagtgccacaaatgcacacaagcaaatcaacctgtggacactggagttaatagtcactcgtgtggctgagttactcacctgtcattcctgacatggatccagcctttaagcttgggaggctgacaaggaaatagttactatgcccgctgctaattcactgttccgaagtccatgtagataaacatataccgagttctggcgtggccaaacctgccggggactgccgtggcttagctgcccctccagttgtgtttatcgaagcattggagaggcagccacctgcccatcagcgtcaggaacgcagaactgggactccgtgcttcccccacaccacagtactcaactggggactgaaaaatagcagttccaagaagcttttctcctaatcctcatcaaaaggacctcatttgacgatggtggcttgatgtggctccgtctcctacttagtgatttccattccagtgctgcctgccctgggtaactgcgcacaacattgcctgcccctccgctgtccccagagctccggcctctgtcgccatcagcatcagcctgggagtctccccaggacggcatggcacgtgagcagcactgcagtccttgggtcttcggcgccaacctgcaaccctgatcaaaggagggtgagggcgtgggagtttcctttcaggtgtgtcaaagacatatcagctgcgctctagaaagagccaacgggtcagccgcttcctcctagtttaacttgattttgagtgatttgtccatatggaaatagtagggtagcatcaaactgcgtgattaaattggaagactgtctttccgtgtgaacacaggatggcagacatcagagggctaccggggcagggtggacacgttcctgaggagaagccagggtctgcagctctccatcctccccggtagctccagctgcagggctgagctgcttcctatcccctcagctctgatctctgccacttccctgttgtgtgggagagtggaacactcctgggatgccaggcatttcataatgggaggaggctcctgtaaggaacggtgggcgcccgctcacagtggggggccctccagcatggttgctgactctgtcagcccccagccccgggttgccaattagccagagagctcctgcacacacagcacttccttccccagtgtgttttctacccagatggggacaaaggagccagacagtcatatcaagggcagagttcaaacattttgaaatgagccattcacatgcttctttttaaacatgggcatcacctgcccagaggcccttggcctgaagcagcatgctgctgaccttgggaagagagggtgggctggtgggggtgctggaggagctgcccggccctgcatctgcaaccctccagtcccctgcccacagagcacgcagagccctcctgtgctccgggaacgagatagcagcttggcagctcggcctcgcatctgaaaaggaatacgctgcaaagcctcggccctagacccacatctgcagctccctggcctgtggcggttctttccttcggggcatgcccttccagatctctgtccctcctgtcttctagcactttaaagatgccccttatcatcagataaagagaagtatggggacgatggggtggcactaacagtagatgtcattggtgaggactgatggcaaagtctcattccctcacagccgcgctgccagctcgcctccccctcgctttgctgggagcctgccctggactccaaaaggacacgggttcacctcctttcccaggctggaggggtactgcccttccctgaggggccttctgactggggcaggaactcttttcgtgtgtccagctgggcctggaggccaagtcaaggtgtgtcacaccacacaccagggcaaggacctcatctccagggaacagggacaagtgagtggctaccagaaagtccccgggcagcctggagttccccagagcctggctggtcctacagagcacttctcccctgggccaccaggaccaaagcgacctaaacacttgaagctaaaagcaagtgctgatgatgggatgggctggcacgtggctgggagggctcctgggcaccacagagccctcagcccagcagagagtggaggctcagtccgtggggagcgggggttgtgaaggagacatggccaagcccctggtcggggagataagctcccccatgcccaggccagccccaggggcaacaagccaacatggagagaggtggcaggtgaggctgacaggtgggtgcctgtggcctgggcccatgagggcaatggtcctcagtaaccaatggaaaggacacaagggcgccatggtcaccaccacccaggcaaagaaatgggaggtggccagcacccccacccttcacttttcattattattattattattattattattattttttttttttttttttttttttttttttttttttgagagtagaaaggcaacttcattggagcttttggggaaaaaagccttcaaagtcaccttctggcagctctggggagggtcatttggggtggactgagagtgtagggcaggtagggtgtgtgctgggcagcagctgtgtccatgcagccagcacccagcagggcagtctcacaggagccgttgtgagcactttggacttgaagcagctatgaaccaccccccgcccccaccgtctctccctctcacacacacacacacacacacacacacacacacacacacacacacacacccgttttaccattttctcagtgctttttctgctttcattcctttgattttagttagaagcacaagccatgatggatgtgggactcttctcaattgctctttaaattgtcactttttaaatcctattaaatgaagtgtcgattcctgacaaatacattaaaagtgttttattcctagaagagttgggaaaagaaattattttcagcaagagtaggatgtttgttaaactgattccttggcaaaaaagagaaaaaaagcttttgaattgtgcaaaaaattgcccagtattatgctgtcgccccagttgtcaaactgctgtgcagatggctccagcccagtcaacttcaccttctttttaatttagaagataacaaaattgtaatcacttatcctttccagagccaagggggaaaaggaaggtataatctacaataaaaagcgagcgttctgtgtactgaggccacttggtgataaagagatggagcgctcccctcacagacttcaattaagaacctccctttggacagggaagaaaggtgtcaaagaggaaaagaaaattaaatttgcttccttccaggagtttttcctcattagtgcttgcttgtcggtgttattattttaatcttaccttctatgtggtgaccagctcctccgagcgatgcccaggtcgggcacggcccgggcagggcaggtctgcagcgatgccgtggcagaggtgggcatactccatttgttttggcagctgcagccattgattctgcatatttttcctgacaacagccccggcaggagttcagttaggaatttaaagtgcagttcatggttctgtgccaccgtggcttttattattataatattaaattagaagttgtcctagtgcctggtgtttgctcagagtttccagaagagagggaagggcaaggtttaaatggcatgcaggacaactggaatgcccccatctctctcgctgacacggatccagtcatacctggggctggacgggatttggaggccctggtcatttgcagagtgaatggtgaagggcgcggaaaaggtttgcttggaggaaagaccggttgcagaggcgaggcggagggaggaggggcggaggcagcaggtctttgtttgtggtaggtctctggcttccatcagggaggaggaaagaggctgtgcccttcctggctcttggctgcaccactgaggacgctccgagggacagcgtgctcacccatcctttgcacagtgctggccccaagccccacggccttccagctaggattttctgctgggctcatgcagaggcaggggacaggtgcatggaagagccgccccacccgacacaccattgtttgaaaatcactgttctctttactcacttaaaaaagtgtacagggaacacctgttcctggcataatgctccaacctcgcggaaggggccaggtgcccttcatctggctctggctgcttccgacctgggcccacgtcatcgttcacgtcctctgtgaccaccactggtcacggtgctccctggcccagcctccaacccacccagcaccctggcatctcccaggccagtctgctgcacccagcgagcttccagtcagaagccaggctgaacggccctcctgccccatcagcttcgtgtcttcttttttttaaagaactgaaatagtccccaagaggcctcatggcctgaagactcacaatcatccacctgtaatttatgataaatgtctgggagcatttaccatttgcgtccgtgagtatttatagccctgaatgggcgggggggagggggggtggaggaggccctgcagccaggagctacacacctgtccccactagtgtcccctggttgacagagccccctcagcctccccaaggctgtcactgcggctgtgacagctgaggagtgccgcctttgaaagccagtggacagtcgctccactagggggagaggccctggccctggcgcagaggaggcgttgcgaggcgggacgggggctggaggggctgagcagccttcagggcagggactgggccctgggtcactggagacgttgatattagtccgtctgctgccaaattgctccccaccacatgagccccaggggtttatgtcccaggaaggcgagggtgcccatctgagcggaattgggaggggacggcaccagctcatctccctcagggcctttgcctcctggtgctgccctggtggctgctcctgcaccacagcccctgatggctgctgctagtcctgagttgctgggtttacccccagcccacacttcccacctgggcctgagggtgcggccagtgccctagtcctagccactacaggagtcattctgagacctgctggaggccatggggtcttcccaggcccctcaatcagctgcttccagggtcagcagggcagggtgctgccagtaaggtcctcagggagcacagcccggccgcccaggctgggggatactggggcagagcttccaggtctgtggggcctgatctctccccaaggctctccaggccttggtgcgccctccacagtgaccttcagagaggctgcaccccctcagaagaacagtgagaaatctctccatcacacgctccctggtccttatgtccctgaggccacccttccccaccccccagtgcctggagaagcgtgagactctggaggggcgccaggaggccaggggtcctcagggctaggcctggagctcggcccaagagctgcttttgcgaagcctgtcttgaatccggattcaccagagaacaagagcctcccagcctttggcgtttctgggcctgtaaagatgtgtgtacctcccaggccactctgatgcaagggcagggaccatgccaggcctgggttgggaatggctctgtgactccagaagctccgtctaaaactccaaagatgcccaaaaggctgtgctgctatgtggaatgtgtattatttgtgagcacgatgcggcttcttcctcattttgcagagcaacctaagcgggcagatgtacaaaccgtgtgttcgaaacccctgagtccatgtgtgtgaaaatgcaggttttctcttagaaataaagtggtgacttgtgctgtaaaaaaaaaaaaaaaaaaa

SEQ ID NO: 232 - DNA, 3297 bp, Homo sapiens
agcacggggcggtgactccagagctgggagcctggcagcgtcctcaccccaggaaggcatgcgcccctctgcgggcggccccagccctgggccccctgcccccggaattgcccaagatgccgggtgactcctccccggggactctcccactctgggacgcgtcactctccccacccctgggtccggaccccggcggcttctcgcgcgcgagccacgcgggggacaagtcgcggccacctgctccggagctggggagcccgggcgccgtccgcccgcgcgtcggttcgtgtgccccgggccccatggagctgcgggtcagcaacaccagctgcgagaacggttccctgctccacctctactgctcctcccaagaagtcctgtgccagattgtcaatgacctcagccctgaggtgcccagcaatgccacctttcacagctggcaggaaagaatcaggcagaactatggcttctacatcggcctgggcctggcattcctgtctagcttcctcatcggcagcagcgtcatcctcaagaagaaaggcctcttgcgactcgtggccacgggagccactcgagctgtggatggaggcttcggctacctgaaagatgcaatgtggtgggctggatttctcaccatggctgctggagaagttgccaactttggagcctacgcatttgcacctgcaacagtcgtcacgcctctgggagcgctgagtgtcctcataagtgccatcctctcctcatatttcctgagggagagtctgaacctgctggggaagctgggctgtgtgatctgtgtggccggaagcacagtgatggtgatacatgctcctgaggaagagaaggtcactaccatcatggagatggcttccaagatgaaagacacagggttcatcgtgtttgctgtgcttctgctggtgtcatgcctcatcctcatctttgtcattgccccacgttacgggcaaaggaatatcctcatctacatcatcatctgctctgtgatcggggccttctctgtggctgctgtcaaggggctgggcatcaccatcaagaacttcttccaggggctgccagttgtccggcacccgctcccctacatcctgtccctcatcctggcactgtccctcagcactcaggtcaacttcctcaacagagcactggacattttcaacacttccctggtgttccccatctactacgtgttcttcaccacggtggtcgttacctcgtccatcatcctcttcaaggagtggtacagcatgtctgctgtggacattgcaggcaccctctcgggctttgtcaccatcatcttgggcgtgttcatgctgcatgctttcaaagacctggacatcagctgcgccagcttgccccacatgcacaaaaacccacccccttctcccgccccggaacccactgttattagactggaagacaagaacgtccttgtggacaatatagaacttgccagcacctcatcaccagaagagaaacccaaagtatttataatccattcctgaagcttggaatatgtgagtgagaggatgagtccgatggtacagcctgccctcccaatttcaaaaccacctggttattttccagtgcaactgttaccaatgggctctcttttcttgagaagttcatttatacctcatcactgtttccaggagaaaaatctttacccaaatagcaatggtggcagaacttcctggaaacagattcagtgaccaaatacccaagtttacatcagtgcctgcaggttccctggaccttccttctcattcattctttcggtgccatctctatgccgttgggaagaagatggagtctgacccactgaatgtagcacagtccaaggacttctctaagatattggtcattggaagttccttcacaccaattctcctcctgagacggaatctccgttgttgttgttgttgttgttttctagcccaaggatgacatagagctggctcccagaggcccacagagcaattggccatgcctccctatccagagctgacagggacacaaccagtgtaaaatatcctgttgcctttgtcacttcctctttggaggcagaagcaagacctcagctgaccttcttactgtgaaagccacttgatgtctcagggaaaaatttcaaccagctcattccccgagcactccagcctggcagtcagcacctcggcatccacccagtccatcccaccatcaccccttccccctctacttacatcctaaggagtcggtcactgagacataaaggcagtaatcgcagaactggaaacaaaacaataatagagccacagccaaactctggtggccaaacccagtgttgcattttgtcttactctgaaagaagaacagcaaattcactgcttcaaagtggcctggctgccaagctagaatttggcagaacgcactttactattcctcaaggagtcaaccaacctatgatctggggaggtgggaagaggatgaggagcaaagttgggatttggcagaaggcagtcccaggctctctggatactaggggctaacttttgtgttgactctggtgctcatctgggaacttaggagaaacgagctcaggggtaatttctgggttgcagccttaaaggcttggacagctgtgaatctcaatggccaactggaggtgcagacttggcatggggtgcattctagctgttgaccagattgctaccgagtcccctcctccactgatgagctgcccacactgggaagcagcatgccctgactgttccaacaccacctgctatggggagtacctttggtcccctcacatttggccagaggcatacaaaaaaccagagcagctggagagggagataattactattccttcccttcctatctcctttctagccacaagagtgtgggggttggagaagaaccattagaaagggaaattagtgggctggtgtatctggaaagagggaagacttgatcctcagccccgaggttggtgcagggcctcccctgtgtgactctacctgcactctgtgtttatatcctgtgccctaagtgggccaagcccaggtaaattcctgctggccttggaactccaaggtttggctgaccagcagactggctccctgactcttcagcctcaaatccccagtttttgatgaatgtggatttctgtctgtaattaaaagcaatgcaacaagttggctcttgagaatggcagtaaactgagggccctaagagtgtggtctgcagggtcaagaataaagattacagattatatttacttgaaaaaaaaaaaaaaaaaaa

SEQ ID NO: 233 - DNA, 5608 bp, Homo sapiens
atgctgctcggagcgtcctggctgtgcgcatccaaggcggccgccgctgctgcgcagagcgagggcgacgaggacaggccaggcgagcgacggcggcgtcgggcggcggccaccgccgcgggggcgggcgaggacatggacgagtcgtcgctgctggacctgctggagtgctccgtgtgtctggagcgcctggacaccacggccaaggtgctgccatgccaacacactttctgccgccgctgcctggagagcatcgtgtgctcgcgccacgagctgcgctgccccgagtgccgcatcctggtgggctgcggcgtggacgaactgcccgccaacatcttgctggtgcgactgctggacggcatccgtcagcggccccgcgcgggcaccagccccggcggcagcccgcccgcgcgtcccatcccaggccagagtgcggcccccacgctcgcgggcggcgggggcggcgcggcaggcagcaccccgggttccccggttttcctctccgcggccgcgggcagcaccgccggcagtctgcgggagctggcgaccagcaggaccgcgccggcggcaaagaatccctgcctgcttccctatggcaaggccctctacagctacgaggggaaggaacctggtgacctcaagttcaacaagggggacatcatcgtcctgcggcgcaaggtggatgaacagtggtaccacggcgagctgcacggcacacagggcttcctcccagccagctatatccagtgcatccagcccttgccacacgccccgccccagggaaaagcactttatgatttcgagatgaaggacaaagaccaagacaaggactgtctgaccttcaccaaggacgagattctgacggtgctcaggagagtggatgagaactgggcggaaggcatgctgggagacaagatcgggatcttcccgctcctgtacgtggagctcaatgactccgccaagcagctcattgagatggacaagccatgcccagccgctgcatccagctgcaatgcctccctgccctctgactccggcgctgtggccagcgtggccccaagtcccactttaagcagctcaggggcggtcagtgcctttcagcggcgtgtggatggcaagaagaacaccaagaaacgccactccttcaccgcgctcagtgtgacgcacagatcctcccaggctgccagccacaggcattccatggaaattagtgctccagtgttgatcagctccagcgatccccgagccgcggccaggattggagaccttgctcatctgtcgtgcgctgctcccacccaggatgtctcctcctcggcgggatctacccccacggctgtcccacgggctgcctcggtgtctggagagcagggcacgcctcccaaggtccagctgcccctcaacgtgtacctggcgctctacgcctacaagccccagaagagtgacgagctggagctgcacaagggagagatgtaccgggtcctcgagaagtgtcaggatggctggttcaagggggcgtctctgaggaccggggtctctggggtgttccccggaaactacgtgacacccgtttccagggtgcctgcaggaggggcagggccgccccggaataatgtagtcggagggtctccactggccaaagggataaccacaaccatgcacccaggcagtgggagtctgagcagcctggccactgccaccaggcccgccctgcccatcaccactccccaggcccacgcccagcaccccacagcctcgcccccaacaggcagctgtctacggcactcagcccagccaacggccagccaagcccggagcaccatttcaacagctgcccactctgcagcccaggctcaggaccggccaactgccaccgtgtcacccctgcgcacccagaactctccatcccgcctgcctgccaccagcctcaggccccactcggtggtgtccccgcagcacagccaccagcccccggtgcagatgtgcccacggccggccatccccctcacatcagcagcatcagccatcacacctcccaacgtcagtgccgcaaacctcaacggggaggctggaggggggcccatcggtgttctgtccacatccagccccaccaacacgggatgcaaactagacgagaagaaaagtgaaaagaaagagaagaagagtgggctcctgaagcttctagccggagcatccaccaagaagaagtcacgctccccgccatctgtgtctccaacccacgacccccaggtggccgtggacgccctgctccaaggtgcagtgggccccgaagtgtcctcactgtccatccacggcagggcagggtcctgccccatagagagcgagatgcagggtgccatggggatggagcctctgcacaggaaggcaggctccttggatctaaacttcacatctccttcccggcaagctccgctgtccatggctgccatccgccccgagcccaagctgttgcccagagagaggtaccgcgtggtggtctcgtacccaccccagagtgaggcggagatcgagctgaaggaaggcgacatcgtctttgtgcacaagaagcgtgaggacggctggtacaaggggaccctgcagcggaacggccgcacaggcctcttcccgggcagcttcgtcgagagcttctgagaactggtgctccctgcacccagctcacagagggggaggccgcctgggaagctccacggcacacagagagggagccatggcgccccaagggttccaggtcatctccaaggcacctggcgggggataccctggcccagggtgggggccagggactgtggaggtcgtgccttctcccaaaacccccaaacggagagcacacctgggatgttcttcaaggaaatgcccaccccctctgtggaaactgcaaagaaagcaccttgaggaagagaggcaggtgccggcgcaggcaggcctgtggctgtggtttgcagccatggcagcgttctcatttaccacctaagcagggttggaggttgcaggaggtctgcaggcgaggtgggtggcatgggggccaggagcgctggagatcatctttctgggctgccctgggcttcccgcggggcccaggttgctctgtcaccattctatatacctcagtcacctgccgcccggctgctcagcaggggtgtttgtgaggccctgggggtgccccggaaggggcaccccaccgcccctgttgggaaccagagcagaatctgtgggcttgtcgcctgccagtagtataagcaacactttctgttcaccaccattgtcccttgcattacttctttcttacagcatatttttaacataaagctgttagactttatatatttctaataggtcagacattgcctatttttcatacatctggtgctgcctttttgtaaaactaataatgacttggttgagcttgaaagaaaagatgtctgaggcgacatcaaaggggcagaatttttatatttcccatatggctttgggagagcgccgagaagccgccatcccgcacctcagcgctggccagtactctgggggctggcggggtggatccattgagggggtcggagggagcttggaagcagccggtttctttaaactcttaccaaaaccccgcgctctgtctagacggtgatgattattattcaagacctggaaacatttcgaggaagggccactataattgtccttttgtgtggcggtagaaggagcacgcaggtcaaccccagccgggaaggcaaaatcttccctttattgcctcagagagaactgcaattagcattctcagaagatgatttcttggtatcaaaatgtgcagtttctacaacagtttagatcaccaccaccatttttcttcttttttaaaaataaataactgctcccatttcaggcagtgcaaaccttcatctgctggagaccagaggtacaaggagatcagggggttgcagcaccgctgcaggcttgcaagatcggggagttgggagggcgagagaggaggaggtgcagctttgatgctgggacctccctgagtggggctgatgaatgtatattcattagcaccatggctcacttcccaggaagactgatcaggagcccttcagggacaattttgttctcaagattcacaccttaggaacacatttttatcacctcaaaattttgatccatcacccctctctccacctatatttttacaaataccattcagacttaaattaagctgaagaaactagcctttggtaacatagggtgtcattggttttcagggatgtaaccaattccagaaatacattcttttgcctggcatgaagactttgaaacacgggccgcttattttcagagttcctgttttgggacgtgacttggctacttgttacttccaggtggttaccacacggcgggggtcatgcctttccctcccccaagatgataatagatttaatagactcaaagaagttgttcagaatcaaagaagaaaaagtctggcttaaacatagtaacttctgtgtgccaggttaatgacaaccaaaagctctctatttaccattattgccaaacttcatcagttgcccatcctgcaccaaaatcctgtgcgtgtttaaattcacgttgtcaccaaagaggtgcacagatcaacaacctggatgacgcaggtgttctccagggaaaccagaccaagtcaagtctccaggtaacttttttgaagtcttttttttaaggcgcgcaggtaccaagcaacagaatagagtaacctgaacgttcttactctcccaggcatggcccacgtggtgcttcaggtagaaatgtgcttcaccctcctggtggggggcgaggacacagcccactgcatgcagcatggtagagagctggggcgaatatctccatgtctttggaggatgtcagctggccgctttcagggcagagtcgggtgggcgttggtgccaccttaggaaggagagcgatgcgtgggtctggccagagctctggagccaatgccgggctgcctgagagcagaggaaatgcatggcccatgtgcatttctgagtattttaaactcgttcaggccctgcagccttcatgatgatgtagctcgcagagaagagcaggagcagaattagccctttcttcaggccatcttgcctcaaagggtacacatgtttggcggttaagatgaaactaacccttatgtttcatcctggccccatgatgtacacatcttagccatgtagtggccttggggggccacagagatttcctttgaggagcatggtagagtccacagccatggctgaagtcagtggacaccgaggggacaggactgcaggccaccaggggcctctgcccagagggaggcagagaggatggcggccacgggtgctctcctggcatcctcatggggtgatgccaggccgggcacttcaaaacaggctcagccgactgggagatcctttgtactttgcacagttcacacacacaaacacacacaccctatcccaagtgtttttgttagacacaaatgtcagcgtgtgattttggaagacttgtcagtgatgacaaaccatgatgcctgtgtttctgagtctttaaataaaaatgaacatgg

SEQ ID NO: 234 - DNA, 7416 bp, Homo sapiens
ggcggtgtccaggcttccgggcgggtagtccttcggctccggagccgcgactgcgctcgcctaggtggtgggcggggagggaaggaagggagcgggcgcaaggcggcggcggcggctgcgggtgaggaacttgttgcgcccgcggctgcgcggtgcccctccctccgctccagttcgtcggggcgggcgcggcggcggcggcgaaggaggagcgcggccggggcgatgcggcgctacctgcgcgtcgtggtgctgtgtgtggcctgcggcttctgctcgctcctttacgctttcagccagctcgccgtgtccctggaagaaggaacgggcggcggtggcgggaagccgcaggccgcggtggcttcctggctcgcgggcggcggacgcggcgccgtgagaggcgccggcgtcgcgggccccgcagcgcatcccggcgtgtcggacaggtacagtctgaaaatacagcctgttgagaaaatgcatctagctgtagttgcctgtggtgaaagactggaagaaactatgaccatgttgaagtcagctatcattttcagcatcaaacctcttcaattccatatttttgctgaagatcagctacatcatagctttaaaggcagacttgacaactggtcatttctacaaacatttaattatacgttataccccataacctttccaagtgagaatgcagcagagtggaaaaaactctttaaaccatgtgcttcgcagagattgttcttgccgttaatcctgaaagaagttgactcactattgtatgtcgacactgatatcctttttttacgaccagttgatgatatttggtctttactaaagaaatttaattccacacaaattgctgcaatggcaccagaacatgaggaacctcgaataggatggtataatcgctttgctaggcatccatattatggaaaaactggagtaaactctggagttatgttgatgaacatgactcgaatgagaaggaagtatttcaagaatgatatgacaactgtacgactacaatggggagatatacttatgccattgcttaaaaaatacaaactaaacatcacatggggtgatcaagatctattgaatatcgtgttttttcataatccagaaagcctttttgtttttccgtgtcaatggaattatcgaccagatcattgtatatatggaagcaattgccaagaagcagaagaaggaggaatctttattcttcatgggaacagaggtgtttaccatgacgataagcaaccagcatttagagctgtttatgaagcactgagaaattgttcttttgaagatgacaacatccgttccttattaaaacctttagaactggaactacaaaaaacagtgcatacatactgtggaaaaatttacaaaatatttatcaaacaactagcaaaaagtgtaagagatcgttatgccagatcaccaaaggaaaagtgattcttggtgactgcttaatcaaatggatgaaaacaaagaatcagaagataagtgtgaaggaatcgtcttggatgaagtattcaggaaggaattactcatctccagaataattttttttttcctaaagaagttaagtaagcagtattttcaggtaatgaagaataagttaaaatcttgggcctcaacattgaacattttttatctctgatgttttgtaatgttacttgctatcattccagtattgatgaaaatactattgaatgggtttaacctgcagacttctgttgactcatactctcaagagtggtaggggtgtgtagatggagaaaatgtacctcaaacagtgccaacactcaagactgtgagtagagcaataattttatgtcagcactaacctcactttaaaagtgtgagaaaaaagtttgtttacaggagcagaaacaggtctgttgtttctgaagaaatgtgatgtaactgatgtaaccattgacaatctatgtgtgcctttatacatttcatctctgttttaaaatatttttatgacaatcatgtttaaaattatttttagattacaagtaagctgcatgttaaaaattgagctgtgtaaggtagaggaaaaatagtgaaaactttgggattttaatctgtgtgtgcgtgtttgtgtgtgagagagagtgagaaatgtagtgtttcattttgtatgcattaaactgtcttgccaaaactcagatctaagattgttaaatagatatttggggaatttttttttaatcactttaaatgaaaaacgtcagctttactgggcattctggaagcaaaatatattatgctgatggtaaagtgagaaccttaagagtatactcatgatggtggaaagtgtgatggaccaaaatgcataagctatatacttcctgtgagtagtaattttagttacaatggagtagaaaaatatggtccatttaaacttgtcttctacctcataacggccttgcaagatacttttgaagaagcaaatgtctagagccttactttaagtaagttaaacaacttaagtggatgatttggaataagattgttacatccagctgtagaaaatgtggttttaattgggttgatgtgcatttttgaatatcacctaagacagttaatttttttaaatcttgagaaattacttctttggcattcttgacctgttagctaatataactatagattctgaatacttagcatatactatgctggggcacatatcttattttaccaacaatatgattatctatatggttatcttctttttctccctgatattttaatgctcaagtagaaaatggaaaatcatgaaggaaaaatacaacctgtgaaaattgtggcagttagctttgtgaagacacagtgacctctgtggagacatggaatatgcagaaagagatggttagtacagttgttctgtcgtctgcagttcagtcagggacaaattgagagaggaaagtttaagcagggtgcattagaagttgataaccagtccagcattcttagaacagatgggtttagagaacacgagttgtagttccttggcagaatgccatggtgaatataagaaactgtgaaattgagcttactgagtagaaaatgagaatactaaaaatgtgaagtttggagggtatgtattagatcatttctaatggtcctcaaataatgatcattgcctgcctgactatgtaagattcttgttgggagcttaagaatagattcctgagctaggcctttggagactctggcatgctgtgtctaggagggagtctgtaaaacaatttttaatgaagaaatttaaaaattacacaaaactagaatagtgcattggtactcaacatccagatctgacacttatcactatcttaccatgtttgcttcatttgtcatttttttgtttgcttaagtatcttaaaatcccatacattgtgttatttcactgctgtgaacactttgggtagataccacgatatcacacctaacagaggcagcagcagtccttcggcttcatctcatagccagtccttaagcaaatttccctgattatctcaaaaatcatcttctagttggtttgttagaatcaacagaatataagtcacatgatgatttcgtttttaacaatcacctcagatgactttgatgttagctactttgagaaccactggaaattattttgccaacttgaaagttcaagttaggataccacaattcttggcacgtttggtggattataaatgtgattttgaaatattagaggaagcatttggggttaatgacaggatatgaatttatattagtaagtttgataagataaaatttcctcagtgaacggagaatctcagccccatgggctctaattgattgggacttgtgtagagcgtggtcacagtttaatccaactggactgtatgctgtggtctcactcatgttgtggcttatttacactgtcacacacactacattgtggatcagttggaaggttcttcatctggtttatttagacctgacctaattgatcattttaccataaattgaattatagtgaaaactgtcttttgggtactgtttctacctaaaattaaaggtatcacaaaatatgtataataatttttaaatgaattttctgaatttatctttagacaaggtaattcttttgaattctaaagaaatgcagttcttggagttgatgagaggttaaattatagatggacaacttagagaacgtattccatcttcatataaatggtctttcataaaacatagtgtatctatgcagtttatataaactacatgatttattatttgagtctatgtattctgacctcagaactatctctgggctacagtattaccaaagtgggatgcctttaaaatgcagtcaaacttcatttgtatgaagtagaaaagaacttgggaaacctttaaaaatatatattgtgatttatgctttaagaaaatgcatacttttttctaatgaagagtagttcataatatataagggttttaaggccctgaaataacattagtgcttactcattgctctctcatcttgcctccagtcagatgttattggtatagtgaaaagaagaccagattttgaactagatctggattctctttttagtaactcaggcatgttatttacccttctctgtgccttaggtttttaagtacaatcagtgtacccttcaaacctcacaagatgaaactcagaagagataatggatttggaagcattttgcgtggcttatattatgccacgccagtgttactgttgaagttctgttttgttcgttgttttctgtacagagcgttcagtttactcaggctgaatgttttctgacatatatctccagtatgaatttgtttatgtaaggaagagtttttcaggaagagaaagtagagaagaaaagaatgatgtaactaaatcaaaaaagaaggaaaagagaggaagtgagaaaaggggtgaggaaagagaaaggagtaagaatggggatggcaaagggcagagtaagagaaaagatggaatgagtgtatggaaaattgagaagtagagatggagagaaatggtgtggaaacatttactttttgagttgtagccctcacactacatcagtttgcttgcctgggctctctggggtcaggaaaggtgctgacttccatggaatggggcagcagggcctgctgtatttggtttgttagtactagagttgtttcccaatcaccctactcactgatcatttagtgccaattcaacattttatgtcttttttttttagtggatcccagtttgtgagctaggacctgtggaaatacaagtatcttcctttttaactttattgttttagccatcccaagtgttagactgcaagactaactacatattccccagtggaggttggaagtggaggggactgcttcattaggtctgaagggggccaaggaatgtgttgcagcagttttcgcagatgatactgacgagaggccaggtttgggaatcactgccctgccttggatggcaaattaagcaataaattacacctatttattcctcagttgggatactttcagttgaaccattctgagtagatttaagagaacaaaagacagcagaaataccttaaaagatattattggctgtcttatttttcagatatttgtatttaataaataccttagtagtagtcagaacctctttgagatgtttttagaaagaccactgatttgttttttaaaataatttttttggttccttagagtagagaagaaaagtaggggtgcaatatgtcaggtgtggggccagttatccatttattaaatgcaatttcaagtgtcttaaaaacaataattgccttattgcattttaatatttaataaagtagattaaataaagatttgtattataacagttattcttttatccattgccaaagcaacccttttttgcctattaaaatctggctaaactgttctgatgttgtttcttaattcattaaacatgaaactaggttttacaaactaaattatataaagacagaagtctaaaaatggtaccagaaaatttttttttaaaaaattaatgtgttattcaaatatccagcaattaaagactcatgagaaaaacagaatagcatattagatgtaacagtttaaaatggattgcaaatcaatgtcagacttaaatagaaaatatttattatcacctcatttctaccaataatttcagatgtttaatgggactttgaaaagataggaaaaaatagaaatgaaaatttatctcacctttaatactgtgaatactatttggagggtccctggtcagacatttaaatatcaaacttaagaactgacatggagcctttgattagtttatatacaggatctgaatatttacacacatagcacactatagcaacctcttgtaaaaaatcatgaagatagaattcaacagtgtatattctattaaaaagtaaattggctgggtgtggtggctcatgcatgtaatcccagcactttgggaggccgaggcaggaggatcgcttgagcccaagagtttgagaccagcctaggtgacaaagtgagaccccatctctacaaaaaaattaaaaaattatccagatgtggtggtgtttgcctgcggtcctagctacacaggaagttgaggcaggaggattgcttgagtgcaagagtttgaggctgcagagagccaagattgcaccattgcactccagcctgggtgacagagcgagaccctgtctcaaaaaataaaggaaattggctttgactatgaaaaacagccattttcaacctttttataaaacctcttcagggaatattggaatattatttttgtcaggcaaaaataatccagggcttgagcattgctgtagaatatgttatctgttcaaaacttagcagagcacgcatgcatcacatgcattgtcatcagtatttgagagctgaaccaatggtttttgatggttgccgtaacagaagatctgtgaagaggatggtggtttgcacctgttcctgaagtcaaactggaaaaggttgcaggtatttcaattttctcaatcattttgcataaatgtattaatattttgagtagtaatagttctaaacctgcaggaaggcatcattgtatactgtggtatgtagagaatactactcttacactgctctttatcttaaaatgttttggtatactgtgaatattttcctctaagtatttggtgtattttgacagttattaaaggagaatataaaattaaagattctggtctaaactaagaataatggaaagttgcttcgtcctgccttagaggagttttcagttcatcctcttcttgagaaactatgtgttgctgttactaaataaacatttactcaataaacgttttatttcctcaaaaaaaaaaaaaaaaaaaaaaa

SEQ ID NO: 235 - DNA, 10057 bp, Homo sapiens
aactgtcgcggccgccgccaacatggccgagaccagcgaggaggtggcggtgctggtgcagcgggttgtgaaggacatcactaacgccttcaggaggaacccacacatagatgaaattggcctgatcccatgtcctgaagctaggtataaccggagtcccatagtcctggttgaaaacaaactgggtgtggagagctggtgtgtcaagttccttttaccatatgtccacaacaagctccttttgtacagaacaagaaagcaatggctgaacagagatgaattgatagatgtcacatgtaccctgctgcttctaaacccagactttaccactgcatggaacgtgaggaaagagctgatcctctctggcactttaaatccaattaaggatttacatctgggaaaactcgccttaaccaagtttccaaagagtccagaaacatggattcacaggcgatgggtgctacaacagctaattcaggaaacctccttgccttcctttgtgaccaaaggaaacttgggaacaattcccacagaaagggcacagcgactcatacaagaagagatggaggtctgtggtgaagcagcagggagatacccaagcaactataatgcttggtcccatcgcatctgggttttacagcacttggccaagctagatgtcaagattcttcttgatgaactatcttctactaaacattgggcatctatgcacgtttcagaccacagtggatttcactaccgccagtttttgcttaagtctttgattagccaaactgtgatagacagttctgtgatggagcaaaatcctttgagaagtgagccagccctagttcctccaaaagatgaagaagcagcagtttcaacagaagaaccaaggattaatcttccccatcttctagaagaagaagttgaattcagcactgatcttattgattcctacccaggacatgaaaccctttggtgtcataggcggcatattttctaccttcagcatcacttaaatgcaggctcccagctgtctcaagcaatggaagtagatggactgaatgactctagcaagcaaggctattcccaggaaaccaaacgcctgaagcggacgccagttccagactccctaggcctagaaatggagcacaggttcattgatcaagtattgtccacctgtcggaacgtggagcaagccaggtttgccagtgcatacaggaaatggctggttactttgagtcaatgaaagaggtgaattagtcctacaaggttccccttttagtgcaatattgctttcttttattatttacatagttgcatgaactgtttactattattggctaaccatatgttcttcgtctttaggttgaaagtccatagtaaatctttcattttatttattttgttaataactggcattcctgtggggataaaataatcgtatagttccttcctgctgaacagcgagtcttaaattttctgtttaacttctcaccctttgtatttctatatgtggggcttctcatttggttttcctgattggttcacacacacacacctctacccccctcagtccaattgctgcataggcaaattcttttaaaaattaaaaatttaaggcctaggcaggaggattgcctgagcccaggactttgagaccaacctgggccacatagcaagacccgatttctacaaaaagtaaaacaaaatagctaggcatggtgctatgcaactgtgttcctagctatgcaggaagctgaggcagaaggattgcttgagccccaggtgtttgtggctgtagtgagccatgattgcaccactgtactcagcctgggcaatagagttgagaccctgtctctaaaacaaattgaaaataaacatttatgttgcagttcaactgaagaatgttggtatgaatgccgaataacttgatgtaattgttttgagaatcaaatggctagatgggcgaatgtttaaaaatgtaaactagttctctttctctagcatgttctacccaattaccaaagtcagaagtattggaatttatatgaaaaaaatgcttccaatgtaatccattttttaaatggttatttaagaaaaaactaacttaagagtttatgtaattgcagtaaaggaaaattatttttattgctagttttgatagattatttttacctcaaatttggtatatgccaaaacacatcagtccttataaaattgatttttttttcctgaaaacctggaatgccatttttagctattactactttttaatttcaaattcacttatgacaaatgggagaaatatataaagaaatagatccataaaaatattcctttttaaaaatctaaattattgaggatacactatggaaactataaaattatcatgaagtgactgttaaagtttactggcaaatgccaagggaaggaatagtatgtgcaaaacaaaacactttgatactgaacttaatcagggatgaggtaccaaagtatccacattatagccgtatcttatgtttccaataacaagggctgagtttttcaggtaggtgggatgagggtggggaatgggccatgtaatgtctgctttcttatatttgcccttttgtaagtggtctgtttcttcttttcatatactttgttttgccaatccattacgtattttttgtcacttttgtgtgtcatttttgtatacctttcctttcttacttcaggggtgtgtcttcaagatttctaccccctatttgcaatgaatttcatacctcatctaaaatacattcatataccagaaatatgaagagtggcccttctaaaagtttccctaatgatggaagctgtcagttgtcctatctgtgcagaatgtgagtaatagtggcagaaataagtgtgacaacaatgctttgcctgttgttctttttacttgctaggtaatttgtaaagtggggataaagatgtagggaaagtaaacctctctctcactgttacggaaagcctggacttgagttaggtagactgccttaaagaagaagaaatatgtccttttctttggcatcatggttttgttgagtggcagactgttgaagtgagttgagacttaagaacgccagaaaagttgtctagcctggccccagtagacagaatttgttcttctctcaagtaaaaaattacctttttatagcttttatattatttagatgaaaaaataccattatgaacataattccatggccctttgtgtacaaagcatattttgaattaaatacctcaaggtccacctagacctctatggataaaatcataagtttatgatttttagctcctgtgagtgtttgggggcaaactacacagagaagacatgggtggttcagcccattccactaaaatatgttgccagattctggcctaactcagtattaccttttttcctaaaaatcatttttcacattttgagtaatagggcttatgctttgatgtgaaaaaatgtcaggaaatgagtgtagacaataccctataaaacactagctaagttttatagtgctccatgcctttgtgtaccttccactgattatcttgcctatctttggtgtgtaaactattttcatatcttctaaggctcttaacccactcttttctgaagccgcacagtcctttaatatgtcttgtttccttcctaaaagtttaaagtagagagcaaaaatgcaaatacccaaaggatactgttagtatgtaacttttgtgtgctgctttatttctagagtttgcattttttaattgttcattcacagaaaatcctaatattgccctatatggttggtttttttcctaagtggttaatatttaaacccgctagctgtagcatgataatgtctttgactgagcttatgtagtagaaaggatgtgtctgttttctgggacttttagtcttcacttatttttctataacaatctaattgttaaaaggaaaagatggcttattgacacatatttcattaaactttcactggaagaacagtgggtcatcctactgtggattaagaatactactgacaagcaaaaagcattaagctctgtaactgtctccaacaccaccttcaccccgcctttagtgtaccttagtgtactttagtgtacctattttggcagtacggtgttttccagattctacttgtgccctgcacattgtgaggactcattaaatatttattaaattaatgaatgactaacaggaagagaaagattgtttgtgagtgttaagaatgagtgatgattgagaaattgatggattagtgcaatggattgggaatgaatgatgctttctagtttcgtaatacttgggaagagctattgcatatagagtaagttgatttagactttttttttcttcatttcattaccttgtttaaacttgttaaatcccagccaagaaatgcagctctgtaattgtcaattaactgtattataatatatattaaaaatttgtagagctaaagaacccacttgcattaagaacaccactttctgttcatttgtgatactagaggacagatcctgcatacagagccgaaactgcttttaatcatctgaagaaattctttgatttcagtgacttactgatctgtacctgtgcacatatcattttatgcttctccttttttccccgcaacttgaactgtgactctttcagatatttcttaaatctgtatgagtcattttttaagcttagggatttgatatgtattaatgtcccctttgtcttctgtagattttagcattttattacctcttaagaaactctgggcccagactttcagtcatatttcttattcctatggtacagttctcacttaaaggcttaattattagtagggttaaatatatacaggttatctctaaaagtacttaaatttttaaataagggcttatgtgatacaagatacggaaacaaaagtttttggatttttatgcagtagtttgcaggaaagcaaatacatagtagatcgtatgccacttaggtatgttcaggtcatgccagtttattcttgttgggccacacacacatgtatgtgtgtgtaaaaggaatttttagtattgaagcaaacaaattgtcagtttaataattttctcttacatagcacaagatggcagataccacctactgtacaacaatctaataatccctaccttagttcccctgagttatagaagatgctaaagatttagttgtaaagggaagtaacatgattttttttttctaaaaagctgttttaagctaactattattttgctactggaaaattatattttaaaacttacagatatttaaagtatgctagaaaatttgaacctgataacaactgaaccttttgtcttgaataaatttctcaaatagaactgtgcaaaccctagcactttatgtgttgctgcctccccatacctaggtatgctctgtaataagctcccatttaatggagagatgtgtggaggcactgagaagttaatgaagaaaaatcaaccctaagaattccttattgtcacatagtgtcttttaaaaaataactgtagagactgtgttaattcgagtgcctttcttacttttttgggagcaagattatatttaatgtttaagaaaacaggatggaagttttatcaaacagttgattgtggcccattgttttatttattcccatcgctaggcatggccccgtagggtattttatccttcagtgagagactgatataagcaggcaggatgctttgattattccattagttatcattttaagcaccctaccaagatttagttctttctttctggcaactaacgttttgggggttggaggcatcccatttagaggatggtgtgtgcacaaatagattagcctgaaacctgcgtccaaagggaaacagtggcactctgccctaaaataaaggccagaacgttgtcctaaatgaatcctttgccttactttaggaccttccttccctctcaaattcaggcataatgtaatatagttgaaagggggaaaacagtacttgctttctctcaggtattggaggaaaagaagtaaatgcgtagatgaaattttaaatgtatcattttatctgtttgtatatggagaagggagggataggaattccatatttcaagatagcaaatataatttcatagaaatatatagctaaagattccaaagtgcttttacagagaactgttgaataatatattcctaaagggcagcaatatgccatgttcatggtgaagacagaaaaccaatgaatcagttgtggatctcaggtgggagaggaaacctcaggctcccaactttgacttctctactctcaccaggccatgttaacactgtaaaaccaaactctttgctaagaacaatacagggcagtagtttagtctgctgatgaaaccttgtgcttccaagaatattagctatatataatttgtgctttctggatgattctattgtccagaaagctaaccctgacgttacttttattagtctgttgttattcctcagggtgtagaagatttagtaaattcaggacaaattttatattcagtggcaaaaagaaaaggcaaaaatatgctaaatatattattagctcttaaattttagtatagatcgtattttttataaactattaccagtacagtagctagtagatattctgtgactgcctcattgtttatcttgctgctttggtccctatggctctagtatgaacattctcgtgtcttctgtggaaatgatttctgtgttatagttccatctttggtagaggtggggatgattgtattttgttttagttgacatcattctcaacttttagaaatactgttgaggaaaatgattaccgttggttttcaaattgacaactattttgcttccaaagacttcagtttccctttgttttatgtgtagacctcatatatgttcaacacattgcatactgccttgcacattgtaggaattcaacaagtcaagagttgataaaagctagaaagataaaactagcttagctatcatatcatcattgtccatattcttagctttgggaaaaatataccattttgcataaaatacataatcagtttcaaatgcataaggcaaagatatacagttgcacaacattgcaagtgaaatttacaaaggatttttatttttgtgtatgctaaaagtgctcctacttaaagcagttttctttattagaccaacaccttccagcaaagttagaaaccaaacacaagtgctcatttgcccaaattaaccagatagttatgtaaactgttcatattaagtctttagtggtttacaaacaataacattctggcttttcttccataccttttaggaatcagccttaattttaagtatagcagtcactttcctcaaggtactatgcagcatactttagattgcttatttatcattataaggtgataggtaataaatttgaggtttacttgtcatataatttcatatggcagatattgattcaaggagcattctattagaaaaagttgataaattatcctcccttacaaatatcatcttgcatttggagcaggtatttttttcttattagttaaagactgggtacagttatagtagatgctcaataaatgcttagtcagtgattgatctaacatcaaactaacagctttcagaaaggagactgttgacatcttttcaccaaggagtatatttgtagagtaatatatgtgtggaattttgaaattatatcatttgacatgatttatgaggcttatttaagctggagttagtaacgtaatagaagtattatttatacagaacatagttgaaagataggagatgtgaaagattaagtagtattttcttgtgcaaggcatattaataaatgtaattaaatgtcttaataagcagctggctgaactctagagagaactgctgtagtcttctgcaatcagtctctgtattggtatatccagtactatcgggtttaggttctttttatttttccttaaatcttacttgtttctagcgtcttaagagtggtaatggtaaaatgtgaagttacaataaacttctgcttgttttctcagaacatctttggcatgaggaagaactttttgtgaatgatacagtagtctcagcatctgttaatttgtggttttcaaagcatttttgacagagtttacctaatgtaaaaagattaaacagttttataaaacacaaataaacattcctacctgaactgtgaggaacagagtgtatagtacaaatgtaattaggcattgcctcctggcgaggttcttgatgcatgacttcgatgctggctgctgactgaggtgaccactgtcagtattgtactttggcatatgttgtttttaggaaaataatggaatgcattcttagattaacttactgtttttgagttggaaaaaataaaagatgaggtattataagtatgccaaatatttatacactacaaaagattaaaaaaggagagggagaaaaaaaaaggccagttatgattttaatagcgtctaatttttttttgactcgaattttgtggacactagtcaattgcataatttaacatggaggagctttcatttaaaagaagttctcagctactatattctgccattaaaattaaccatgcctgttaattttacattgcttgaagatataagtaagctgccgtcaatattgttttaagattttcttatagtttatgtttaaatggaaaagttacatatataatctatggtgcagggtcaggcattggccattaaagataagtttggctaactattttactgaagagactaatggtcttccctctgttgtactgctatgtttcttgatctgtttttccccaatgtaacagtctacattgaagtcctttagctctctccatatactaattgacatttgttaaggattcaatattttgtgaattctttttacccttaaaatgcatatctttcagagagataagaatgaattttgcaataatttatatgcagagtgtgcttatgggtttctgggagttcaagttagtaccccagagtgcttaaaagtatgatgctaaattctaaggctaatgtaatgactgtagattatctatgtccacattgttcaacagaaatataatgtgaaccacaacataatttttaattttctagtagccatattaaaaaagaaacaagcaaaattaattttaataacagtttatgtaacccagtatattaaaaatatcatttcaacatgtaatcaatataaaagattattaatgaaacaccttatcttctttttcttccatactaagtcttagatttgagtgtattttgcactcacagcacatctcaattctgactggccacattttaagtgctcagtagtcacatatggctaagggctactatactggacagtacagattcatagagtataaaatatgactttaactttggagatggtgaggtaggcctgtaattatggtactttaaaaattcagaatatttagaaaagcatctaatagaattatccacttgttttccttcatcttcattttaatatgttctagaagtaggatcagcctgttccaatttgccaagcattattaaggaggaataattccataccatgtaaaataccatgatatgctgattatactacattaacaaatttttaagttgcgttcactaaattctgtcctgtttcttcaaaataatatagcttaaattgcatgttaattgtatatcttacctattttgtttttatattattcttacaatataatcatgtatattaacaaacagccctgggattctaatcttcctctgcaactgtcttccaggacttactggcacttattacactgtgataagtggcagaaaagtagaatgaaatattctttttccattagatttgttcttatgtgaccatgtaccaagccagctataaagtattgtatttctgtagaatatggaaaatagtatttgtcttacctttgctaaatgtttgcaatttctaagtaaaccttttatctcctaaaatgaaaaaaa

SEQ ID NO: 236 - DNA, 3814 bp, Homo sapiens
aaactcatctccagccctccttcctatgacctctccaccctggggaactggccctccttcctagaccctgcttccccttgaaagcccccacccccgcctgcagtcgccgccctccaggcccctcccctggagcgctggagggccccttagccccatggatgggtatgaaagtccccggaaagggggaatctgggccctcggcgttgctgacgcccccaatgtcgtcgagcagccgggggccgggggccggagcgcgccgacgccgaacccgctgccgccgctgccgggcctgtgtgcgaactgagtgcggggattgccacttctgccgagacatgaagaagttcggggggcccgggcgcatgaagcagtcgtgcctgctccggcagtgcactgcccccgtgctcccacacacagctgtgtgcctcttgtgtggggaggctgggaaggaggacacggtggagggagaggaagagaaatttggtttgagcctcatggagtgtacaatctgcaacgagatcgtccaccccggctgcctgaagatggggaaggctgagggtgtcatcaatgcagagatccccaactgctgggagtgccctcgctgcacccaggaaggccgcaccagcaaggattcaggtgaggggcctggccgccgtagggccgacaacggcgaggagggcgccagcttggggagcggatggaagctgacagaggagccaccgcttccaccgcccccgcccaggcgcaagggccccctgcctgccgggccccccccggaggacgtgcctgggccccccaaacgaaaggaaagggaggcagggaatgagcctcccaccccaaggaaaaaggtgaaaggaggccgagagaggcacctgaagaaggtgggtggagacgcctgcctcctccgaggatcggacccaggcggcccgggcctgctgccccccagggttctgaatccgagccaggctttctcatcctgccaccctgggctccctcccgagaactgggagaaaccaaagccgcctttggcctctgcagagggcccagcggtgccgtccccgtccccgcagagggagaagctagagcgtttcaagcggatgtgccagctgctggaacgggtgcctgacacctcctcttcctcctcggactcagactccgactccgactcttcgggcacatcgctgagtgaggacgaagcccccggcgaggcccggaatgggcgacggccagcccggggcagctctggcgagaaggagaaccgtggggggcggcgggctgtgcgccctggcagtggggggcccctactcagctggcccctgggcccagccccaccaccccggcctccacagctggagcggcacgtggtgcggcccccgcctcgaagccctgagcccgacacactccccttggctgctggatccgaccaccccctgccccgggccgcctggcttcgcgtcttccagcacctcgggccgcgggagctgtgtatctgcatgcgagtctgccgaacttggagccgctggtgctatgacaagcgtctgtggcctcgaatggacctgagccggcggaagtcactgaccccgcccatgctcagtggtgtggttcgccgccagccccgtgccctggacctcagctggacaggtgtctccaagaagcagctcatgtggcttctgaaccgactacaaggcctgcaggagctggtgctctctggctgctcctggctctctgtctctgccctgggctcagccccactgccagccctgcggctcctggacctccgctggatcgaggatgttaaagactcccagctccgggagttgctgctgcctccaccagacaccaaaccagggcaaacagagagccgtggtcggctgcagggggtggcagaactgcgtctggcaggtttggagctgacagatgcctccctgcgtctcctgctgcgtcacgcaccccagctgagcgccctggacctgagccactgcgcccacgtcggggaccccagtgttcacctcctcacggcccccacgtccccactccgcgagaccctggtgcacctcaatcttgctggttgccaccgcctaacggaccactgcctcccgctgttccgccgctgccctcgtctacgccgcctagacctgcgctcctgccgccagctctcacccgaagcttgtgcccggctggcagctgccgggccccctggccccttccgctgccctgaggagaagctgcttctcaaggacagctagttgggcgccccccaccctcccccggactcgacaggagcctggacctccggcttcatttcacccctgctgggaggccaggttcccacctcaccaccctgggattcctgagtgtcagtgacttgggattcccacccagggactcaagccagccacccccttctttcccccctgcactgatatctctgggggtttctccttcctatgtcctgcccctgctacctgcttcattgtccatcccctgggggagtgggtcagaggtactggagggtgctgagccgaagggacggtgggaggggggttatggtgcaagtgttgggggggagaatggggaaaggacacacacaggatatgggagccaggggctgggggaggtggaaggggcggggggcggggcagacagcagaccaccaagggttcagggaacaaagaccagttacttggagtggggggtgggggtggggccacaaaaggaaaaccggaggagcaattggggatccaggtgtcagaggtaggggaaccaggggcaagctggggctgagctggaggtggggatgagagcaggtgtggggacagcaatacccccttgggggtcacctctctgcttcccccctccccaggcttcagttccttccccctgaccctgactccttgaacgtcactgaaaacggcagctattgcaaggagtgggggccgcgggcagccgctcttcagctcgcggcccaggggagtggcgaggggcgccccaaccccctgcccgcctctccgcacaatacttgaacattcatctgtactgaagtgttacttgaaccgggggaatctcggacctgggggagccggggtgtgaggggactggaccagcttggactgagacctgagaccgggccggtgggcgcccatttgggactgcgccacccccaggcttgttcttgttttactgtattgagcggcggcacccgccggacccgcattatggctgggggcgccagcccaagaatggggaccatgggactcctccagcctggctcttcccactctttcatcgtcatggaaacttgtatcccatttgcccagggaactgccactcctggttgccatggaaatagcagccaacggacacctcccgatgccagtgctaaggctggaaatggccccctcttagttgccatgggaacctagtaacagactctgctggccctccttccctgccccttcctcgagcgcggggtggggcttcgggaccccggggatgagccgggccaggtcccgcccctccgcgcaggcctccggggggccggggcttaccatgtaggggaggggagatctatccacatacctcaggtaacagggaggtgcgcgggtggggggagggctgggcggaccaaaggccggaggggtggggcctggggatagcgagaggcttgagaatggggccgcttgggggagggaagaggcagcccggcgaggggcaagcgggggacccagccgggctgggcccctgggccccgggtctgtacaatacggtttgctataaaactcaaaatcttccagccgggaaaaaaaaaaaaaaaaaa

SEQ ID NO: 237 - DNA, 1509 bp, Homo sapiens
ccaccgcagcggacagcgccaagtgaagcctcgcttcccctccgcggcgaccagggcccgagccgagagtagcagttgtagctacccgcccagaaactagacacaatgtgcgacgaagacgagaccaccgccctcgtgtgcgacaatggctccggcctggtgaaagccggcttcgccggggatgacgcccctagggccgtgttcccgtccatcgtgggccgcccccgacaccagggcgtcatggtcggtatgggtcagaaagattcctacgtgggcgacgaggctcagagcaagagaggtatcctgaccctgaagtaccctatcgagcacggcatcatcaccaactgggatgacatggagaagatctggcaccacaccttctacaacgagcttcgcgtggctcccgaggagcaccccaccctgctcaccgaggcccccctcaatcccaaggccaaccgcgagaagatgacccagatcatgtttgagaccttcaacgtgcccgccatgtacgtggccatccaggccgtgctgtccctctacgcctccggcaggaccaccggcatcgtgctggactccggcgacggcgtcacccacaacgtgcccatttatgagggctacgcgctgccgcacgccatcatgcgcctggacctggcgggccgcgatctcaccgactacctgatgaagatcctcactgagcgtggctactccttcgtgaccacagctgagcgcgagatcgtgcgcgacatcaaggagaagctgtgctacgtggccctggacttcgagaacgagatggcgacggccgcctcctcctcctccctggaaaagagctacgagctgccagacgggcaggtcatcaccatcggcaacgagcgcttccgctgcccggagacgctcttccagccctccttcatcggtatggagtcggcgggcattcacgagaccacctacaacagcatcatgaagtgtgacatcgacatcaggaaggacctgtatgccaacaacgtcatgtcggggggcaccacgatgtaccctgggatcgctgaccgcatgcagaaagagatcaccgcgctggcacccagcaccatgaagatcaagatcatcgccccgccggagcgcaaatactcggtgtggatcggcggctccatcctggcctcgctgtccaccttccagcagatgtggatcaccaagcaggagtacgacgaggccggcccttccatcgtccaccgcaaatgcttctagacacactccacctccagcacgcgacttctcaggacgacgaatcttctcaatgggggggcggctgagctccagccaccccgcagtcactttctttgtaacaacttccgttgctgccatcgtaaactgacacagtgtttataacgtgtacatacattaacttattacctcattttgttatttttcgaaacaaagccctgtggaagaaaatggaaaacttgaagaagcattaaagtcattctgttaagctgcgtaaaaaaaaaaaaaaaaaaa

SEQ ID NO: 238 - DNA, 9642 bp, Homo sapiens
atccgctgggcaggatccgccgcgccggctgcggccggccgggctgggagacccgcgcggggtagaaggtgaggggacccggcgggccgctcggcacaggccgggacatgaacgcctggaagtctggctgggagcggacccatgatcgaaggaccaaaggagccgcttgatcgctggacctggccctgcgaccccagtcatgggccagacctcggtgtccacgctgtccccgcagcccggcagcgttgacggactggacaaagcttctatagcaaactcagatggccccacagcaggttcccaaacacctcccttcaaaagaaaggggaaactatccaccattggtaaaatctttaagccttggaaatggaggaaaaagaagaccagcgacaaatttagagaaacctcggcagtattagaaaggaagatatccacacgacaaagtagagaggagctgataagaaggggagtgcttaaggaattgcctgatcaagatggagatgtaacagttaactttgaaaattcaaacgggcacatgatacccatcggagaggaatctacccgagaggaaaatgtagtaaagtctgaagaaggtaatggctctgtatctgaaaaaacaccacctctggaggaacaggcagaagataagaaagagaacactgaaaaccactctgaaacaccggcagctcctgctctacctccttctgctcctcctaagcctagacccaaacctaaacccaaaaaatcacctgtgcctccgaaaggggccactgctggggccagccacaaaggtgatgaagtgcctcccattaaaaaaaataccaaggctcctggtaagcaggcccccgtccctccacccaagccagcaagccgaaacacgacccgagaggctgctggctcctctcattcaaaaaaaacaactggctctaaagcatcagcttcgccatccacttcatccacctcatctcgtcccaaagcttcaaaggagacagtttctagcaaagcagggacagtggggaccaccaagggcaagagaaaaactgacaagcagccaataacttctcacctgtcctcagacacaacaacttctggcacatccgacctgaaaggagagcctgcagagaccagagtggagagtttcaaactcgaacagactgtccctggagctgaggagcagaacacaggcaaattcaagtccatggtccctccaccccctgtggctccagcaccttctcctctggccccccctctccctcttgaggatcagtgcattactgcctcagacactccagttgtcctcgtcagcgttggagctgacctgcccgtctctgccttagacccaagtcagcttctttgggctgaagagccgacgaacagaaccactctctactcaggcactggcttaagtgttaacagagaaaatgcaaaatgtttcacaaccaaagaggagctggggaagacagtgcctcagctactgactcctgggctgatgggcgaatcttcagaatcctttagtgcctcagaagatgaaggccacagggaataccaagccaatgactctgactcggacgggcctatcttgtacaccgatgatgaggacgaagacgaagatgaggatggcagtggagaaagtgctttggcaagtaaaatacgccggagggatactcttgctatcaaacttggcaacagaccatctaagaaagaactagaggacaaaaacatcttgcagcgtacatctgaagaagagaggcaggaaatccgacaacaaattggaaccaagttagtcaggaggctgagccagaggcccacaactgaagaattagagcaaagaaacatcctaaaacaaaagaatgaagaagaggaacaagaagcaaaaatggaacttaaacgcagactcagcagaaagctcagcctgagacccacagtggcagagctacaagctcgaaggatcctgcgatttaacgagtatgtagaagtcacggattctcctgactatgaccgccgagcagacaagccctgggccaggttaacacctgcagacaaggcagcaataaggaaagaactaaatgaatttaaaagcacagaaatggaagttcatgaagagagtcgacagtttacaaggtttcatcgtccataacgaagagtgagactatttggaaacagagactgatcatctttgggggaagccctgcttcctgaaaacctgatattgcactgggatttgaatgtgtgtgtttccgtttaacttgtggtgaaggaagtgtgtgactcagcttggctgggaagtgctcctcacctgtgtggcccagatggctccaacaagcaaaaggaaggatgcagtgactcttgctgcccagaatgcacagcgatggtaagagacaccgtggatattcttcatcagaagctttaatcaaagaagatgagcagaagacaatcactggctccctgttaccagaaagccaaattttataatgcgggtgaaagaaaaatatagattaaaattgctgggcactgaaaaggggtgggagttggaaatcagaaagaaagagaaatatttcattatgttaatgaagaaaagagaaaattgaagcataaatgtatttttgaagtagttattcggtagctgagaacttattaagggatttaggaatttaacctcctgatgtggattcctcaaagacttgatcggagaatactcttgtttcaccattatgttggtacagtatagtaccattattttatgttgtgccagtgaatccagttgccagaaataagtctgaatgttttcatgcatctttttcttaaatgcaagagcttctactgactcttaacaagcatgcttacccaaattttgttgcatgcttttaagtagcattagctatgcacacttgacatttttaaatatccctttcctagtgtaccagccttcacaggataagaggactgggaataaagtcagatgtaatgtgaccctagaaaactgtagcaagcttcagaaataaatcttttgatctttccctatcttgattagatccaaagtcaaagcaaccatacttcacctagagaagacagtattggcaatcatgacacctgtaataaaaacttgaatccaaagtcaaaacttaagcaagatacaaatgtgctgcctgcagttagtcctgcatgggaataaggactagttatttttttagtgctgcatttttttaaagttggattgctgctatttaaaaaaaaaaaaaggacacagatcaaaaaaacacccaaaggcttaacagaacatggaaagttcccactaagttgtgtgtgaggaaatcctcatcttgtattttaagaatctgcagatggcatccatagatacagtacagtatttactgtcaatgcaaaagaatcagtgaggttaaagtagtggaagttttccctatgagcctacagtctgtattgtttacattaagaaactctctattattgtgttgctattttccatggagtcacaggcacactatgacttctgctcccaaatacatatgaccatatgtaaataccaccttgcatttcattgttcttcacaagtgctttgtgcccctttaattaaaaacacatgaaatgaataacaaaacaagacccaaatagagtttattttattctcagagtttggactacaattttctaagatgtttctggttcaagactgtcattttctatttcaaccgaaaagtaagcatttaacccggtgaataaatgtagatcctgccattcattggtattttaaagaaccacttgaaatcggatcattttatttaaaaataaaaaatgttaatgccagttggcctactataaaaagccaggaccatgttagaattaggaaaagtaaccagcattactgcacctcttgttagactctgtgcattaataaaacacacctagagtctgttgtcatttcactaataggataagacaaattttttgctttgaaaaaatttttctgcatgcccaggtgtctgtctctggctgaggttttgtctattttacagtgtttcaatccagccataaaaattaacttgtgattttttttttcccaaagtcatgcttttccttaattatatttttattttattattttagtgtcttgagaaaaataccaagagatataatgtttcttttaattgtctatgcttaatcatctttaaacactttttaaatttctaaccacaagacctctctataatggtaaatgtaagacatcaccattttatcactcaaagtatgttattgaaagtttctatttggttgataaaaggaacaattttttcccacttttgatgcctgtgatgcaattttttattgcctacaatgagatacacttagtacaaaaaatgaaaatctggtatttcaaaattgcatttcttgtataataggtcagatttattaactactcatactttttctttacactaatcgatacatttagaaaaaattttctaagttagagacaagtttaaaagtaaaaaaaaaaaaaaattagccactgctagtctactgtttaggtaatcggaatcaccaattattttattagaatgatggcttgagtaaaaagctgtggaaagaattaaaggattatgagctaagctgtattttgcagaatatggttctattttagtagagcagagatgagacatatccccaccggccacccagccagaggtctcctacctgggggccctaaagggatgcagaggtctggcccaccctccgtgcataggcacctctgtccaccaccagcgtttcagcaatccaaccagtaagcatatgctgtataggaaaaataaaagtgtgtgggaattggatttcttttgttgtaacacaattccaggtttttggctatttaaagtttgacattaggctgacatcgaggaagtaagtgggttttcctgagttcccaagatatgattaaggaagaaaacaaacccatctccaggaagatcccaggcaggaaagaactagacagatgtagaaaccaaagtgaccattttagtttttttattggagaataaaacattaatattagggtattaagaagatgctcagcaagcttgatcagaatcttcatggtcattaccaatcagtctgacaaaatagttctctggtagtcagcattcatttaaggcagcttgcctgataatttcctgtgttatgtgaagtgtcttgcactttcacatgttagctataattccttaaattacttaactgaaatctgtaatagagaaccattttggcatttgaacagctattttacatggagaaaaagcaaacacatctgtttgctttacccagaaaaactgactttctggtttcatcttcatattgtttagtagcataatgagagtagtcctttatctttctctaatgttagtaaatatattctgttagtaggaagttctgaaattgaagggaaaatatatttaaggaaataaaggaattcaatacacccttcaaaagtcaccaaatactgaaaataagagatgagtccttaaaacctgagtcaaaaaaggtccagttttacagcctgcaattaattcagggctgcgttggcattaaaaaagaaaatatatatatatatatatatatatatatatatatatatatatatgtatattatatatacagtagcttacacttaaaagaggaaaaatttgcattaacattgcatattctgatatgtaccatattaacacataacaggcattttatttatgcttcatagaatcagacagacacaactttcaaaaatcttactgtattcacaatagaaaagggtagtcttgtctaccacagaggagtatgtccacacttaataatgaaaactttcttcctttcctgcccaaaaatttcttcagtctgttattatttttaagtgccccttgctgcaaatttcaaacagagcaagaaatcttcctcagagtaggtggtatgaaattaaactagtacaatatatatgaattcatgtcatttacccctgagtatggtagaattgttaaagcattcttaaattccaattatatgaagcctatcattactaggaaaagtatattctttgggataagaattaatttcttcacactattagagcatgttgtgagtagtaaggaactacttagatgcaatttatttacagaattgtcccttgacctcttgaaatggctagatctttcactactgtgtaggtagtctctacttactggtaggatagattacattgctttactggacaaagcagaatgaacttatataactaaaatatgtcctatattggctgggtgcggtggcttacacctgtaataccagcactttgggaggccaaggtgggtggatcagttgaggtcaggagttcgagaccagcctggccaacatggtgaaaccctgtctctactgaaaatacaaaaaaaaaaaagtatctgggcatggtggcttgtgcctgtaatcccagctacttgggaggctgaggcagggaaatcgcttaaacccgggaggtggaggttgcagtgggcccagatcgtgccactccactccagcctgggagacagagcaagactccatctcaaaataataataatagtaataatgaataaaataaaataaaatatgtcctccagggaaaagcaatgacagagtaatcaccaaattaataggaacatctttctagagaaagtacatgcccagttagttcaaacccaggtttcaaagaagtagcactgggctctactgtaaaggcaggcagtgaccaagaggtggtggggagagaggtagagtaccctcaaatcattcccattttcacttccaatttcccttttgtaatcattaagcttaagctatgtatggaaatgcaaagcaccattagcatttctagaaagcagctggaaccttacccaccaatgcttttttgaagacagtatcatcccaaatttaaaaatcctattgtatatgttgtaaaatttctggcaaagaaatggaggatcctgtggcagctattcccacctaaagccaaccctataaggatgggtcattttttagccatgctaggatttactgcacacacaaaaaatgtcatttagcttgtcacattgctagcacagctgcacatatgagcaaagcactgttggtctgtgtttctcagtgggggtactcttggcatttggagctggataggtctttgctgtacagaatcatcccatgcattgccagatgtttaatatcccaggcccctgctgactaaatgtcagtagcattctcagtcattgtaaacaccaagaataaaaagcattcccccaggttcaaatgccctccctgggaggttggtatcacctcccctgaatgccactgtctactgcattttgaggacacagggagaaaaagtgcctatcctcaaacattgtctctgctgccttgcatttctttgggccctgaatggtttttctcccttcatttttcgagcctttctctcagtgcagctgttcttcagggaggaggttactgggcagccttggccattcagtgggcatggggacttggcctagtccctatatatatatacttaaagtccctatatatacttaaaggagagatcatacatgaagaaagcttttttttttttttttttttttgccttacaacttttctttagaaccacattattggtcataatccttgttactgtcatgaggattgttgcatgggttaaacacaaacacagactagcaatgcacttgaacaaacctggtggtctttggaaataaatcaccattagatttcacctggttatgctgcatcccataagttccaaatgaatcacctgcttatcctattaacgaagcatttaattcacacacaaatgcttgaatttcccctgtataaatgtagtcatgcgattcaacttttctaataagatttgtgaatgctgcatcatgatgaaaatgtggattaactgtgggttgcatgcctgttgttcatacttcagtgatggtcacacacaaaacaagatgagttttacttaggtgaaacattattaaactgtactaacaatacagaaacatattctctttgtcgctttttatcaccaaaactgaatggcaaatatgtcttgacattacttggatgaactgtggctagcaaaatggaattaacttagccactataattttttaaaacattaaagtttctaaattgtttttggggccgagtaacgcagagtcaataaaggtggttatattgtaagcttttagatggtgcttaagaattcttatctttttaaatagcagtattttttttttaagaataaattgtaaggagcaaataaggcagaatgccactctaccctcaggtcaattttatggtatatgaaaatgccagtaatatttgtgccacttgccaactcgggggaggaggggcttttcccttactggatacttttgttatagtttgactatgtcattatgttgtttagagagcctccacaatgagaagttgccactgcagggctaactcgccttcagaaataatcagaatgattcaagggtcaaaccactttcatcccttaaaatatagggactaatatttctttttcttttttttaaaaaaaacatttcttctgtggcttagaaatgtgccagtgtgttcaaaacatttacaccaatttcaccagatttaggacctattaaaaattcaaacaagtttcttttttttttttttttttctgtgtaacagggatttttaaataacggactatatgcattcttttgttatttcacacttcagttaaagtgataacaatggtaaactgtgatcattatcagactgactgaatgctttctgatttccagtgagtgatctagttctacgtattacacaggtgtaatatctgtgagtgtaaataactggaactgtacactgattaacatgacagtttctcttttgttgttcttatctgtactgtattatagtatgtgggtataaatatctacaagtatacacacatatgtacttgtattccactattgtaacctgaaagaaagactatgtattcccttttttaattccgtactggtatttgtgttatttaaaaagcaaaattctgctctatttagttgtataatattagaggatactttgctgtgcacaattccaagtgccttagaacattgtttagctttcctaagtatatataaatgcatatatgtataaaattgggaaaagttacctcaataaaatcattgggaaatccccagttttagtttgttccagtttctcttatatttggatagtgctcagcctttttaaatgaaaaaagaaaaaagagtaagacaacttccctaattgcctgttatttcagcttcacctaagtttttaacacctctttgtatgtaaggtcttgagacatgtaaggcctggtactttttatttaaaatgtctgtctaaagaattactgctcttaaaagaaacttccagtattttttttaacttgctatctttttatgtctgaggtatttgatattgatgtttttattgccattattatatgtaaacataaaagatagtccatttagagtttataatatagaaaataaacagacttcctcattaaaaaaaaaa

SEQ ID NO: 239 - DNA, 3725 bp, Homo sapiens
ccctacatccgggtaccgactccagccgcctagacgctggcactatggtcatggcggaggggacggcagtgctgaggcggaacaggccgggcaccaaggcgcagtatattcaacagaacataagagcagattgctccaatattgacaaaattcttgaaccacctgaaggccaagatgaaggtgtgtggaagtatgaacatttaaggcagttctgccttgagctaaatggacttgctgtcaaacttcagagtgaatgccatccagatacttgcactcaaatgacagcaactgaacaatggatttttctttgtgcagctcataaaactccaaaagagtgtcctgctatagactatactagacacacacttgatggtgctgcatgtcttctgaatagcaataaatattttcccagcagggttagcataaaggaatcatctgtagcgaaactaggatcagtatgccgtaggatttacagaatattttcacatgcttattttcatcatcggcagatatttgatgaatatgaaaatgaaacatttttgtgtcatcggtttactaagtttgtgatgaaatacaatttgatgtccaaggataacctgattgtaccaattttagaagaggaagtacagaattcagtttctggggaaagtgaagcatgaagggaatcataggaaaaatgtactgatcatataattaacattatgtactgtatatatcattttagacacatcaatcatgtatccatattatagcttctttgtttagtataggtttttgtatgctgggtttgccttttaaaatgggaaatactttttaagttattcataagctgtatattcaccagtgtggcactcatggtttttaaataagattagtattatctgtttataatgcctgttaataaaagaatttacagtttggtaaaattgctgctaaacaatcattggatcacaatcctcatcagacaaacccatctgtaaaaaaaatgagggagagcttgaggtttcacacaagccatttactaaagaggtagaaatgttttctattggttttaccttgagtttagatatcctaaaaaattctgtagtacgtagttttgtcttacctgttaactttccccaattgagataaaagtgttttaaaattctgtttatagtttttgatatgcatatataattatgtgtatatctaaatacaaatgcaaatgaagcattagtaatacttaaataattttactgtgctacataaagtataacatacttggaaaggatttaccgttctgcaacaacggactggtacatacaggatgatcacaatggtaaggcacataaattattttcccactggaaacctgccctgtccaccccttctcatttcccttaaccttatcttcaaactactttagctgagaagcttttcaccagactgagttagtggtggcttatacctatttatatttgtattaattgcttacagattatacctcatattagcaattacattacactacaagaaaatgtatttgcataggctcttgcttatctttgttttgcaaaattgttctacttagaaaacagtccttaaaatagtttgactcttcctgttagtaatatattaatctttcatttaaccagctaggcagcattaaatagaattgaagaaataccatagtatttattttacaccccctctcccacgaagtttatgtttggattacatgcacgtgtgagattatttgcaataattcataggttccaagggtgttgatgaatagtcatacatttttttggactttgttataattcattgtggtaagaatgattgaaatgcagatttaacaatcttataatctattgaatgccatttttgataaagcactggaggtcttattgccaaactgattgtaatgaggcagtaagggtgaaaacattgtacatgttgtgaagaaagtatttaaatccaacttttgaacagatttaacaaacatgaggaacttttttatttagaaggataattttgaagatgaaaatgtattcatcttaattgttttttcaaatttaagggaataatttataccatcttttcagacaagaatgtacagcaaaaataaggggaacagtagtatactgagagtgtgtgtatgtatagtgtatgcctttccaagcttgccagtctttttggctttgaacactgcccatcagctacagtcattactgttccccaacccacaactatcttttaagaagtcttagttcacagtgaaaggaatgatgactttgaaattatggatttatattaatggcactataaaccaatggtaatggtaatttttaaacttgctaaatattgagaaactaaactactaagttaataaattatatatagcagtgtagctgttctctctagatggtgtctcacaatggatttctgttgcttgactattttcttagtgaatatttatactaaggtagtgactgagatttggtgatctggctgagtattttgaaacacattttgaataatatggcttagtgttaacggggacttaaatatgatttttttttcttactcatttcaccttccctgtactgtatgtttggaattgatcataaaacatctccaaaagaaaataatcagtttgtagtcttgcttttgtattcatgttgataatcttactaattgtgaagttgattcactactatactaggtaagacctaagtgaaacagttcctgtttttccttaatactgttttcagaattttgaaaatgtacttatatatacataaatactactaaaaaattaatgagcctggcaaaccattgatttataaaagtaagtgttctaagaggggaacaagacagttctgtgtgataaggaagttaggctccactttttgtttgaattaccctatgtatatccgaaggtaaacttaggcttttctttccaaaagatcgtatagtcaattcattctttttctcctatcacatctgggaaagtagctaacttttaactatttatgttcccataagtaacccttcttttgtgtgtatacatttccttttctctgacttgagatgtcaaatttggatttctagaacagtttctcagttaaattcttgatgacttaacaacttttactatcagaatacaattagaaatccttggtcaggcacaggggctcacgcctgtaatcccagcactttgggaagccaaggcagacagatcacctgaggtcaggagttcgagaccagcctgaccaacatggagaaaccctgtctctactaaaaatacaaaaattagccgggcgtggtgctactcgtgaggctgaggcaggagaatcgcttgaacccgggaggtggaggttgcggtgagctgagatcgtgccattgcactccagcctgggtaacgagcaaaactccgtctcaaaaactccgtctcaaaaaaaaaaaatccttgattacattgttagtaaggactgtgttacgattataaacacatttattggttgatgtcaaattcactgtaatagtagaactaagttttttatgtgagtactttgccctactgtctatatgatgacatcttttttgagcagctaaattttaaattgtatatactttattttgtgaatccttgttgaatgtgctaaaggtttctttgtgtagttcttccatgctatgcgaatattttagtaaaagtagttgatttttaaaaaaaaaaaaaa

SEQ ID NO: 240 - DNA, 6712 bp, Homo sapiens
ggtggacccccacgactctcccggcccttgcccgcggctcccggggggcggggcggggcgccccgggcggggtctgtgcgcaggcgcgtgagtgcgcgctctcgcgcaccggcgggcggggacgccccgtgaggcgccgccggaggaagcgcgcgcgcacctcacttccggcgcgcgctgcgccggcggcgattggacccgaggcggcgagctggcgccccgcccagccaatcggcggcgccggcgcgggtcggagggcgccgggcgcgcgcggggcggccgggggcgcgcggggcgcgggcggggcgccgggcggggcggggcggagcggccgcagctcgtcgccgcccgcgggcctgtccgacgccggggcccggcccgtcccctccgccgcccggcagccatgtgaccgcgccgccgccctccgcgcgcccggcccgcccgccgcgcgtccgcggcccggccgcagccccaggccgccgagggagcggcggggccggcgccatggccgagcgaggccgcctcggcctccccggcgcgcccggcgcgctcaacacgcccgtgcccatgaacctgttcgccacctgggaggtggacggctccagccccagctgcgtgcccaggttgtgcagcctgactctgaagaagctggtggtcttcaaggagctggagaaggagctgatctccgtggtgatcgctgtcaagatgcagggctccaaacgaatcctgcggtcccatgagattgtgctgccccccagtggacaagtggagacagacctggccctgaccttctccttgcagtatcctcacttcttgaagagggaaggcaacaagcttcagatcatgctgcagcgcagaaagcgctacaagaacagaaccatcctgggctacaagacgctggccgcgggctccatcagcatggctgaggtgatgcaacacccgtctgaaggtggccaggtgctgagcctctgcagcagcatcaaggaggcccccgtcaaggcggccgagatctggatcgcctccctgtccagccagcccattgaccacgaagacagcaccatgcaggccggccccaaggccaagtccacggataactactccgaggaggagtatgagagcttctcctccgagcaggaggccagtgacgacgccgtgcaggggcaggacttggacgaggacgactttgacgtggggaagccgaagaagcagcggagatcgattgtaagaacgacgtccatgaccaggcaacagaacttcaagcagaaagtggtagcgctgctgcggaggttcaaagtgtccgacgaggtcctggactcggagcaggaccctgcggagcacatccccgaggcagaggaggacctggacctcctgtatgacaccctggacatggagcaccccagcgacagcggccccgacatggaggatgacgacagcgtcctcagcacccccaagccgaagctgcggccatactttgaaggcctgtcgcactcgagctcgcagacggagattgggagcatccacagcgcccgcagccacaaggagcccccaagcccggctgacgtgcccgagaagacgcggtccctgggaggcaggcagccgagcgacagtgtctctgacacggtggccctcggtgtgccaggcccgagggagcaccctggacagcctgaggacagccccgaggctgaggcctccaccctggatgtgttcacggagaggctgccgcccagcgggaggatcaccaagacagagtcccttgtcatcccctccaccaggtccgaggggaagcaggctggccgacggggccggagcacatccttgaaggagcggcaggcagcacggccccagaatgagcgggccaacagcctggacaacgagcgctgcccggacgcccggagccagctacaggtgcagctgcagatccccaggaagactgtgtatgaccagctcaaccacatcctcatctccgatgaccagcttcccgaaaacatcatccttgtcaacacctcggactggcaggggcagttcctctccgacgtcctgcagaggcacacgctccccgtggtgtgcacgtgctctcctgcggacgtccaggcggccttcagcaccatcgtctcacggatacagagatactgcaactgcaattcccagcccccgacccccgtgaagatcgccgtggcgggagcgcagcattacctcagtgccatcctgcggctctttgtggagcagctgtcccacaagacacccgactggctcggctacatgcgcttcctggtcatcccactgggctcccaccccgtggccaggtacctaggctccgtggactaccgctacaacaacttcttccaggacctggcctggagagacctgttcaacaagctggaggcccagagtgcggtacaggacacgccagacattgtgtcacgcatcacgcagtacatcgcaggggccaactgtgcccaccagctccccatcgcagaggccatgctgacctacaagcagaagaggaaaaagcattttcattttgactttaccctaagccctgacgaagagtcctcccaaaagttcattccctttgtcggggttgtgaaggttggaattgtggagccatcctcggccacatcaggcgactcggacgacgcggccccctcgggctctggcacgctctcctccaccccgccgtccgcatctcctgcggccaaggaggcctcacccaccccgccctcctccccgtcggtgagcggaggcctgtcctcccccagccagggtgtcggcgccgagctgatggggctgcaggtggactactggacggcagcacagcctgcggacaggaagagggacgccgagaagaaggacctgcctgtcaccaaaaacacgctcaagtgcactttccggtccctccaggtcagcaggctgcccagcagcggcgaggctgcagccacgcccaccatgtccatgaccgtggtcaccaaggagaagaacaagaaggtgatgtttctgcccaagaaagcgaaggacaaggacgtggagtctaagagccagtgcattgagggcatcagccggctcatctgcactgccaggcagcagcagaacatgctgcgggtcctcatcgacggcgtggagtgcagcgacgtcaagttcttccagctggccgcgcagtggtcctcgcacgtgaagcacttccccatctgcatcttcggacactccaaggccaccttctagccccacccaccagggggcccacctcctgccccatgctgtgaggggcccagctgcatttctgttaacatttcagtttactacagagacagacgcttaaaacacaaagagaaacagtcttaagtatgaatgtgctcacaacgtggaaactaacgggggagctcctgccaggagccgaataactgctctgcttattaacccgaacgttcggcccggggctgggaagccagaaggacgatgctgagccatggatcgcggaaggcgtcctctggcctcaggagccacccagagcctcacaggctgagttcttgcctctgtgtcctgtccttcctggaagtcaggactctgcttcctcagggagcccggggaaggcggagctcagtggccacaggccgagggccatggggccgctcagtcccgttggggttgtcctgagttgagcctgggggggccgtcctgcccgcctaagagatgcccccagcaccgcacactcgtggttcccaataaactcctgcctgcggcggaggttttatagcagcagatatttttaatgcttttcaatacatgttctaatgtagctgccaaacatgttgctcttctgaagtccccctggggctgggcagagccagcagagcctgcccccacttccccagcccctgccccaccccgcctcacaccttccccactctcaggctgttcttgaaacaccatgaggcttctgcgtgtagtccctgccccaaacttagcaagcacaggggcctccacagcccaggtggccccagaaaatgttccagagcccagcttggtacatagtgagatgctgctggggttggcctgaggtgggggccacttcctccaccccagtgggtatgtctgaggtcagccatggggatatctgggttgagattcaggttttggtgaatatggggcaggcgtccagatgtgtttgtgtcacctgctgcaacgctgtagccaatgaagattccagcgggatggcctgaccagcggggccggcactttggagccgtgggtgcagccaggtaccccgtgcagggcctgggaggctctccaggccacagtcctcagagcgtgttgggtcccatgttgtgtgtgggttccatgccctccacacagcaggagagggcttccctgaccacacctgccccctcagtcctgcttctccccagtaagcctgcactgtggggtctccataggaggagctggggaagctggggccctcccaggggtcctgatcgaccctgggggctcttggcctggtttcgtaagatggagcactgcaaaaggccatgctcagaaagcaaacgcagggcagggtgggcctcgagccggggctggaggggtctccacccttgctggcctgagagatggcccacatttcttacttgtgaccgccctgctcttcctggccgccccccccaggtggctgaacagggtgattttgttgtggtgaggggccaggatgtggcctggtgtgcagcctcagctccctgggttcaggcctcagaggtagcctgtgtgcaggaggcagagccccagcccctcccagccagagcccctccacaccagggactcctccttcacctgggaccaggagcctggggcacaccccagggtgggggagagggtaggaaggtctcccattgaatcctggcttcaggctctgccccgagaagtgtctgcggtgagggtgtgagccccgggctgatggcctctgaccccggcaacaggtgggaccctgactgactcgttcagctgcccccaagctgggctgcagagcatctgtttttctgctctccagtttcttttctttttttttttttttttttttgagatggagtcttgctctgttgcccaggctggagtgcagtggcatgatctcagctcactgcagcctccgtctcccaggttcaagcagttctcctgcctcagcctcccgagtagctgggattacaggcgtgtgccaccacacctggctattttttttgtatttttagtagagatggggttttgccatgttggccaggctggtcttgaactcctgacctcaagtgatccacccgcctcggcctcccaaagtgctgggattacaggcgtgagtcaccgcgtcctgcctgctcttcctgtttctttcccaagggtcacactcagtagggagatgaaggtggaaacatccttgctgtggctttctggcctcagagcaggttttagaggaaggggccacaggctgcctagtgcatcctggctgtgggcagcccctttcctggagccctcctgcctaccccgtacctcccatctggctgcacagctccatccttagccacgcaaggggagaacatgggcagagtctccatccagcagctgggggttctggtggcactccctgtgcccctgctgctgctgggctgtgggtctgccctgcacccaggagccccacggtccatcccccacaccatgcccagcaccagggaggttgggcagacaagacctgggccatgccagccctctgtgcctcggttttcccactggttacacaggatggtcgcattttccctgcctacctcacagagctgttctgagggtgcatggaggagcactctgtcccaccaaggacaactagaaaccaaagccatctgacagccagtgcggtaagggcgggggatgtgtgtgtgaggtgtgcacaccccccgagaacctggccctggactggcctcacaggacaggaggcagccccttgtagagctagggctcagccccatcagtctcaaaggttaagccaccagtcaccaccgaggcacccctcaggcctggtggccactgtccactattacgtagacagaccccaccctcacccaggccagctgtgggccagtcccgccctgcaatctggtctgctgccttcctcttccatgttggtccccttggccactgtctctgggcatgcaagccagtgtcctggttcagtgcctcggccagagctggggcaggagaggggcctctgggtgagagctgggggtgtctctgcagggtactggcagccttgccacactgtcctcattcccagatggaaagacctgagtgcctctcgccttcctccgggaatgaattcctcatgaaaatgaccaggccacttcttccgagggccaggccgccccctccccgagacctgtcctgccgtccgcgggtgtgtggcctgtaggggactgagagctgggcttgctgggcacctctggaatctgaccctgtgggccaaagaagcaccactgtagtttctgcagacccccatgcggttcattgtgcattgtttggtttctaggatgtatgtgttgctagttttttttaatgaaaccctggattaatgtaaatagctttttggggaacggattctaatgtcacgtatgtgaccgtgtggactatttcaaggtgctgatgcaacactaataaacctggaggggccggcaaaaaaaaaaaaaaaaaa

SEQ ID NO: 241 - DNA, 3100 bp, Homo sapiens
atgcccccccctgcgcccggggcccggctccggcttctcgccgccgccgccctggccggcttggccgtcatcagccgagggctgctctcccagagcctggagttcaactctcctgccgacaactacacagtgtgtgaaggtgacaacgccaccctcagctgcttcatcgacgagcacgtgacccgcgtggcctggctgaaccgctccaacatcctgtatgccggcaatgaccgctggaccagcgacccgcgggtgcggctgctcatcaacacccccgaggagttctccatcctcatcaccgaggtggggctcggcgacgagggcctctacacctgctccttccagacccgccaccagccgtacaccactcaggtctacctcattgtccacgtccctgcccgcattgtgaacatctcgtcgcctgtgacggtgaatgaggggggcaatgtgaacctgctttgcctggccgtggggcggccagagcccacggtcacctggagacagctccgagacggcttcacctcggagggagagatcctggagatctctgacatccagcggggccaggccggggagtatgagtgcgtgactcacaacggggttaactcggcgcccgacagccgccgcgtgctggtcacagtcaactatcctccgaccatcacggacgtgaccagcgcccgcaccgcgctgggccgggccgccctcctgcgctgcgaagccatggcggttccccccgcggatttccagtggtacaaggatgacagactgctgagcagcggcacggccgaaggcctgaaggtgcagacggagcgcacccgctcgatgcttctctttgccaacgtgagcgcccggcattacggcaactatacgtgtcgcgccgccaaccgactgggagcgtccagcgcctccatgcggctcctgcgcccaggatccctggagaactcagccccgaggcccccagggctcctggccctcctctccgccctgggctggctgtggtggagaatgtaggcgcaacccagtggagctcacctccccctgcagggggcctcaggccaagagtgagagaaacgggggagcaagagccgtgggtctcgtgggggcagaagagctctcggccaccaaggaagaagagagaggagaagaggaggaggcagaggaagaaagatcttcagagaacccatcactgtgagggataacgcaaaattatgcatctttctacagccattctcgccacccgttcacgtttccgattgtgacccactcccgccaccccatacccctctctcttagctcaggctgtcaactggcttgtgtgggtgtgggtgtgtgagtgtgagcctgcatgcatgtgtaggtgtctgtgtctctgtttgtgtgtgtgtgggggggtgggctgggggaagggactcagccgtcctcccgcccccaaaacccccatgtccactgtccccaaccctattgcctctcacctctggctggaggtaggtatgaggctctgcagtggaagctgtgaagagaggcttaccaggctccctgcttccccaatatatgcacgcacactacccctccccctgtcgaaagggcaactcctggcaggttgggagtggggaggggcatcgcactcacctgtcaagctgtcattcagcctttgtgagtaagtgggggacctccatctaggctctgggcttccctgctgtcaaccaccagcttcctgtagccagaggccccatcgctggctcagtggcctgagaccttcccacttttcctgtccctccacaccctggattttctggccccctcctgggccaatcggtgcttccatccaactgtcagactggtggcaggagtcacctgtctgtttcagtgctttgccctacccttgccaccactccccttggccttgatttccccacctgcggcaccagccagctgcccttggggcctttgcagctggcccacaggtgtgagcttgctggtctatcacttcctggcctctccaccaactgtacctcccaaaggctacctgaccgccctcacagacactcagacgcaccacacacacatacacacacacagacacacacacacacacacacacacacaccagcgactgtgaccagcaatagccccctggctccagctgtccggtagctggtgactagctgtatttccccctgggtaggcatctggtgtcaggaagggacgctgagaggccgcagcctcagctctgactgtaggaacactccaccctggtacaccacaccacacaaagtgggggacagagaggcatcacacagacatcctgagcccagacaaagatgccatgtcaccaactccgactcccaggagaccctctatataaacacccaccccaaaccacaccacccagagtctggtggagaaaaggagagggcaaggcgcagtgactgtacctcagacgggggcatgggccccatcccacattgtcttccattcccagggtccaggggatggggtgggacaggggagggatgctagggagggggtggggggccctgggggccatgtgttccaattcatggggagtgttgagaccaccacaccaataaacgcctttttccaaagtctgcctgcaggtgtcaatgtcattaaggattagagttaatgaagggcaaagggtagcagtcaattggtggtgcctctccagcatcattcctaccgcctactttctcactggtagacttggaatggactcattacagagatgccctgtgattggccgaagacacccagcatagcccatttcccaccgtgattggctcagagatgggcacatgacccagtaaggctaatgagaaagtgaatggattcccaagaagagatgcttttctgctggatattgtggctccgtgatgtgaagtcaacatctgtagggttgcttttctccatcacatggagagatcttggctctgtggggatagcaatggtggggaggacagcatatggagcctgagaaggataggaacactgtgaagggcagagtggaaaccttagagaaactgagtccatgattatatatcatttgagcagctggatcaaaacttaactgatgcccatt

SEQ ID NO: 242 - DNA, 8884 bp, Homo sapiens
gcggcaggttggtcctggagcagataagcgcagaatatttaggcgaaagcgagaggaaggggggagcgcggggcaggaggagtacctcggccaagaaaattatgcatgcgttagggaagctctgagagaatggctgtggaagctctccactgtggtttgaatccacggggtattgatcaccctgcccatgctgaaggtattaaactgcaaattgaaggtgaaggtgtggaatctcaatccattaaaaataaaaatttccagaaggtgcctgaccagaaaggaactcccaagcgactgcaggcagaagctgagacggctaagtcagctacggtgaagctatctaaaccggtggctctatggacccagcaggatgtctgcaagtggttgaagaaacattgtccgaatcagtatcagatctacagtgagtcattcaaacagcatgacataactgggcgagccctgctgagacttactgacaaaaagctcgagcgaatggggattgcccaggagaacctccggcagcacatcttacaacaggtgctccagctgaaggtgcgagaagaagtcagaaatctacagttactcacacaagcatcatctgagggttctccataaacacggttagccttccaagctgctgtcctgccagttgatatgaacatggcctgttcctcacagaaagactaacccatggcactgccagaagatatccttggatcgtggacagattaactggattaactgaaaaaagcacccattcagtcaatattatgggttttggaaaaatcttgctttgctgtggatttaaaatgaggtgcataatataatgccaactcattccaagtggtcattggcagaccattagctggaaaattgcttccagttttcatcactgtgcataactcaagttccctttggggagctgtctgtgcccttcactagaagtcctgttttagcatggcaactactggattattttattatgtgtgcagatggcatgatgttttagaaaaaaaaaattacagcaattctgcaatctcagtggaagtgttcacaatattatgccctggtaggaatgtaaacacgtctcgattatgttagttatgatgtctaaaggtatactgtccaactcttaagcactttatatgagaacactacaccaagatgaatcagcacattcagcacatgtgagaaatcaagtattttctttttatttttataaatcttagtggtttttttttttccggctcagactgtccaagacaaactccactactcgcatatccccagttgtttgtggtaggttgatgtaaatatggccacaatactgttagacttcacctccagatactttattgaacaactggtttacttctagcaccaaagggaagaagaagggggtccagtgatggtgatatcttagcttgcttctttgttcacaggcactattgaccacatgaacatacaggtactcaaatacaggaggcttctatttggctcctccaagggaggagttcctccaagggaaaaaaggggatggtattcttttaatcaaagaccatggtggatggatggtaagggcaacagaatgcaattcttttgtgtggtctgacgttaacacttcggaaaaaattctaagtcaagttgaaatcgccattctctcaagagagaaacatcaagagagaaacatcaagtgaccccactatgtgcctagagaaggaaaagggtcaagtcctatactaggttccttacttagggtagaacctactagtcccttgttaatcctttctgggattatacctgtgactaatttttttttttttaactatgtcttacgacaaagcacagtcctgggaaaccagtcaacttaattattgcttgtctttgagcattagagacatgttcatattgacttgctacataacactgtagcatgttttttcctgaaaatatcaagttggttgaatggaaagctcagcaaagtatgttctgtgtgcccactgtcccagcctgggactgacgggcatcagaggctttgctttaaaatatgggtaaccagttctggaagacttccaacgcaagcaagcttggtgttttagggtgtctccagatacataagcattgtctgcctccgctcagggtctcaggaaatacacagcccattggaaaccacccacgcctgagatttggaaacctgacggaaagggaggaaggtccaaatgagtcagcagcaggatgactcaccacaagcctggcaggctgcagagccagagaagggggcttccaacaaggaactcagagaagttgcagtcaccaccaagatctggcccttcggcaggtcagcaccaggactgccaggccctctgcagaccgtaattctcttcacatctataattaggaggccaaactccagctgccaacacccttggacacaatattccagtctccactgcccatctcatgtggttcagttctaatagcaggtcttcttcttcctttcattccttcctttattcagcaagcatttgttgagcatctactatgtgccaagcattgtgcttgggcaacaacagtccacaaagcagactccccacctgcccttatgaaactgtatctcctcctccccaacattatcaccaccccaccatttccacaatgaaaactgaattcagacagcattctccattctgccagagtaacctaggaagaagaacatggcagcagacggatcctcagggaggaggcagcagagtgacagatggtaaactgcatcaggccacatatttgcacctttcagatacagccaactcttccagggcctagactgagctggttggagctccccaaagcagcattcagttgcttttccttgatatccaccctggctacctatattccctttctttatataggcacaaccattcaccactacgctggattatctaacactccaattctataactcatccaggggacacacagttgagtctgatgaagcctaagaactgccaggtgctgagatattgtaactgggaattaagatttagccaaggacattgtgagactactgctgactctcttggaaaactggacatgctttgtagtgcaaatgttcactaaatgatggtggttcattgttacttactttggcctttgcaaaatattctgaacaattcaataagtagagtttcctagtttgtttgtttttttaagtcaaaggaacgctgtgaaattattgaaagatgatgggtgaagagggacctaggagaaggcaaaatgaagaccattaaagagccccattgaagactgtatctctaaaaatgccttaatgcctggcacatattccatatttgcatatgaactactattcttttccaaactgtcaacttctgtttgaaatcattgtgggggatagtttggaaatatggtggcataaaatccaagcagtcaagagctaaaccagcaaaaaagaggaatgacttcattcacaggctttggcttctttattatgtggtggtcctctgtgatctcccatggttaacttcaactgtgctgtactttcttcccaagatgcatgtacggaatgttacctcctagaaatccagaaatagttgtggtgagttttgtttgataggaagcaagaggtggggaagtaaaggatacatatttttatgtctaaggactgtaaactgttgatgcttgacttttccttttacctacacctgtgctacacctttattaaaaggctgacacccagacttgtgcaggaaaggcactcttgggaatgaacagaaatgaataattatgagactttccatggtgccaaggggattcgcttatttccactccagaactgaatatgcagagcattgccagtcctgctagtgtgaaaagcaaattacttcaatagtttgagacgtacctaggggaagagagatcctatcaactttctttgcgggtagtggcgtaccttcaaatccttgctcaggctctgtgaggtgtgcacccgcagatttcacttctacctccggaatcctggcaaacaagccaggaatctctccagagtcacttcgcagttgctcagaaagaggctaacggtccttagtcctgaggaaattctgccatttttaacattcaaggagaaaaggcgtatcagctgtacgtgagaatatcaactaaggataaaaacctctaatggatcccccttgttacttgcaaatgctttctttgtctgcaaatgtcacataattgattttgcataggaacaacaaaagtctcaaggaattgaagtttttaataccccccttagcactttactttcaccaaaacctcctctttctagtacatgagcagttttgttctttgtgatgttttcctctacattctttagaataattttgttacttgacaactagacttgtcaatcgtcttagactcttttgaaaaatctaatctttgaaaatgacacaaattcctttattgctttaaggctgttttcattcacccctcccacagccccctccactgcacttttttgttttttgcggggatttttttctttcatctctcttcttttaacatgatgctgtgggtagttttcaagaattctataaagaactcaacaaaaagtgtatttgttacctttttccccagtcctaatatttcttcttaagcttgatcttggtgaaaatttgttgcccaaaaagcagtgaggtagggattaataacgctgaccagtcatctggaagattaattaatcccagtgcagccctgagatcaggaaggaggacaggccaggagatgtttctactccaggcaccactaaggactctatttcaaaggcagatcctgctccttagtctttttagatctgaatctaatcctgaatccagaaaattatcctatgaattctggtttatcaacgcacatgattcctggcaccattgcatagcttcaaggtaaaagagagccttgtttccattattttgctatggtggcttttgggaagacagagagcattcttttgaaagcgggaaacttaaggaaaagttggccaagtacacaggaaagttctaccacaccttaatataaagaacaaaatagatgcttctcatttggggaaagtagctaaaaggacagtaacagtactgatggccttctgtccatcaccttagctccacagggaaaattctgggtgagagcaagcactgtttctaaaatctaaattttttcaggtgaaatttaccagcaacaaatgtaaaagggaactgccatcaggcatagggctagttttatacttcctgcctaacggcaaaatgactgagacatgacttccatggaacagcagaaaatggatgccaaagatatcataaaactgaagttcaatttgccacgtaaggctatttaaaaaccctgatgcactccaagcattcttccttcagagctttcctcctacaattatatcaagcacaagaaggcaccaacagcatatacttaatgtaatgtaaaagtaaacatatgacttgtgttgaattaccattggctggttgacataataagtgtcatagatatttagacattatttctgatcatacaaaattattttcataatttcatattcttttcaattttcataaattcttttcaattttcataaattggagccaatggtttgggaggttttttgtttgtttgtttgtttggttggttggttatttgttgcgttgttgttttccaaacctcagatattttgagaagccttagaaaggctcttaagcccaggcctttttgcctcatgtgcagagtattaataacagccctactgatgtgaacctcaaggaaggaggctattaaattaatccatcactggagatactaatacctcaaacaattaaaacactgaagactctgctggttgccttccacattgtttataacctttttaaattcagtcatttggatcaagagaaataaatggttggtttcatatggcttttgccacattagcacagacacatctaccaaatgtagaagtccagactgagtggatgcatgagagcaaacagatctgtaatatgattgcatttaatcaccgccaccgcccaaattctgtaaaaatatattcaaatatgtaatgctaaaaaaaatgcaaaacaggagactcttactagatcatgctttcacttagggtaggataactgatcttgaagataacttcatagaaaaatttgctggctgaaatgccccaggcacctcagggttggtcctgtcctattccacaaactgatcatggtcttctcccatcttctcagaggagttagccttgcctctaaaatagcaaaaatgccatgaaattatctttctaacctctatagagacttcttatccaagtataattccaaaaatatgatttgagtttgagcatgcctgtggtccttgattctatgatccctaaatcagttctacttttctcactctctctctctctctctctctctctctctctctctctctatatatatatatatatatatatatatatatatatatatatatatatatatatataatctccagtattttttttcaaccacaatttagtgcatttagcgtgttaatgttgggaactgcctgctggctctatgtctacttttgacaatgcttatgtccagataccatacagtgcatttgagagaggaccaaggttatgttttcccacataccagctgctgcagaggtttcgaagtgcctgacccagttctttttcacatcaaaaaggccttcggttgcagatggaaaccttaaagatgaatgtagagtggggtaggaaattcatgtttgaatgctgaaacccttgtcttttttagttttattcaattcccacctcagatcaccagaaagggaggcctctttggtgggtgttggccctcactgggggtaaaaggggttctatttgcttaaactcatgctcgtaggcaattttagggctctctggggctctgaatggtttctccaccaccacctttcttccaccaatagaaagatgttgtccttacaaggccatgtctgagaagaccatggtttaactagtaaaagaagctcacattgcagagagctgaataataccaggctcttgactttgtactgtgtgtcacagtcatgattgggacagaaggaaccagtctgctgaaaagtcaagccagcacaaatatttggaaactaattccactgaaactcttgtatcattaaatcatactattgtagtttcagttaatgtaattatttaatatcaggcactaaattaaatagctttgcacaaaattttagaaaagatcaatcttgtaacaaaatttaatattaacagtaaaaagcacctgagaaaagaaaatatcgatctgttgtggtttatatacttgagttattcttagaactttgtggagattgacactgctctgataaaaaggaagaaaatgttttgaattcaagaatgctagactaatagaaatagcccagtctctctgggccactgctcttcagtatggggtgctctctgtccctccttagcagatggggttgtttggaggctaaaatgagctaagggaagaagctatactgtgcctccaatatcccttatgtgtaattagagtgccgatctgggctgcaggctttattcaatgattcctttcccttacttgaggctttctctgtagagctgttatttctgagcctccattctgggatttacaaaggaaacagaatgatgaagaagtaacaatcagcattttacacacacgcacacacacacacacacacacactttttctaatatatgaggctagtctgcagagtccacagcccaggtgtccatttatttccacttcttcacctcccaaagatttagagctccatgatctaccaaggtgaagactgccaatcccaggttggagaagacccgtcagagtgtggaggtgccaaactgagaggcacaggaagcagacagccacatcaaacttttttgatgaactactgcaaattggtgtttgttctaggaaagaaagaggaagaaaaattacacaatgtgaattgaacataagagcagtgctctttacagagtatgagaagggaggatgggggagaatctgattaaaaaaatgattcattccttcacagacactaacaaacatggctaaaaagcacatgtcagaacacagaagcctaggtagatggttgacatttttataacttccttaagtgagtagttaaaccagcagtcttaattctgttggtcttccaagagtgtttaattacataagtattacctgtattcatttcccacaactgttgggtttttctttctttttttttttttttttttttttcctctgtgcatcctagaaaaactcccaggactagacttaggaggaggcaatcaagttatgtggtaaaacaagagtgccttttctgttggatatccactttagtttcctggcttccagggcataagatgtttagaaactttttttctctaaacataagaattattgtgtaccacaattttgaaccaccgatttccatatcttcagcagctatcaacttgccaattccctttgggtctcctttgtatattcttatgtttccttctgtttccagttgtcctcaaaaagagttgaggggggcatgactcttataaaatggataaaaatgaaactgtacagatgtttgcctcccttgtatctgtgagcatgatctctatcaggctggaaaatctgctttatcattttgtatatttgactattttgtattcagcattacttgactccttatgtgcatggcaatgtattaaaatgtgggatttctattaccgtgtaaaaaaaaaaaaaaaaaa

SEQ ID NO: 243 - DNA, 2715 bp, Homo sapiens
agaaggccgcacgccccgggcatgcgcagcggctcgctcggaagctgcgacgccgagtttcactctggctgccttctcctgagagtcggagccacagccagagccctgcccaggccgagccggagctgcagcccgagcgcggtggtgccctcagccccgtcctcttgtcctcctcagcctcggtgccttggaatttgtgtcgctgagtcagcaagcctttcagatttgcccggtttttgttgtttgtggtttgtatcaagatgggaactcaaacaagtcattcctcctaaggagctggtgtcttcatccagaagggacagtttgtgccagctctccagagagaaaagatctgccggaggcgctgggcaatgaccccgggactccaggccagaggggtctgaagctgtttgggaaagcagcgggactccttgggaagatggccatggccccaagcccttccctggtgcaggtgtacaccagccccgcggctgtggccgtgtgggaatggcaggacgggctgggcacctggcacccctacagtgccaccgtctgcagcttcatcgagcagcagtttgtccagcagaagggccaacgttttgggcttgggagcctggcccacagcatccccttgggccaggcagacccctcgctggccccttacattattgacctccccagctggacccagttccgccaggacaccggcaccatgcgggctgtgcggagacacctgttcccccagcactcagcccctggccgaggtgtcgtctgggagtggctgagcgacgatggctcctggactgcctatgaagccagcgtctgtgactatctggagcagcaggtggccaggggcaaccagctcgtggacttggcccccctggggtacaactacactgtcaactacaccacccacacgcagaccaacaagacttccagcttctgccgcagcgtgcggcgccaagcagggccgccttacccggtgaccaccatcatcgctccgccgggccacacaggcgtcgcctgctcttgccaccagtgcctcagtggcagcagaactggccccgtgtcaggccgctaccgccactccatgaccaacctccctgcataccccgtcccccagcaccccccacacaggaccgcttctgtgtttgggacccaccaggcctttgcaccgtacaacaaaccctcactctccggggcccggtctgcgcccaggctgaacaccaccaacgcctggggcgcagctcctccttccctggggagccagcccctctaccgctccagcctctcccacctgggaccgcagcacctgcccccaggatcctccacctccggtgcagtcagtgcctccctccccagcggtccctcaagcagcccagggagcgtccctgccactgtgcccatgcagatgccaaagcccagcagagtccagcaggcgctcgcaggcatgacgagtgttctgatgtcagccattggactccctgtgtgtcttagccgcgcaccccagcccaccagccctcccgcctcccgtctggcttccaaaagtcacggctcagttaagagattgaggaaaatgtccgtgaaaggagcgaccccgaagccagagccagagccagagcaggtcataaaaaactacacggaagagctgaaagtgcccccagatgaggactgcatcatctgcatggagaagctgtccacagcgtctggatacagcgatgtgactgacagcaaggcaatcgggtccctagctgtgggccacctcaccaagtgcagccatgccttccacctgctgtgcctcctggccatgtactgcaacggcaataaggatggaagtctgcagtgtccctcctgcaaaaccatctatggagagaagacggggacccagccccagggaaagatggaggtattacggttccagatgtcgctccccggccacgaggactgcgggaccatcctcatagtttacagcattccccatggtatccagggccctgagcaccccaatcccggaaagccgttcactgccagagggtttccccgccagtgctaccttccagacaacgcccagggccgcaaggtcctagagctcctgaaggtggcctggaagaggcggctcatcttcacagtgggcacgtccagcaccacgggtgagacggacaccgtggtatggaacgagatccaccacaagacagagatggaccgcaacattacgggccacggctatcccgaccccaactacctgcagaacgtgctggctgagctggctgcccagggggtgaccgaggactgcctggagcagcagtgacctcgcaccccagcacgcccgcctctggtggccaccccgctgccccatggctggctgggtggccaggcaggaagtgcccagcccgagaggctgggaggtttgttgagggtgtggggtgtgccccacctgaagccggggctccccctgcctgcctctctctcctcctcccctctgggaattgggcagccctgggcagttgtactcatgggggcttaggatgcagctacctcagtgcgcagggcccgtctgtcctctgggggctgcttcgggcccgcggtgctcggggcctggtgtggggcgagtagagacttccccagcctggacgggcgtgggttctgggtcagcttcttttacctcaattttgtttgcaataaatgctctatagccaaagccaaaaaaaaaaaaaaaaa

SEQ ID NO: 244 - DNA, 3255 bp, Homo sapiens
gagaaattctcagcctcggggaagagtatttcttgatgagggaagagcgcggggaagacactcacgcacgcacaaacatgtgggcggccatggtgtgcccagcgccgtgctggcttctgggaacccccagtggacaagacggacaaggtaccggctctcaggggaagtgggagccagtcacaagcgtacctaatttcggagagtgacaagtactctgaaaaagaaagaaggtagggctggtgactggccaatttaagcgggcaggagtctgctgggggacggagaccagcctcaggtctgggttggggacagaagctgtgcctaagtgtggtgcaggatgcagttgcaaaggagcgcttccgatcgcacttgatgctcgccacgtccctgcaaagtgctcccgccccctttctgcaaatgaggaaacgggacgcgcggctcgccgggccagcccgcgtgcctgcgcagtcccctccccgagaaccatccccttgccccgcccagcgtcaggggtgcgcggccgccgagagaccccggaggcgtagccggctgcggaggcgaagaggtggcagcgcgagctgggaccagcgtctcggaggcgccgcagaattcacagatggattcagtggaaaagacaacaaatagaagtgaacaaaaatccagaaagtttttaaaaagcctcatccggaaacagccccaggaactgctcctggttatcgggactggcgtcagcgcagcagtggcccccggaatccctgccctttgctcgtggagaagctgcatcgaggccgtcatcgaggctgcagagcagctggaggtgctgcaccccggagacgtcgccgagttccggaggaaagtgacaaaggaccgggacctgttggttgtcgcccatgatctgatccggaagatgtcacctcgcacaggcgatgccaagcccagcttcttccaggactgcctgatggaggtgtttgacgacctggagcagcacatccggagtcctgtggtgctgcagtcgatcctcagcctgatggacaggggcgccatggtcctgaccaccaactatgacaacctgctggaggcctttggccggcggcagaacaagcccatggagtccctggacttgaaggacaagaccaaggtccttgaatgggcaagagggcacatgaagtacggcgtcctccacattcacggcctctacacggacccctgcggggtggtgctggacccatcggggtataaagacgtcactcaagacgcagaagtcatggaagtcctccagaacttataccgcaccaagtcctttctgtttgtgggctgtggggagacccttcgtgatcagatattccaggccctctttctttactccgtgccgaataaggtggatttggagcactacatgcttgtgctgaaggagaatgaagaccatttctttaagcatcaggcagatatgcttctgcacggaatcaaagttgtatcctacggggactgttttgaccactttccaggatatgtgcaagaccttgccactcagatctgcaaacagcaaagcccagatgctgatcgcgtggacagcaccacattattgggtaatgcatgccaggactgtgcaaagaggaagttagaagagaatggaattgaagtttcaaaaaaacgcacacaatcagatactgatgatgctggagggtcttgaaatctttacagtaaaacctgcaacttgaaaactagccttctgtaaccacagtgcccaaacgaagaggaatgtatggagaactccacgtggatctctgattgcgaaaccgtcacatacaccaagagagccacatgggcatgtggccctcaaggctgggtgagagggctcccctgtgtgttgaactatgcaggagggtgacgcggacacatttcaggtggactttgcaaggactgatggatagctacctcagggaccagaatccgtgggaagggatggacctggtgttcccgttcccatctgacaggctctcttttgtcaaggtggtatttttcgtaataaaaggggaagagtaaagactgtccaagcaacagtagctgccaaagagaaaatacgaaatagacactttttttttttgagtcagagtctcactctgtcacccaggacagagtgcagtggtacgatctcaagctcactgcagccaccaccgcctgggctcaagtgattctcctgcctcagcctcccgagtagctgggattacaggcgtccaccaccatgcccagctaatttttttatttttagtagagttggagtttcaccatgttggccaggatggtctcgaactcttgacctcaggtgatccacccgccttggcctcccaaagtgctaggattacaggcatgagccactgcgcccagcaaaataaacacattttataatttgtatgtggaaacatgttactatagaaagcattttaaaggtacgttttaaaggtccactgttaaatagtaaagaatgaatccgctagcgaaaatgtttttagggagaacagctggatcaaaagggcttctttggaattaggttgttttagtaacttctgttccaaagaaacacaggtctgatattgctaagaactgaaatcggaggagccagaggcccttttcagtccaggccaacattgtgcacggccactgtgggactgacaaccgggatagctcaagttcgagagaccaggtttcaaacattataagttccaggctttgcaagtctttattctctggggtaatatccagtctttctgttattgtctcttaaaattctcttccatggcccacattaagggagtttgcagagagtgagggaggcaaaacttgaaaagggcctgcaacactttaaaccttctcaggttcacccacatgaaacggctgtgctgagtgtgctgccggtgcccggggagcttctctgactgtgacccggcagaggcttctgtggcggtgcatgagcggccctacagtggagggttctctttggaaacaaacagccctgcttggtttcagtttgaggccacttatcttcaatgtgacatttcttgccaagccctgtgacactccccattgatgactcccataggtacagataaagttaagaacaggaaacagaagggtaggatgcatagggagggagagaagccctgaaaactttttttttctttttgaagcatggaaaacaaatcttttatgccactccagccataaataaaattttaacttcaaaaaaaaaaaaaaaaa

SEQ ID NO: 245 - DNA, 6236 bp, Homo sapiens
cacagcaccagtagaccccacacagtgagtacctgtagggcaagtgcctctttcgttctcttaataatagagtcaggtcccttctccaagggaagaccctgccttgcagccccagcctggcctgccccttcttgcaggcccgctccgaaccctggcagctggggcactggcagcatggagctgaagagaggaaagaccttcatcaagtccagcctgcaggtttcccacgagaaacccccagacccagcagccgtggctgcagccagggaggggacaggcccctggtcagtccttccaggagggcaacagaggccccacagtgagaagggcccccaagccagccccagtgcccaagaatacgacagatgccccaacaaaggggcgcagctggaccccaaagggggacccgcagccctctgtggagccaccttcaaaccggtgcgaaagtgcaagactcacgacagcatgtctggggcaggcagggccacggctgccacagggcagctggtgggcagtgcaagcttcccgggctccccgggcagccggcgcatgatcgactaccgccactttgtgccccagatgccctttgtgccagctgtggccaagagcatcccgaggaagaggatttccctgaagaggcccaagaagtgctttcggaacctattccacattcggagaaacaagactgaggacttggcctcgctggcggccgaggggaaaagcctgccctccccaggggacccgtcagaccctggggggcggcgaagcaaagccttcctccccccgggtgaggggccggggctggacggcctgtgccaggacctgttggacagcgagctcctggccgatgcatcctttggtctctgcagggccctgtgtgaggacgtggcctcactccagagcttcgactcgctcacgggttgtggggaggtgttcgcagatgagagctcggtgccatctctggagctgaacgagggcccggagagcccaacccaggctgctcagggcctggagagcaaggttcccaggggccctctccagggcagtgtggagcagctggcctcgcccgcccagaatgaagcctctgacttcaccaggttctgggacagtgtgaatcgctcagtgcgtcagcagcagcgtgccctcctaggcccgtggctttcaggcccccaggggacagacagggaccaatcccggctggacacagctgggctcgctgagctgcccctctgcccctgcagggaccctcgcagcggctccaaagccagctccatcgacacaggcacccccaagagcgagcagcccgaatccgtgtccacaagtgacgagggctactatgattccttctcgccaggacttgaggaggacaagaaggaagctgagagcccaggcactcctgccgccaccttcccacgggacagctacagtggggacgccctctacgagctcttccacgaccccagcgagggtcctcttggccccagcccagatgatgacctgtgcgtgtctgagagtctgtcagggccggccctggggacgccactgtccatatgcagcttccgagtgggggccgaggagaacttggccccagcaccaggccctgacctgctcagccagggcttcctacagagctcctggaagggcaaggagtgcctgctgaagctgtgtgacactgagctcgccatcaccatgggcatcgtcagctggctgcgccgaggccccacgccccgtgccccacccacccctgggcagcctgcagctccacctggttcccagggagcccctagggcacccacagagaagctggggggcagggagggcctggcctcagatgcagggggggcgacagtttgctcagcacccagcaggcaggagctgtgggcacacccgggcaccacaggcctgctcgccggagagagcaaggccctcggaggggccacacaagggactggcacactgtccagggatgcctctcgagaggaagagacacgaggtcactctgaaggcttgttctcctctatggagtctgcagccacttcgacaacagatacttccggtaaaaataaggccccagttccttctacctggccctgctcccagaaggagcctgggccaccaggggtcctggggtgtttccgaggcccctggaggccaggtcacggaggtgacactctggatgcagagcccatgctggcaggctgtgtggcccgtgtggcagccctgaagatcagctcaaacgaacagcccccggccgcatggcctccaaggcaagacatgggcagtgggctctttgggcagcgctgggccaggggccctgacatgctggagcagaaacagtccagcagctcccccagcatgaccaccatccatggcctaccctactcagccagcacacaggaccagaggtgtcgagatcgtgtccaggacctgagctggctcagggtggagcccaccgggctaggtgtccaggcctgggcctctgtggaggaccagcccttgcagctcagcacagaggctgtggagcaggtggcacacggcagccagctggactctgagccccgctcagcccctgctgcccggtggagttcccagggccaccatccagaaagcctgggcctcactttgaacagccagcaggaagggggggtctctgcaagtgccccagaatgccgctgcagcctcctggcccgtgagggcctcctctgtggccagccagaagtgggggcctctgggccagccatggctgagccccatctgtaggacaggctcacatgcaccaggaactgcatgtgtcttcatgaccactttcaggagagcctaggactcaaatctctatcttttgtccctgatgtggggactgtgttgggggtggggggtggcaggactcaggcatgcagagggtagcatgttcatgtggaggcatccttgcctgaacccaccagctcaggcagcccaccgccaaagacagcgcgaagctgcaaccacctagctgctcctcatgcaggggctggagagaggggctagggcttgaaactgagggggagaaagagctgcacattgtaaatgggaagcagagagccaatgagtctgcctgggatgtgtgtgaatcccaaaagacgcaatcccaaatgccatagtcccaagtgttgagaatccaaaatattaaaattactatactctaaaatccgaaaatcacaatcccaaaagatctaaatcctggaaatataattctgggaaaatttttttttaattttttaaaagatacttacattttaaaaggatttatttgagaaacataaaaacacaacagaacacatcagccacttcacacaataaaataggcaataatacatatttttggaagcataaacaggtatacagacagttacaccggtgtgagttattagcagacaaactatattcatgaagaaataggtcaaaatgggaaatgtatacatgcatgtcactatgcttggtaattgtgtgcacctcgctttatacttgcagtcatatcatgaccaacaacctaagtcttttgacgaagtcaatctatgatgcgtcaccaccacacacacagttgcccaaagagcggagatggcaagaactttcatctctcacaattgcagatgtacaaaaattacatctcttcatttattgaggaagttttgacgtttttatacacacgcacaatgcttacacacacagtcaacctgggatgccggcagggtggctcaggacgaaagcctcaggacccaggagggccatgggtgtaagttccagagtccaaaggccagcgagcctgaagctctgatgtcaaggcagtggaagaaaagcctgtcccagctctgagagagagaccagtttgccttctttatttgttctccctgggcctcagcagattgaatgctgcccaccaacattgagggtggatcttccacacctaggcccctcagattcacacactaatctctggaaacacctcacagacatgcccagaataatgatctcccaggtctctaggtatcccttaacccagtcgagttcacacccaaaatgaagtccacaggtccaccccttgtcaacttggcatccatccgcatccccttaaaccattttcagtctccaaataaagccccaagcaaggcagtagctccacctaacatgatgcaactatcccgggattgtgatttttaagactttagatgttagggatttgaaactttagagatttgcgtctttcagtatttcaatgttggggaccagtgtttgggattatgtcttttagaataatgatccaaacttgtgtgaggactgtgaggctcagggtgggagacgggtgggggagccgaccttaggagggcccactgaaccggcctcaatctggccccagtctggcctactcgctgccccaggacaggtggctacaacatgctgagggcctgaagggcgtcccctcaggaacattgtattactgttttgtgttgctataaaggataactgtgaccagatcatttataaagtaaagaagtttatttggcttgtaattctgcaggtgtagaggcatggcaccagcatctgctgctgctttttttttttttttttttttttttgagacagggtctcactttgttgcccaggtgggaatgggagtgcagtggcacagtcttggctcactgcagcctctacctcctgggctcaagcagtcctcccacctcagcctcccaagtagctgggactacaggcgtgcgccaccttgcctggctaatttttctatttttttgtagagacgggttttcgccatgttgcctcagctaaaatgtctcaaaatctcctcaactaaaatgtctcaaaatctcagcctcccacagtgctggatgacaggagtgagccagccagcatcatgcatccctgtgcgccctgccagggctggcgggaccctcccacccttgttgatgggcagtgctagattatttgtcacgaatcatcccctacaaacaatgatttccctccgcttgcactctctaactagagccatggatggccaaatgctttttgggaagaagccaatggattctcctcggctctgcctgcaagtaacaaaggcttttgactccactccctccacgctgtcagatcgccattccccttcaggaaaacttcgaatggggctgtggacctcactccccaaaatgtcacaacacatgtgcagcaccccgacattcagaaccatgaagggagaaggtggctggtgtctgtaggagggacaggtgtccgtcctgggccagtgtcaggccagcaggtgcagggacagatgggccatccacattctccaagattagcttctacctcaaccagcacacctcagcaagatgccaggattgggctccacaggcagccatgaaatgggtttctggaggaaagatcagcacaggaaaaggggtcagtcaggtcgcaggcaaagtgctagggaaatcccatctcatgcagagctcccaccaagaggagcgtgagttgtgctgtcctggctcgagaagaaggcagcacaggatctgtagctgagggtggccctcccaccaggggacgctggtcagtgcctctcctgactgcctgacgcttggtctccggtggccctctctcaccagggctccctgaggcctgctgcaagcaggacacaggctgcacatcacaggttccaaagtgtgcagcaaggcttctgaccaggcccgtccagatctggagcccctgtggagccacatctgagccctcctcccaagactcacacacaggaccacagcagcatcactgagccgagctgggggcaagtttcaccagattcgcttacctgatccttgcatcaacctcaatgcagttgtcagccccatttttcagacctggacacggaggcacagggtgctggtgtgacttgcccacagttattagtgtgtgaggtgatgggttttgtcccgtcccagctccaaaggccctgctcttcctcaagctccagaacctctcactgagctcctgcagtgaagtcccccctcagagccctcagcccttcctgctttcaggctccagatgtcagagcacccttgggtgccagccacaagtggccctccagcaggctgagcacccagggggaggctgccctgactcaaccccagcctggggctttgtgctgcacctgagggagtagccgctctgtaaatccttgttgaaagaatgaagtgtcaaaaggt

SEQ ID NO: 246 - DNA, 9632 bp, Homo sapiens
agtagtttgcggcatccggaggagcagcagcagcagtagcggcggcggctggcgcagcgcggagacggacgagcgggcacagacggcagcacagctcccgtgcaccatgcctggcttgcccgggaggcactggcacccgcgtccctagcccggcgctggcccttggcgcgttgcgctccgcagcattccggctgagcgatttcatccgaaatcctaaacctcctaccccaaacccattgcctcctgcttgctcatactccacactcacactccccacaccacacactcactcttcctctctctctcacacattcacacacagcccgagacagacagagaaagcgagacagacctcccgagtgcgcgagcgcccgggaggaagggagcccaacgcagcgcggccagcgcctctccgggaagatgaaatcaagacgctcctgcaagtaaacttcggcggcgacaaaatcgtcgactgtggcagctgctgaggcggaccccagcgacgtgcaactgagctaggagggcttcctcccgcggcggcggcggcggcggcggcggcggcggaccttggagcgacaccccagcccaaacggagagaagagaagcacccggtacccacggcggcggccccgcctctcctggccggtactgttgttgcctccccttccctcttccccattccccgccacccccggccattagaaagaccggggctttgattttcttggacaaattgccatctccccgtttccacaaacttgacgtggagggtcggactgcgttgttaactttgatttcctagacgaaaacgcccgcagaccctcaactgctctgtggggggaactccgctcccacctcggatcctggacagacgcgcccccaagcccttcgaagccagccttagcgcgagggagcgcgctcaagctctggcagcctctctcccctcccccttcctctgctggccccgggaccgccatccgactcaaccctataaccgggtgcccgcggcgcttgccagtaactgactcccgtctgcgacaccccctttctcccgaacaggcctcgaagaggccagtgtggcccccccagaccccggagggcgcattccaagcgggtactctctccgcagtgaactgggagcgctggggggaggtctttgcgcatgccaggtgcacagacagcgagttcgccagcctcagtgccggtgcaccgcggcgggccgggcagtgcctgaaaggctgcgcctcctccgccctctttaccttcgcctcaagtactgtccggactcagcggtgcgtcctccaggccgcgcagacgccgcccgacccgcagccctgggcggctgccgacagtcgcgcccggctaactttgaaggggtaaaactgagtagccgggctggagggagggggctcggggccgcgcggcgctcccttggcccctcggagcccccggggcccccgcgagcccccgccgcgtccgccgcaacctcagcattggagccgccgcgggtgtcccccgcgcgccgccgggccgccctgggcgggacttctcccgcggcctccggggccacggggcgcgcgcaacaggcggcccgagccggcgggaagctggagcgccgacggcgtcggtctcggaggggtgtggagaggcgaggccaggcagagccccgtgcagccatggagtcgctcctgctgccggtgctgctgctgctggccatactgtggacgcaggctgccgccctcattaatctcaagtactcggtagaagaggagcagcgcgccgggacggtgattgccaacgtggccaaagacgcgcgagaggcgggcttcgcgctggacccccggcaggcttcagcctttcgcgtggtgtccaactcggctccacacctagtggacatcaatcccagctctggcctgctggtcaccaagcagaagattgaccgtgatctgctgtgccgccagagccccaagtgcatcatctcgctcgaggtcatgtccagctcaatggaaatctgcgtgataaaggtggagatcaaggacctgaacgacaatgcgcccagtttcccggcagcacagatcgagctggagatctcggaggcagccagccctggcacgcgcatcccgctggacagcgcttacgatccagactcaggaagctttggcgtgcagacttacgagctcacgcccaacgagctgttcggcctggagatcaagacgcgcggcgacggctcccgctttgccgaactcgtggtggaaaagagcctggaccgcgagacgcagtcgcactacagcttccgaatcactgcgctagacggtggcgacccgccgcgcctgggcaccgttggccttagtatcaaggtgaccgactccaatgacaacaacccggtgtttagcgagtccacctacgcggtgagcgtgccagaaaactcgcctcccaacacacccgtcatccgcctcaacgccagcgatccagacgagggcaccaacggccaggtggtctactccttctatggctacgtcaacgaccgcacgcgcgagctctttcagatcgacccgcacagtggcctggtcactgtcactggcgctttagactacgaagaggggcacgtgtacgaactggacgtgcaggctaaggacttggggcccaattccatcccggcacactgcaaggtcaccgtcagcgtgctggacaccaatgacaatccgccggtcatcaacctgctgtcagtcaacagtgagcttgtggaggtcagcgagagcgcccccccgggctacgtgatcgccttggtgcgggtgtctgatcgcgactcaggcctcaatggacgtgtgcagtgccgtttgctgggcaatgtgccctttcgactgcaggaatatgagagcttctccactattctggtggacggacggctggaccgcgagcagcacgaccaatacaacctcacaattcaggcacgcgacggcggcgtgcccatgctgcagagtgccaagtcctttaccgtgctcatcactgacgaaaatgacaaccacccgcacttttccaagccctactaccaggtcattgtgcaggagaacaacacgcctggcgcctatctgctctctgtgtctgctcgcgaccccgacctgggtctcaacggcagtgtctcctaccagatcgtgccgtcgcaggtgcgggacatgcctgtcttcacctatgtctccatcaatcccaactcaggcgacatctacgcgctgcgatcctttaaccacgagcagaccaaggcgttcgaattcaaggtgctggccaaggacggcggccttccctcactgcaaagcaacgctacggtgcgggtcatcatcctcgacgtcaacgacaacaccccggtcatcacagccccacctctgattaacggcactgccgaggtctacataccccgcaactctggcataggctacctggtgactgttgtcaaggcagaagactacgatgagggcgaaaatggccgagtcacctacgacatgaccgagggcgaccgcggcttctttgaaatagaccaggtcaatggcgaagtcagaaccacccgcaccttcggggagagctccaagtcctcctatgagcttatcgtggtggctcacgaccacggcaagacatctctctctgcctctgctctcgtcctaatctacttgtcccctgctctcgatgcccaagagtcaatgggctctgtgaacttgtccttgattttcattattgccctgggctccattgcgggcatcctctttgtaactatgatcttcgtggcaatcaagtgcaagcgagacaacaaagagatccggacctacaactgcagaattgctgagtactcctatgggcatcaaaagaaatcaagcaagaagaaaaaaatcagtaagaatgacatccgcctggtaccccgggatgtggaggagacagacaagatgaacgttgtcagttgctcttccctgacctcctccctcaactattttgactaccaccagcagacgctgcccctgggctgccgccgctctgagagcactttcctgaatgtggagaaccagaatacccgcaacaccagtgctaaccacatctaccatcactctttcaacagccaggggccccagcagcctgacctgattatcaacggtgtgcctctgcctgagactgaaaactattcttttgactccaactacgtgaatagccgagcccatttaatcaagagcagctccaccttcaaggacttagagggcaacagcctgaaggatagtggacatgaggagagtgaccaaactgacagtgagcatgatgtccagcggagcctgtattgtgatactgctgtcaacgatgtgctgaacaccagtgtgacctccatgggatctcagatgcctgatcatgatcagaatgaaggatttcattgccgggaagaatgccggattcttggccactctgacaggtgctggatgccccggaaccccatgcccatccgttccaagtcccctgagcatgtgaggaacatcatcgcgctgtctattgaagctactgctgctgatgtcgaggcttatgacgactgcggccccaccaaacggactttcgcaacctttgggaaagatgtcagcgaccacccggctgaggagaggcctaccctgaaaggcaagaggactgtcgatgtgaccatctgcagccccaaggtcaacagcgttatccgggaggcaggcaatggctgtgaggcgattagccctgtcacctcccccctccacctcaagagctctctgcccaccaagccttccgtgtcttacaccattgccctggctcccccagcccgtgatctggagcagtatgtcaacaatgtcaacaatggccctactcgtccctctgaagctgagccccgtggagctgatagcgagaaagtcatgcatgaggtcagccccattctgaaggaaggtcgcaacaaagagtcccctggtgtgaagcgtctgaaggatatcgttctctaaaccagtctccaggaagaagagaaagaaaccacactggctagtgaagaagcaggagcttcttgttttaattgctcaccaatggttggttcttgagtggctatatttcagagcttttcctaaatgtattgtttataggtgattatcattctgtgacagtcccttgtttcaacaggcagcaggggtgttcagttggagcaaattagctttggcttgagttgttcatggggccttgatgttggggaaacagagacaaattcagttgtgaaaagtattatgtattaagtgtttgaatttatatatttttctatgtcaaaattataatataaattaccattgtttgtggaggattacatttaaaaaagcaaaaagtgaaaaaaaaaagctctggacacctttaataagctcgccactgttttttgtagtgtagacaagttaatggtcatttattgtgtactattcattgattcagtgatgtgaaattgagcccccaaaaggttgtttctgaagctcgagtacttcccaatgccgctactttgctgtggacacccctgctttaaaaacccttttgctagctgtgctattgttgtatttgatattgcaaattgctatgtgtgtggtgatggcaaaaggcttttaaaagttggtgttttctttttcttaaaaaaataataaaactacagacaaaaacaaagtgcaaacaactgagacagcaaatgaatgagcaacaccatgcatatagattgagtacttggagaatactcacgttttttaactcatgtagtgattgctcaccactttgcaaagtatttttcctgcctttcagtggtctgcccaggtccatgatagatcattgcagaaagtcatttttggataggctgctatctaatttgcagttgtcagaaatactgtgctgaaagttttatgacatccatcttttaaattttcaggccctgaacaggaaagttgctcctgaagttatgtttccaggcttagaaattccctctctccaatcatctaaaattgaagatgactgaatctattttaagatctaaattagcatctcttcagacacacacttcctgattcagtgtttcccaatcatgattagaattagactgcaaagcacgtcatgggctgggattgagaactccatgttgctctgtatcttaggcttatatacgtagggatagagtaagcagtacaaagtgtatattttggaaaagacaggtaacaggtaacagcatcgctaatccaattactgtgccttctaaacggagacactcagacacttgaactcatctttttatgactaatagttttttgattaaaaatgtgaacaagaaaatactaaaataaaaatcctttcgatttagccaactctttttgctgtaggctaggaatacaccctttttaaattaacacactgtagatcctttttttctgttttaacattcctctaactcccccatttatcttttgtctattaatattcactagccaacatagtatttttgcagcctaagagttcattatttaaaaataaactaaagaaatatgtcacctttgttctgccttggtcttaagagagttgtttctagagaaacaagttttatggttctgttttcatttgtttcattttttgaaattcaggaatacacagagagaaggcctagaggttagagcactagaatgcaaaagaggatttattttcttaagtttaggtagataagtcagctcttttgaatgttttacttatttttgcctgagttcctagctttacgcattactaggaatattttcttttacaggagggagaagggttttgagggagggggtgggtaaggcagtagggatggggttaggtaggggagaacatttctgaaaaagaacttataatgaagctacaaatccatccttatttcttattcagtgctgaatactacctcatgcaaaatattggtgtggctgcaaatttccctctgaagctgacacaattaaggatgaattaccataacatcttcatttttcctcatttcattgcctctcatacagttttctccctctgatttatttcattttggtagtggattttgaattaagtatttatttctctttgcaagtgactatttgattaacacattaaaaattttttaaaaatttcccctttaagttatgatggctgcctatagaatttagactgtttctcaccctgatccatcctgatattatgttattagctacgatttcaaggtcactttgaagtcagacttcacagttttctacaggtgtatttcttgctatgctcagtgggaaccagggagcagaaaagattgtggaaagtgggaacattaattgtcacgtggctgttgagccagagaggccactggctgccatgcctcttaccagccaagttttaaatggttagagtggcattggcattgattttgcttttctcttgggttttcttcatttcttttcataattcatcttcaagctatagatccatccttcttccctatccaaatactttgttctcagtgggcagtcagatttttttggcttccaaacctcactgagcatgttcagagaattcctctcattaaggaaatatttttccccacaattgtctgatgtatgagtcctctcagaagcacaagtgcatactaggaaggctttgtaaactggttttgtaggcaggctgtacctgcaaataggcattctgagcaaggatcctaaatttccctttggctcatgtcccccccgccccaccccaccttctcctttttggcatgtctggtgaaaagctacaaggttcacagggccaaatattctcccttttgttctctaaacatgttgcacacataaactcaagggagtgatttcggttcctaagtcctagggagttctattccatttattctgatgtcccttttaaggaggagttggtgttgaagtgtgacatgctttaatgataactgctttggcaattccccagacaggtatacttcttcatccaaaattgcacctaaggtgttcatttagacaaaattgttcgcttagtgatccactgatctctaatcagaaatatttttaaaaaatacaatttagatctctgaaaattggaaccactcaagagtatcatcttgatagtgttacttcagcatatgactgactgattttatgaagggagtttagctgacttttccctgtagccctatcatattaaaaacaaaaagtggtccacttgaagcagcaaggacaaagggcagtttagggagaggcagggtgaaggggatagctcgattgggcatccagagtggaaaaggattattattgtacataatagcagttctggctggaattccaatccactttctggggatcattttgatgttgaatgttcccccaaagcattctgacaagtttggtccacttggctctttaccccgggtaataagacccttattgactttgaaaaactggcataaatgagcttaagaaatccattgtatacagtcctagtgtttgccttcttggtaaaattacatttaaggatgtcatttcatgagtcaaattgtatctgctgacactgaagtgtattgagatgttgttctttagtttaagtatgtaacaaagtaatattcaaaggggatgtttgggggtggggctgggaccgggtggctttatattgataatgaaatattccagagcaaaacacattgtcctaatgaagttgttgcagctctcttcgttttcttgtgccgctggaattggcttgtgggtcacttgttgtgcaaaagtgaattaatttcaaataggaatcatattgcttttgtgaaacaaagaaaatttaccaccttgtctgatacatagattggaaggcgctcttggtaaagaataacccacaaacacctgatcttgattggaaagcattgtaggtcattagggaaaactgatgatgctgactgttgctccagctgtgttggcaattcaagatgaccttgttactaactgaaagttgctgtcaaccttagcaaacaaaccagctaacaccattacagcactggttaagtagatttttactggcactggctggcgttcagctgaggaaggctaggatacagactttaatgaccaagagccagactagctcgagctagaaatcagcaacaaatacctccttgtgctatttgaatgctaaggtattagttgcaataggcttacgccttcgctcctctagtgaggggaatgagcctgatgacactattactgtttacctgtcaaaccagggtggaaatttagagggatgcaagtacagtatgtctcattaagcagtctctgttgctgattatatgaagataaaattgttgtatatgctgatctgtatgttatgtacattttcacagtgattgaatcattgtaaaaagaaaaaagacaaaaaagaatcaccactgtctattttatgaagatgataaagcagctttattaaattattacagttatgtttcaaatggtgttatctgccacattgtttccttttatctggtggttctctgtttccccctttaaatgtgttttctctgcttcaaaaatttaatgcattttagtattaaaggctattatggaaaaagtaaaaaaaaaaaaaaaaaa

SEQ ID NO: 247 - DNA, 7420 bp, Homo sapiens
ctctgcgctgcccggtggggcggggaaagaagccctgagccgggatctggcactcccaggactcccggccggggtagctcttcactcctcagcgcgacgtcgtgtcgagttcccaaaaagctccgcaggggctgtagggaggtgatctcatccattaacagctgtgtgttgccagttcccaaatctttatctatctcagacttctctcctgcattccagattcttatattcagctgccttttggatatctctcccaggatgttctcaaggcatacaagaattaaattctgaataagtctgcaggtaggatggacagttattttaaagcagctgtcagtgacttggacaaactccttgatgattttgaacagaacccagatgaacaagattatctccaagatgtacaaaatgcatatgattctaaccactgctcagtttcttcagagttggcttcctcacagcgaacttcattgctcccaaaagaccaagagtgcgttaatagttgtgcctcatcagaaacaagctatggaacaaatgagagttccctgaatgaaaaaacactcaagggacttacttctatacaaaatgaaaaaaatgtaacaggacttgatcttctttcttctgtggatggtggtacttcagatgaaatccagccgttatatatgggacgatgtagtaaacctatctgtgatctgataagtgacatgggtaacttagttcatgcaaccaatagtgaagaagatattaaaaaattattgccagatgattttaagtctaatgcagattccttgattggattggatttatcttcagtgtcagatactccctgtgtttcttcaacagaccatgatagtgatactgtcagagaacaacagaatgatatcagttctgaattacaaaatagagaaatcggaggaatcaaagaattgggtataaaagtagatacaacactttcagattcctataattacagtggaacagaaaatttaaaagataaaaagatctttaatcagttagaatcaattgttgattttaacatgtcatctgctttgactcgacaaagttccaaaatgtttcatgccaaagacaagctacaacacaagagccagccatgtggattactaaaagatgttggcttagtaaaagaggaagtagatgtggcagtcataactgccgcagaatgtttaaaagaagagggcaagacaagtgctttgacctgcagccttccgaaaaatgaagatttatgcttaaatgattcaaattcaagagatgaaaatttcaaattacctgacttttcctttcaggaagataagactgttataaaacaatctgcacaagaagactcaaaaagtttagaccttaaggataatgatgtaatccaagattcctcttcagctttacatgtttccagtaaagatgtgccgtcctcattgtcctgtcttcctgcgtctgggtctatgtgtggatcattaattgaaagtaaagcacggggtgattttttacctcagcatgaacataaagataatatacaagatgcagtgactatacatgaagaaatacagaacagtgttgttctaggtggggaaccattcaaagagaatgatcttttgaaacaggaaaaatgtaaaagcatactccttcagtcattaattgaagggatggaagacagaaagatagatcctgaccagacagtaatcagagctgagtctttggatggtggtgacaccagttctacagttgtagaatctcaagaggggctttctggcactcatgtcccagagtcttctgattgttgtgaaggttttattaatactttttcaagcaatgatatggatgggcaagacttagattactttaatattgatgaaggcgcaaaaagtggcccactaattagtgatgctgaacttgatgcctttctgacagaacagtatcttcagaccactaacataaagtcttttgaagaaaatgtaaatgactctaaatcgcaaatgaatcagatagatatgaaaggcttagatgatggaaacatcaataatatatatttcaatgcagaagcaggagctattggggaaagtcatggtattaatataatttgtgaaacagttgataaacaaaatacaatagaaaatggcctttctttaggagaaaaaagcactattccagttcaacaagggttacctaccagtaagtctgagattacaaatcaattatcagtctctgatattaacagtcaatctgttggaggggccagacctaagcaattgtttagccttccatcaagaacaaggagttcaaaggacctgaataagccagatgttccagatacaatagaaagtgaacccagcacagcagataccgttgttccaatcacttgtgctatagattctacagctgatccacaggttagcttcaactctaattacattgatatagaaagtaattctgaaggtggatctagtttcgtaactgcaaatgaagattctgtacctgaaaacacttgcaaagaaggcttggttttgggccagaaacagcctacttgggttcctgattcagaagctccaaactgtatgaactgccaagtcaaatttacttttaccaaacggcgacaccattgccgagcatgtgggaaagtattttgtggtgtctgttgtaataggaagtgtaaactgcaatatctagaaaaggaagcaagagtatgtgtagtctgctatgaaactattagtaaagctcaggcatttgaaaggatgatgagtccaactggttctaatcttaagtctaatcattctgatgaatgtactactgtccagcctcctcaggagaaccaaacatccagtataccttcaccagcaactttgccagtctcagcacttaaacaaccaggtgttgaaggactatgttccaaagaacagaagagagtatggtttgcagatggtatattgcccaatggtgaagttgcagatacaacaaaattatcatctggaagtaaaagatgttctgaagactttagtcctctctcacctgatgtgcctatgacagtaaacacagtggatcattcccattctactacagtggaaaagccaaacaatgagacaggagatattacaagaaatgagataattcagagtcctatttctcaggttccatcagtggaaaaattgtctatgaacacaggaaatgaggggttacctacttctggttcatttacactagatgatgatgtttttgcagaaactgaagaaccatctagtcctactggtgtcttagttaacagcaatttacctattgctagtatttcagattataggttactgtgtgatattaacaagtatgtctgcaataagattagtcttctacctaatgatgaggacagtttgcccccacttctggttgcatctggagaaaagggatcagtgcctgtagtagaagaacatccatctcatgagcagatcattttgcttcttgaaggtgaaggctttcatcctgttacatttgtcctaaatgctaatctactcgtgaatgtcaaattcatattttattcctcagacaaatattggtacttttcaaccaatggattgcatggcttgggacaggcagaaattattattctattgttatgtttgccaaatgaagatactattcctaaggacatcttcagactatttatcaccatatataaggatgctctaaaaggaaaatacatagaaaacttggacaatattacctttactgagagttttctcagtagcaaggatcacggaggattcctgtttattacacctacttttcagaaacttgatgatctctcattaccaagtaatccttttctttgtggaattcttatccagaagcttgagattccctgggcaaaggtttttcctatgcgtttaatgttgagattgggtgcagaatataaagcatatcctgctcctctaacaagcatcagaggccgaaaacctctttttggagaaataggacacactattatgaacttacttgttgaccttcgaaattaccagtataccttgcataatatagatcaactgttgattcatatggaaatgggaaaaagctgcataaaaataccacggaaaaagtacagtgatgtaatgaaagtactaaattcttccaatgagcatgtcattagcattggagcaagtttcagtacagaagcagattctcatctagtctgtatacagaatgatggaatttatgaaacacaggccaacagtgccactggccatcctagaaaagtgacaggtgcaagttttgtggtattcaatggagctctaaaaacatcttcaggatttcttgctaagtccagcatagttgaagatggcttaatggtacaaataactccagagaccatgaatggcttgcggctagctttacgagaacagaaagactttaaaattacatgtgggaaagttgatgcagtagacctgagagaatacgtggatatctgctgggtagatgctgaagaaaaaggaaacaaaggagttatcagttcagtggatggaatatcattacaaggatttccaagtgaaaaaataaaactggaagcagattttgaaaccgatgagaagattgtaaaatgtaccgaggtgttctactttctaaaggaccaggatttatctattttatcaacttcttatcagtttgcaaaagaaatagccatggcttgtagtgctgcgctgtgccctcacctgaaaactctaaaaagtaatgggatgaataaaattggactcagagtttccattgacactgatatggttgaatttcaggcaggatctgaaggccaacttctgcctcagcattatctaaatgatcttgatagtgctctgatacctgtgatccatggtgggacctccaactctagtttaccattagaaatagaattagtgtttttcattatagaacatcttttttagtgaaagaatgtgccatattacatattgcaacctaatttgttaaaactaactccagcactaaagctgaaatgccacaaacactaaaagtataaatatgtctgatttttgaaacacataagctttgctctttaggcaggaatgatcttttcaaatcattagcacaatatttaaatatctaaaaatttaagagatccatactttctgtagctttacaattaatttaagtactaaaaagacaaggatttcttttaagaaatttatagcatttactgtgttatttaaatgctaagccaaagtatctgcacttaggtatacctctttatgccaataatgattttaatgaaggctcttttcagatgtaaccttatgaaggaaatatctgctttgtgtatatgccagttagaatactggtttctaaagtctgtcaaattgtatttcagtggcacaaaaaccagttttgaggtcttagacttataattctttgaataaaactgataacttatttgtataattggagtggagacctacctccataattagataaactctttttggattataatcagaattttgccttttttcttctcaaattattacatatgtatgtattatatatccacatatatagttttccctgattaaatggatattaaaataattgcgggtgcttcaggactttttgcttctatatttaagtatattgtttttatagcaagaacatattctgaatgttttataaatctttaataatttatatgtaggtaatatttttgtatcacaatgcattatttttttcctcctttccttccaaactataccactgtatttaccacttctaagagtgactgacgacgggccagatgacccttgaagtagtcattatgtagcaataaatgaagcctgaaacaggtttttttacttccactttaatccttagaaatttcttggcaacttcgcatattttcattgacaccagtgtataagtataaatttaaatgaactaattacttttgcatattttaaattctttatatggtagttattttttataacaggatattaacataagttaaatcctatgtatttgaaattgttacagagctttcctctttacttcaaacagcaaaaaagtggggggcatattgtagtcctgtcatttaagttatgtaaaaaatttaatcattattttgatgctttaaacattctcatgtgtaatatatgtttttgtatcaaaaacactcatatatttcaagaaaaagaaattatgttaaatagccctgttttaagaaaaatatttatgaagcatctcaacttgaagatcaagtcaaagttataactcaggatctgaggtctcaagctaggagagactgagaattttaatcagtttgggcatatagtttggactgaatcacatctgtagtacttagccaaagacaatttggaggagaatatcagccttctggaagtagctacttcctgaacaatgtaaagtgtcgcagatattcaataaaatggcaacctgttataatttgtgaaatttattgaaatggtgtaagatgaaaacaattgcatatcaaacccaatttatgttttctaaatatagtgtatgtattctgccatgtaagtaattgaacagtcttaaaataaccaaatggtagagggctgttccatgatgggacagctttggatttgttttcataaaatctctatattcaataaaaattggaattatgtgcctgaagtttggaggcacattttgaagtattctttgtagacatatagtatgtttctgaatgtgtttgttacttatttggtcattggtacttaatttgaaattttaattttttaagagaagaaatagaatggttctttgtactcagtctgcaatgatctatttttggcttatgtcttttaatactactctctttctctgaattttgaaatatgaagtaaaatctagcccatttgttttatgcagctattcaacaaactttgtgtgttcgtatacttgctacatgcagagcactttaccaggtttctaagcaaaaatttctaaaaatgattaattgttctgacagaattaggcgtagttctttatcaacatttatggattccatgccacaagtagtatgcgcttaagtgcagagcatgccaagagaaagagtaggatttggccctgtaggagcaaagattcaattgtgggaaactacttgtttctgaaaattgcatgctaggatatttacatcatgttcctgttgaaaacaattcctgattaaaatacaagaataatcttaaaacatcaaagagattttccagacaataaggaatgccaagtccaaaagtaaagagaataagagaagcaagcatgtacccttactctgacaaccttatgagtgagggggacagaaattaaagttcagggcccatataaggtgatgaacctaacaggagaccctccacacaataggctgagactcccaaatactttcacc

SEQ ID NO: 248 - DNA, 3820 bp, Homo sapiens
gaacaaagactacagcacccaggatacactgcgcagtctgggggcggggccggagttcaagcctcggaggaagtaaatgcaaatctaagcgagcgctgtggggcgcttttcaggatgtccagcaaagaatcctgtgggaaaaaagagacatctcagaggaaagacaccaccacctcatcacccaattttggtgaaaaagacaagaaagagagaaaaaccccagcaagttctactagttcatcttctataagatcagtttcatcagaaaagagaaaactgaaatcagatcatacagatgttctgtactataatataaaaagaagacaaggactgaaaagattgagtgtagaaattgacactctcagaaggagaccaaaaatcggttcttcatcccaaagacctattaaactcaaagaagcatcatattcaaatgataatcaaattattttgcagagtccttcttcaaatggaactaaaaaagacatacataaatgtgtagactttaaacctaaagatatcaaattgacaaatgctgggagcaagcttgaccatggaattaaaagccttagtagtcctaagattgccagtgatgtgaaacctaaagccgaaggccaggcaagtgaaaataaatggtctcatttacttgttcagagagagaagatgaaagaactcaagaaaggaagaaacagtaaatttagagacaattctgaaaaatgtgtcttagagaaatggaagagaaatcaattttctcaggattataactccaacaagataattaaggaacccttgggatctagaagacagaagatcagtttcaaaatccctataaaatcccgtgacaccctccagaaacttgtagaagaaaatgtcttcaacatagattctaataattcgaagactaagcaggaagaaagagaatacctggaaagctcccaggtttcattaaatgtgactaggcagaaaactgaacatttactttcagattttacatataagcggactgttcatgagtggaaacgaaaacatcattatgaccatcaagaaagtaatgattcacattctagggaaaacctaacccagagttttgaagcaccatgttgttccgtgtcatctgaaagtatccaggatgcagatcaagagatgcagatagtagaagagcttcatgctgcacgtgtgggaaaaagtgtggatttacctggagagttaatgagtatggaaattgacttagaagatgatgtacattcctcctctgcaaataatacttcagacagaaagcttctaattgttattgacacaaatattctgatgaatcatctcaaatttgttagaattttgaagacaacagaagtaccaggttttgacaaacttgtgttaataattccctgggtcgttatgcaagagctagatcgtatgaaggaaggaaaactactaaaacgtgcccagcacaaagctatacctgcagttcatttcatcaacgacagtctcaaaaatcaagatagaaagctatggggtcagtcaatacaacttgcatcccaaaaacattatggattgagtgatgagaacaatgatgatcgagtactaaaatgctgtctccagcaccaggaattattcccttgttcttttgttattctgtgcacggatgatagaaacttaagaaacaaaggcctaataagtggtgtgaagtcactcagtaaagaagaattgagtgcagagttattacacttatctctgaacacagatgtgtgtcatcagccttgtattcctaagcaacagttgaaagcagaaacaacacccttgaaagagagctataaggaggaatctacaaattctggactgtccattctgcttgagagcattgtatctgatcttgaaaaatctcttggaacaggtttatcttcaatattagaaacagaaatgaaaattgcttttggaaacctttggatggagatcctgtacctgaaaccaccatggactctactacatttactacagtgctttaaaaaacattggttggctgtatttggattagttatggaaaagaacttgcttttaactattgagagcctatacaaaaatctccgtaaagctaataaggcagtggattttacaacagtcaaattcttgcttcaggattctagaagtttgttacatgctttcagtacaaggtcaaattatgatggtattcttccacagacctttgctcaagtaaacaacctccttcagacatttgcagaggtcaagacaaaacttaagccaaattcttcagaaaacacagtgactaaaaagcaggaaggtacttcattgaagaattctcataatcaagaaatcactgttttctcgagttctcatcttccccaacccagcaggcatcaagaaatctggtctatcctagagagtgtttggattacaatatatcagaacagcacggatgtatttcaaagattgggctcaaattcagctctgactacttcaaatatagcatcatttgaagaagcatttatatgtcttcaaaagttaatggcagctgtgagggatattcttgaaggaattcaaaggattttggccccaaacagtaattatcaagatgttgagaccctctataacttcctaatcaagtatgaggtaaataaaaatgtcaaatttactgcccaggaaatttatgattgtgtttctcagactgagtatagggaaaagttaaccattggatgccgccagctggttgagatggaatataccatgcagcagtgcaatgcatctgtttatatggaggccaaaaacaggggatggtgtgaagacatgctcaactataggatataagtactgatttgtaactttaaaggaattgcatttgtccttaagaataacagagtagttttcaatctggtcactcttttgggccaaacccaagagaattttaagaaatgtttcataggtataaaaaggtgatcgcctattactgacagtctcattgtagctctaaaaagcctaatgtatccactgtggaataaactccatagactcaactcttctggagttcacaatgcctccctacctctattcttgatagtgagccagtatctctaaggaaaggagagccgtatttttagtcatcctagggcaggagccactgtggcatctgaggaagacccagggtacagtattagcatttctttcaaccctaagtatgggcatgtgaccagagacactgccaaaccctaagaaatcattagggcatgatcatgctcaccatatttcacaaatgaaatcttaatgtgggctgttttttatgatcaaactgtcatccatgttgacctgatgaaaataacaccctccttcacctccctcagggtaatgaaagtagaaatttgactgaagctcctacttccttatacagcctttccttctgtgggcttgtcacttttcagtacatttctagtggggaagagcagggcgacccctctgctgggtttctccttaaatgtgaagcaaaataaatttatataatggaatttggtggcagtgactgatgtttgtctctagctaaaaccaactgtttagttgactttttagttataggataagttggaagtccttgtttactggaatatattatgcttttgttaacacattagattaaatagaatttggtattctattataaatgtttattttttaaagcaataaataacttatttttggtaagatttggctttttacttccaaattgtttctgatatgtacataaggtatgattataaaagtgactgtctgcaataaaagagaacttgttcaggaaaaaaaaaaaaaaaaaaaaaaaaaa

SEQ ID NO: 249 - DNA, 2780 bp, Homo sapiens
tctccggggcgtggcgaagaggggcggagtcacgagcggggcggtgagacttcctgcccagtcgcgggccagcctagcgcttcagccggcggctcatttccggtgggggcgccgcgcccagtgagggcccggaagtgggtcgcgcggagattgctgggcggttcttgccggaagcggagagcggctgatcgcagtccggaggtggtccattatggctgacatgcaaaatctggtagaaagattggagagggcagtgggccgcctggaggcagtatctcatacctctgacatgcaccgtgggtatgcagacagtccttcaaaagcaggagcagctccatatgtgcaggcatttgactcgctgcttgctggtcctgtggcagagtacttgaagatcagtaaagagattgggggagacgtgcagaaacatgcggagatggtccacacaggtttgaagttggagcgagctctgttggttacagcttctcagtgtcaacagccagcagaaaataagctttccgatttgttggcacccatctcagagcagatcaaagaagtgataacctttcgggagaagaaccgaggcagcaagttgtttaatcacctgtcagctgtcagcgaaagtatccaggccctgggctgggtggctatggctcccaagcctggcccttatgtgaaagaaatgaatgatgccgccatgttttatacaaaccgagtcctcaaagagtacaaagatgtggataagaagcatgtagactgggtcaaagcttatttaagtatatggacagagctgcaggcttacattaaggagttccataccaccggactggcctggagcaaaacggggcctgtggcaaaagaactgagcggactgccatctggaccctctgccggatcaggtcctcctccccctccaccaggcccccctcctcccccagtctctaccagttcaggctcagatgagtctgcttcccgctcagcactgttcgcgcagattaatcagggggagagcattacacatgccctgaaacatgtatctgatgacatgaagactcacaagaaccctgccctgaaggctcagagtggtccagtacgcagtggccccaaaccattctctgcacctaaaccccaaaccagcccatcccccaaacgagccacaaagaaggagccagctgtacttgaactggagggcaagaagtggagagtggaaaatcaggaaaatgtttccaacctggtgattgaggacacagagctgaaacaggtggcttacatatacaagtgtgtcaacacgacattgcaaatcaagggcaaaattaactccattacagtagataactgtaagaaacttggcctggtattcgatgacgtggtgggcattgtggagataatcaacagtaaggatgtcaaagttcaggtaatgggtaaagtgccaaccatatccatcaacaaaacagatggctgccatgcttacctgagcaagaattccctggattgtgaaatagtcagtgccaaatcttccgagatgaatgtcctcattcctacagaaggcggtgactttaatgaattcccagttcctgagcagttcaagaccctatggaacgggcagaagttggtcaccacagtgacagaaattgctggataagcgaagtgccactgggttctttgccctcccttcacaccatgggataaatctgtatcaagacggttcttttctagatttcctctacctttttgctcttaaaactgcttctctgctctgagaagcacagctacctgccttcactgaaatatacctcaggctgaaatttggggtgggatagcaggtcagttgatcttctgcaggaaggtgcagcttttccatatcagctcaaccacgccgccagtccattcttaaggaactgccgactaggactgatgatgcattttagctttgagcttttgggggttattctaccaacaaacagtccattggaaagaaaacagtccctggaattaacagatcagaatgttcacactggttaatctttttttaacaatgagcatgaaggtagcagaagctggtgtgtttccagatggttcttctaaccaaactaatttttcactgttgacaagcgaggcaagggttgcactggaccaaaggctgaggcttggccatctagcattccatacaaaattgtttcctataagcattccttttattctctattctatcctgggtctgcctcaaccgtgagataggagagtctctggtactagctgctgtagcagtgcccttcatccagggcagttaatggagtcttggaccctttctttctctgggatccctgcccagcaccttcctatagagatgactttaaaaggaaaaaaaaaaaaaaaaaaacccacatgatttcaaggagtctggcattcctgaatccttcttccctgccaggtgcctgtcacctgtcttcactgcctccttttccctgtcatgctcatcagcttatggcttctgtctaagcacctgaacagaggactgaaacctccactgcaggctggttttaggtcttgaattatgtaagaatcttgcacagcactgctaatgtaaatttcagttgtttttccctctaggacaaacacttaccaaaatatgcaacttttttttggtgggaagagagattgtcctgtgatttctacccatttcctgaggcctgtggaaataaacctttatgtacttaaagttatacagaaaatagaataaagttaataccaaacttgcaaaaaaaaaaaaaaaaaaaaaaaaa

SEQ ID NO: 250 - DNA, 5747 bp, Homo sapiens
ggtgagagaggccgggggcggggccgtgcggccggggacctgttgatcgcaggtatagccggctggcccgggctccctcgggactggggcgactgcgcatgctcgctggccgcgctgggccagtagccgagccgcggtgacgaaccggctccgcggttgcggtgtttgcggttgctgtgatggcgatgtgagggggcccggggcgggatggtgctgacccgggtcgggccgtcttcttgcagctggacaacgagctcctccgttcgacaggcgggggaagaggccgagccgggcgagagggttgaagatcaactggattatgtatttggttctggaatctcaaagcagtccacaaacaaattcttccttatgttgtctgtgtcagggggaacggtgtatttttaacaacgggaatcagtaactggaagtacaagattggttatttaataatgttaaaaatgaggctttgaaaagcagaggtgctgttatcagaatagtcttctgggtataaattaaaaatgactgaagttcaagcaatggtagaattctctgtggagctaaacaagttctacaatgtggatttgtttcagagaggtttttaccagattcgtgcttctatgaaaattccatcaagaattccccacagagtagaagctagtttgttgcatgcaacaggtatgactttagcctttccagcctcagttcatgattctctaatttgcagtaaaacatttcaaattttgtacaaaaatgaagaggttgttttaaatgatgttatgatcttcaaagtaaaaatgctattggatgaaagaaagattgaagaaacccttgaggaaatgaattttctattatccttggatctacacttcacagatggagattattcggcagatgatctgaatgccttgcaactaataagtagccgaacattgaagctgcactttagcccccatagaggccttcatcatcatgttaatgttatgtttgattacttccacctttctgttgtgtctgttacagttcatgcatcattggttgcactacaccagccactaataagctttcctcgccctgtgaagacaacttggttaaatagaaatgcaccagcacaaaacaaagattccgtgattcctactcttgaaagtgtggtctttggtattaactacacaaaacagttatcaccagatggttgtagcttcatcattgcagactccttcctacatcatgcgtatcgttttcattatacactttgtgccactttgctgctagccttcaagggattgcacagctacttcattacagtaacagaagagattccttcttgtcagaaactagaactggaggaaatggatgtagaagctcgacttactgaactatgtgaagaagttaagaaaatagagaatcctgatgaactggcagaacttataaatatgaatcttgcgcaactttgctcacttttgatggctttatggggacagtttctggaagttataacgctacacgaagaactaagaatattattagcacaagagcaccatactttgagggtacgcagattttctgaggcattcttttgttttgagcatccaagagaagctgccattgcataccaggaacttcatgctcagagtcatctacagatgtgcaccgctatcaaaaatacttccttctgcagttctcttccacccttacctattgaatgtagtgaattagatggagatctcaattcattacctataatctttgaagataggtatttagattcagttactgaaggtaaacttgatatctcccaggacgatagtgaaattacacaaatggaacacaatctggcatccagaaggtcatcagacgattgccatgatcatcaaacaaccccatctttgggagttagaacaattgaaataaagcccagtaataaagatcctttcagtggagagaatataactgtcaaactaggaccttggacagagcttcgacaagaggaaatacttgtggataatttactacccaactttgagtccttagaatctaatggtaaatctaaatctatagaaataacatttgaaaaggaagctttgcaagaagcaaagtgtctttctattggagaatcattaactaaattacgaagtaatctacctgccccttctacaaaagaatatcatgttgtagtaagtggagatacaattaagttaccagatattagtgccacatatgcctcatctagattttcagattcaggtgttgaaagtgaaccgagttcttttgcgacacatccaaacactgatttagtctttgaaactgtgcaagggcaaggtccttgcaatagtgaaagattatttcctcagcttttgatgaaacctgattataatgtaaaattttcattaggaaatcattgtactgagagtacaagtgctataagtgaaatacagtcatctttgacatccataaactctctaccctccgatgatgaactgtcacctgatgaaaattctaagaaatctgttgtacctgaatgccatctaaatgatagcaaaactgtattaaatctaggaacgactgatttgccaaaatgtgatgatactaaaaagtcaagtatcactttgcaacagcagagtgttgtattttcagggaacttggacaatgaaactgtagcaatacattccttaaattcaagcattaaagaccctttacaatttgttttttcagatgaagagacttccagtgatgtgaaaagtagttgcagctccaaacctaacttggatactatgtgtaaaggcttccagagtcctgataaatctaataactctacagggacagcaattacattaaattcaaaactgatttgtttaggcactccttgtgtcatttcaggttccatttctagtaatacagatgttagtgaagatagaactatgaaaaaaaatagtgatgtattaaatctcacacagatgtattcagaaatccctacagttgaaagtgaaactcatctgggtacaagtgatcctttttcagccagtactgatatagtaaagcaagggcttgtggaaaattattttggttctcaaagcagtacggatatttctgacacatgtgctgttagctacagcaatgcacttagccctcagaaggaaacttctgaaaaagaaattagtaatcttcagcaggaacaggataaagaggatgaggaggaagagcaggatcaacaaatggttcaaaatgggtactatgaagaaacagattattcagctttggatggaacaataaatgctcactatacaagcagagatgaactaatggaagaaagacttacaaaatctgaaaaaataaacagtgactatctgagagatggtataaacatgcctactgtctgtacttctggttgtttgtccttcccgtctgcaccacgagagtctccttgtaatgttaaatattcttccaaaagtaaatttgatgccattacaaagcagccaagcagtacttcttacaacttcacttcttcgatttcctggtatgaaagttcaccaaaacctcaaatacaagccttccttcaggcaaaagaagaactgaagctactaaaacttcctgggttcatgtacagtgaagttcctctgctggcatcctcagtaccttattttagtgtagaagaagaggatggttctgaagatggagtacatctgattgtctgtgtgcacggtttagatggaaacagtgcagatctccgattagtaaaaacttacattgaacttggattgcctgggggaagaattgattttcttatgtctgagagaaatcagaatgatacttttgctgattttgatagcatgactgatcgtcttttggatgagataatacagtatattcagatatatagtctaacagtctcaaaaataagctttattggacattcgttgggcaatttaataattcgttcagtgcttacaaggccaaggtttaaatattacctcaacaaacttcatacctttctgtctctttctggacctcaccttggtacactctacaacagcagtgctcttgttaatacaggtctctggtttatgcagaaatggaaaaaatcaggttcgcttttgcagctgacatgtcgagatcactcagaccctcgccaaacttttttatataagcttagtaacaaagcagggcttcattatttcaaaaatgttgtgctagtgggatccctacaggatcgctatgttccttatcactctgcccgcattgaaatgtgtaaaacagctttaaaggacaaacagtcaggacagatctattcagaaatgatccacaacttgcttcgacccgttctgcaaagcaaggactgtaatttggttcgctataatgtcatcaatgcattgcccaatacagctgattcactcattgggagagctgcacatatagctgttcttgattcggaaatatttttagagaaattctttctggttgctgccctcaaatatttccaatagtataaaagcattgttagcgactggacaattacctcattcaacaatgtttcaaataatgtattatattaaaatgtagatgctgataagttctaagaaatatttatacctttttatatggaagataatttatatcatccatgtttagtgctttttaaacatcaactttactttctaggtaatgtggctgtgcaatatttttttaattttatctttttacttttctattactttttcatatattttgctacctaagtatttcagtgaaactttaagcccatacctgtgtctgattgtttattattggctttccacaattcttacatcagactacattatattagagaccattattgctagaatagcatgggatttaaaattttctaatactgggggtattatttagttaattataaatttttcttttcacattttactgtgttttaactggaaataaaattatggctgctacaatatattttttgaaatcaacttctgtagttctaaaatacaactttatcatacaatcaaaccaggtagttcatataaaacagtgtaatacaagttttctataaagtcattactgttgcttaaacatatttcatgcctattaaaatatattttctactggtgatttcaacattatttctcatactgacttttattactggaaatgttcctgtacatgttggcagcagataaagatttttgaatgtttgaatgccctctgccttgatttggttggaatttttgctaaattggtaatgttgcttgaactttatgactacattttcttttaacttttttcatggacttccttatatgtacataataattaaatgttgaaatttatgaaatacttttatgaatttagataatttttaaatattgttaaaatttattgaactaaaaagtaatgtaaataaaataattcatgttaaagatggaacaaaataattaactttacatgtttggtgatacagatgcaaatgtttttgatatatggagatgttgagtcttttgactttactaaaggtgctgaatagcattaaattcactattttccttttctgttttacttgtgaaaataaaaatgcactaaggttgggtagaagttctgtttgcactcactaattgtgacagacagaggtttttgtaagtatttattgtacaattgatgcatgtttatttttagcgttgttattgcctctggtgttaataaatgaacaaatggctatctggaggaacagctacaaaaaaaaaaaaaaaaaa

SEQ ID NO: 251 - DNA, 9958 bp, Homo sapiens
cggtccgttgttcatttgccattcgacctccgccagggcctggtcggacggaaacgctccgccggctttattgtcgcttcgttatgtggcggagccgagcagtttagcgtgcctctcaccctcagcgcctgcgaagccggcggcggcgtcgggactcctcggcgcgcggaggaaggatatctgtgtggaggatcggtgtgtgcgcgcgcggctttaaagagggggcagcggagggtctccccgcactccgctgctcaacttcgaaggcctcgctcgctgcaggctcgctcctcacctctccgccgcccgcccccttctccgcgcgggacgctgcccggagcgcggcggggcgggggtggaggacgagagagcggtcggaggcgtcggcccggcagcggcagcggcagcggacgcgtgcagcagacccgggagcgagcgcgagccgggctgccgggcgagagggcgaggccgagccccgcgagaccggaacgccgggggcgggggcgagacagagggggagccgcggggagcgcgcgggacgcggcccgaggccgtgcgcgagccggggcaccgggcggcggcggcggcggcgcgcgccatgtcgttcagtgaaatgaaccgcaggacgctggcgttccgaggaggcgggttggtcaccgctagcggcggcggctccacgaacaataacgctggcggggaggcctcagcttggcctccgcagccccagccgagacagcccccgccgccagcgccgcccgcgcttcagccgcctaatgggcggggggccgacgaggaagtggaattggagggcctggagccccaagacctggaggcctccgccgggccggccgccggcgccgccgaggaagccaaggagttgctgctcccccaagacgcgggcggccccacctcgcttggcggtggcgcggggggccccctgctagcggaaaggaaccgtcggactctggccttccgaggcggcggcggcgggggtctcggcaacaatggcagtagccgcggccgccccgagacctcggtgtggcccttgaggcatttcaatgggcgagggccggcgactgtggatctggagctggacgcgctggaggggaaggagttgatgcaggacggcgcgtccctgagcgacagcaccgaggacgaggaggagggggcgagcctgggcgacggcagcggggcggaaggcggcagctgcagcagcagcaggcggtcgggcggcgatggcggggacgaagtggagggcagcggtgtgggagctggcgaaggagagactgtccagcacttcccgctcgcgcggcccaagtctctaatgcagaagctccaatgctccttccagacctcctggctcaaggactttccctggctgcgctattccaaggatactggtcttatgtcttgcggctggtgccaaaagacccctgcagatgggggaagcgtggaccttcccccagtggggcatgatgagctttcgcgagggacccgcaactacaagaaaaccctcctcctgaggcaccacgtctctaccgagcacaaactccacgaagccaacgcccaggagtcagaaataccatcagaggaggggtactgtgactttaatagtaggccaaatgagaactcttattgctatcaacttctgcgacaactaaatgaacagagaaagaaaggtattctttgtgatgtcagcattgtggtaagcggaaaaatcttcaaagctcataagaacatcctggttgcaggcagccgtttctttaagactttatattgcttttcaaacaaagaaagccctaaccaaaacaatactacccacttagatattgctgcagttcaaggtttttcagtcatcttggacttcttgtattctggtaacctggtgctcacaagccaaaatgccattgaagttatgaccgtggccagctatcttcaaatgagtgaagttgttcaaacttgccgaaatttcattaaagatgccttaaatataagcattaaatcagaagctccagagtctgtagttgtggactataataatagaaaaccagttaatagagatggtctgtcttcatcacgggatcaaaaaattgccagtttttgggcaacacggaatcttaccaatttggcaagtaatgtaaagattgaaaatgatggttgtaatgtcgacgagggccaaatagaaaactaccaaatgaatgacagtagttgggtccaggatggatctcctgaaatggctgaaaatgaatctgaaggtcaaacaaaagtgtttatttggaataatatgggctcccagggaattcaagagactggcaaaacaaggaggaaaaaccaaactacaaaaagatttatttataatattccacctaataatgaaacgaatttagaagattgctcagtaatgcagccacctgttgcctatccagaagaaaatacactactcatcaaggaagaaccagatttagatggtgctctactctcggggccagatggtgataggaatgtgaatgcaaatttattggctgaagctggcactagtcaagatggaggtgatgctggtacttcacatgatttcaagtatggtttgatgcctggtccttcaaatgatttcaagtatggattgataccaggtacttcaaatgatttcaagtatggattgataccaggtgcttcaaatgatttcaagtatggattattgccagaatcttggccaaaacaagaaacctgggaaaatggtgaatcatctctaatcatgaacaagttaaaatgccctcattgtagctatgtagccaaatacagacgaacactaaaaaggcacttgctcattcacacaggagtgagatcatttagctgtgatatttgtggaaaactgtttactcgaagagaacatgtaaaaagacattccctggtgcataaaaaggataaaaaatacaaatgtatggtgtgtaagaagatcttcatgttagcagccagtgttggaataagacatggatctcgacgttatggtgtttgtgtagactgtgcagataaatcacagccaggagggcaagaaggtgtagatcagggacaggatacagaattccctcgggatgaagaatacgaggagaatgaagtaggagaagctgatgaagagctagttgatgatggagaagatcagaatgatccctctcgatgggatgaatcaggagaagtttgtatgtctctagatgattaactgacctactatactcctcaaggatgctgcatttggacctaatatgaatcgacaatttggattgttgaacttgaaggcttgcaaaatatggtacatgctggatagtagttatgttgctgtgaaaactgtagggtcaaagccttatagcaaaaaaaatttttttttatatttgcacaggactatacagcaaacaaccatgtggttggattacatggagtccccacatactcagtcagttatcaaagtaaaatattttttatttataggatatacagtaactatttgggtcctatgaaaatagtccttaaagagcttacattcatgtgctactttaacatgaatggagaaaatccgtttatggaagtacagtgacaattgacccaatcactctgtccatcaaaccactcaggctagtttgtactagtagagttttgtttctatttttatttttattaattttattttttttaatacagattttcagtgaggggctttttcaaccccattggttctattttcttgtatttttccatttaatttgcttcataacttaaaccaagtctcttctagtcttaggtattatttctcgattttgtgctgatgggcatgtttataagaactggagaggtaatttattggaatgaactaactgacttcctccattcccctcttcctttttgacatgaattttactacttcacaaatgaagaatgatgttatgaagttaccgtggcgaagttgacaaataccactaaaatgattatgatttagaagtaactttcttctgctgctctaatctgataaatggttactatatgatattttctgacatggtatttggttttgggtatctgttactttggcactattcttgtttgcctctttatttttgccagtgtactatacctcagtcctatttgaaagacctaattgaaagaaaaatcatagaaataagtaaaatgatttgttttataatttatccaccatgtccagtttggttagcttgttatgcaatataagtgaaatatcaggtttttacccgtgtcccttttatcatgaaaattaacacaaaatgtgcattctcttttgtttcatacttagcgggatattgattgttttgaaattatgatcaatacttaatttatttttttctgtccttgaagtcactacaccttgatacagtctttctagtagtcaccatgattcaacagtctcaaaaatcttacaaataaaattctgagaagctttattattctataaattcttcagggtacaaagggtgacatattgaggtgaaattgtcagatttacttagcctggtgacatgaattagctgattgtggaactctcagcagcatttcacgtattgttaacatgtatggcatttattagcatattgtatattatataagattgagggatgtcatattttcagctttcttttaaataaaaattgagtatattttcctattttatatcaggtaactaaattatgctagttatgtggaaaaaattgcaaagatgctttgacagatataatccctttggtgctccatctgatcaaagttgaaaagttgatgttttttaagagacaagctttatcattgtctctgatttcagtagaataatggtttattgttagacaatgatgtttctgcttggataaatcaaagataaattacagttacatggttagatgcatcttttgtcatctatattgtagtttctacataactgtaaacctgacagataagaatagtttcggtttgatttttgtttaaaacagatgagtacttcttaatgttctagacaaatgagtaaaatgtatttctggtagaaattagttgggcaaagatactatgaatgaaaaagtattttaaacgtaaaatgttctttgtgaatatgtaagtatagtataaagatttctttcatcccatttatccccttcctttaaataaactagtttacaattggtagatctgtctatatataaatatatattaaagaacaaagatatatatctaaaaatcacctaaatctgctttattagactacagttcacttattgcatagaaactggacttggctttacattcttaatgtacttttacttttcctcaagatatgaacttactctcttgaagctgaattttcttttactacttaaatcatttatgtatatctggtaaattatgaccaaatttttgttagattgcatacagtaaattgaaatacacacttggtacactacgggattgttgtgcttttgtttggttttagttggaaataaggtttgatgtagatggcttgttactgttaatttaaaatattctataattgtccattactttatgttgtgttgtgacagatttggctatatttttagtcaattgaaatatgatactttaaaagtttgtttttaggtaatccaaaggaaaagtgtttatactcttgaatatattagcctcagcctatataaaaatttctttgaagtaaacattttaccggaaacagaattgacagatttttctacttgctgactgcctaacttattttgtttcatgatctcgagggactgccttttcccatctagatcttttaaaaaaatagttttagtactaaggtatactactggacatttctatttttttaagtgtattctttttctgacttacagtaaaatttcaggaagttgatagatactaagaacttatgattggtctcagaggtaacaatgaaatactcataattttgtctgtggaactctggcagaattatgttacacatttggcgaagttgtctcttgtaatttatattttaaatgaaaaagtattttagagcttttaatgaaggggaagagtataaactttctttcatattcactctgtagttacagaccgtctcataaatcaagattgtgcattattagagttctcagagacagatacttccatatggacccctgttcatttttcttatttactagatattttgctaaatttagcacactagcaattaagagtttaaaaaagaagaaacgttataggaaagggaaactgaacagtaatgagtagctttgaaattggggaaaacacactagctgggttaggtacagctatcctaatggagaagagtgagctaaatgcgttaattcatgtaaagtgcttagaacactggtacataataggtgcataacacatcttaaagttgtttaataatagataagaaccaagaggaaaaagaaataagaaaagatgggggaaaggaaggagaaaataggaaatgaaaggattaggacttgggcatttatattaatacaaaatggtgtaaacggcctgaatatcactgtagtagtatcatacgggggaaagtgtgatggaaaataggtttaaaaatcttaatttttaaaactttagtaagctttatttatattttttaggattttctgaacatagcatgaagggtttagattcatttttctgaaaaacgattaaaaaaactaccaattttttttttgagtgcccacacttgccgttgtgctgtatacatgattttaccttaatcctctataaggtaggtgctaattgtctccattttatagatgaggaaaggctcagagaaattcagaaacttggctaatttaacacagctgtgacagagctcgaatttgaccacgtctgattctgaagcccatactctttcagggaggctctattgctgcctcattaaacaactcttgtagaatttcagctcttaatggagtctatggattatatttttcctataagacagctgtgtttagaattttgagtgtctttcctccccccaataaatttccttactactctttcttcataaagcagttgttttgtcactttgactatattaagacacatcagtgtagcacatgctcttaactggctgtggcattttaattttataaaagaatggtttttatctgaagaactagatagaaaccccagtttttgtgccgttcagtcacccagatccttaaacttaactatggtacataatatccacacttagaactaacaggtgtttagtcactttaggacttaaaatggaaagtttttttttttttcctgctgtatctctgctttcaactgaagttaaagaattctagatagtttaaaatgtgttagggataagcacacttcaaaagatgttttctagccctaaattttatgacattgggtacttaaatttggagtacactagctattgagaacaatattttgggttgaggagagatggttgaggccattatttagtgggagcattggcattttgaacactgtaaacaaaagaacacttccgcctgctgtttgtaaaagctctttgggaagatcttttacgaagaccaactttttaaaatgtaaattacctacctaatataagtgtcctaagacatgtatgtaaacttccggaactgttttgtctgtgtatttagaaaatacacaagaatctttattcaaacctaaaaatataaacttgtgagcactaaactgcttctggctttgtgaattttattgactgacatttaattcagatttctttgcaagtgtactaatttagactaattggggtaaggggaacaccttaatgaactttgacttatgtataattcagatatctttgtacttaaggcttacaagtttgaattatggaatactataagggttttttgtttatttgtatgtttttatatgaaagtacataaatgacagactacctccaagtaatcctgctttaattaatagcagtgatttgtaatcagtgtatcttttaagattctctacaggttttagaaaatattaaaaattccctgtaatttacatttgtgcataatcttggaaatgggttgaaaagcaaaggtaaactgcttcatcccatgttgtatatttgtggactgattgactacaagtgatgtgatgttataaatttgaagtctttgaaactttattaatgtagagaaaacataactagctttttaggttatttcaaagttagtaatagagcaaaggaaatcagaactggccagatattcagacttgacttagaaaaacaggagtttgttgattttgtttggagaagggcacaataaaggggagcccacatagcattataatgcctagtatctttaaacatgtaaagagctatcatgaggcagaagaattaagaaactttatatgtttctaaggggtcatgattgggaccattggctcaagattgaaaatcggtttttaattatccaaagatgaaatggggctgcttcagaaaaaggtctaccactggagataacgctatgaaaagtgaaagagattacttaatcattttgacaaaggcagtattgaccagacatttctatttcagagttggatttgtgcttagttttttttaggtgttgggacccttgtagttgctttttattttgcttagtcaacaaacactaaaatgataaaatttggtatgtataagtactggacgaaggatgttttgacactaaaaaggacataatttaggaaattaagaatttagacaccaagtttggcttaatagaaaaagtcactatctgaacttctttctttttcaccacaaatcaccgcagaccagtgtttgggagcaggtgtaggaaattgaattattggatctatgtttaggtaagaaaactaaaggtacttcagaatttaggctatgacataactgtctttctgaagtttaaagaaagaaagtgaactatagaaatctattcagctaattaaagtgaatgaaaaatattacagattccataactgcatggcgccttacctgctattaatactgccgccttactgtcagccagatgattttttcccaccacggccagtcttaaatttggcaataagaaaaagctaatcttccaagtgtaagtaggtatgtgttagaatcttggtgaaagataaacacaagacagtcttcttggcgcaggtcctaacagttggtgagataatacataagatggtttcaggattattgtagaattatttaggttgaaagagactgtaagagactaatgaagcatacccagagaggttgctacagtgactccagtcagttttaggacccaggactcctgaacttcaatttcagtattatttttctgtaccaaactcattcaataaatacttgagattagggataagtttgaagttagaagattccagagtacactcaaatagtatttggcacatagcttgttgatcaaaagtatttactaagtgagtgacaaaaggcactagcaactttaaggattttgcctattagtatcatatggcatgtagctatcaagccagtttcgtttagttattttgtgttgccaagcatatgatacgtggtgtcacactgagcctttgggatcctttccctggatacataaccctagtagataatgttactgcaagatgtaatgaccaaatccaacctactgcaaatgttactatggaaatctcaatgcaaaagtagcctttgtgattttttttttaaaccgtctccataacagaacacttagaattattagccatttgctgcaaagtatttgttttaaaatgtctggcatatacaccactaacatttaaatgcccaacattcggtctatacgtgaaaaaactagaagaaaagccctgttggagttttgatgtagagtgcaataatacatcaataaaggtattttaaaatgaaaaaaaa

SEQ ID NO: 252 - DNA, 2514 bp, Homo sapiens
gtgcccaggcgccctctccgccgcgctccctggtggccgctcgctagagcacgcgcgccgcagacctagggtatttgcggatcagcgtcctcgcccatctcatcctccacactccgcccccacccacctgccccagctgctaagggtcttgacctttttcagaaacgtgcatcttttccagttctaattttgcacgcttgcacgtttaaagcaggagggatgaattcggtagtggataaatcagcaactttaggatagcttatgcagaaacgcgtgtattctctacttttccggcagtgatcggaagagctctcaaaattggcttcagcccaaagggctcagatgggaatggccaggacaccatccagcagctggaaaatgagcttcggggcacaaagtgggaaatggctcgtcatttgcgcgaataccaggacctcctcaacgtcaagatggctctggatatagaaatcgctgcgtacagaaaactcctggagggtgaagagactagatttagcacatttgcaggaagcatcactgggccactgtatacacaccgacccccaatcacaatatccagtaagattcagaaacccaaggtggaagctcccaagcttaaggtccaacacaaatttgtcgaggagatcatagaggaaaccaaagtggaggatgagaagtcagaaatggaagaggccctgacagccattacagaggaattggccgtttccatgaaggaagagaagaaagaagcagcagaagaaaaggaagaggaacccgaagctgaagaagaagaagtagctgccaaaaagtctccagtgaaagcaactgcacctgaagttaaagaagaggaaggggaaaaggaggaagaagaaggccaggaagaagaggaggaagaagatgagggagctaagtcagaccaagccgaagagggaggatccgagaaggaaggctctagtgaaaaagaggaaggtgagcaggaagaaggagaaacagaagctgaagctgaaggagaggaagccgaagctaaagaggaaaagaaagtggaggaaaagagtgaggaagtggctaccaaggaggagctggtggcagatgccaaggtggaaaagccagaaaaagccaagtctcctgtgccaaaatcaccagtggaagagaaaggcaagtctcctgtgcccaagtcaccagtggaagagaaaggcaagtctcctgtgcccaagtcaccagtggaagagaaaggcaagtctcctgtgccgaaatcaccagtggaagagaaaggcaagtctcctgtgtcaaaatcaccagtggaagagaaagccaaatctcctgtgccaaaatcaccagtggaagaggcaaagtcaaaagcagaagtggggaaaggtgaacagaaagaggaagaagaaaaggaagtcaaggaagctcccaaggaagagaaggtagagaaaaaggaagagaaaccaaaggatgtgccagagaagaagaaagctgagtcccctgtaaaggaggaagctgtggcagaggtggtcaccatcaccaaatcggtaaaggtgcacttggagaaagagaccaaagaagaggggaagccactgcagcaggagaaagagaaggagaaagcgggaggagagggaggaagtgaggaggaagggagtgataaaggtgccaagggatccaggaaggaagacatagctgtcaatggggaggtagaaggaaaagaggaggtagagcaggagaccaaggaaaaaggcagtgggagggaagaggagaaaggcgttgtcaccaatggcctagacttgagcccagcagatgaaaagaaggggggtgataaaagtgaggagaaagtggtggtgaccaaaacggtagaaaaaatcaccagtgaggggggagatggtgctaccaaatacatcactaaatctgtaaccgtcactcaaaaggttgaagagcatgaagagacctttgaggagaaactagtgtctactaaaaaggtagaaaaagtcacttcacacgccatagtaaaggaagtcacccagagtgactaagatttgagtccattgcaaaaggttaagccatatgacaatttcaaaatgcatgtgattggcagcttcaaaacagaacgggttctcccatgggggctccagacattgtattttactttgtgcaatatgaggggactgcatgcaagctcagggtgctccctcctcagtctttgggggattcaaatgcatgatattgtatgtacctgggaaatttgccgatttcctaagctgttggaagggggtcacttaaggggggatgtcttgagatgtattatgcaaagtaccaactgagccaaaaacaataaacgaaacacagaactcagccttaagaaagctatatatgaataattatgtttacctcactggtgcatttaaaatggacttttgttcatgggagaacctcgttgacatgcacagtttgcaatcttatgttgatcgatgttaaacgtcacagcagtacttgctcaataaaggtcatattggaaacata

SEQ ID NO: 253 - DNA, 5743 bp, Homo sapiens
ggcgccggcggttggcactgacaggggcggtgagcgagccgctccggtctccgggcgaggcttggccttccgagcagagacggcgggaagcggcggcggcagcggcggccctagggccggctggtgaggcgatggcggcgccggccccgggggctggggcagcctcgggcggcgctggctgtagcggcggcggcgcgggcgcgggcgcgggctcgggctctggggccgcgggggccgggggccggctgcccagccgggtgctggagttggtgttctcttacctggagctgtccgagctgcggagctgcgccctggtgtgcaagcactggtaccgctgcctgcacggcgatgagaacagcgaggtgtggcggagcctgtgcgcccgcagcctggcagaagaggctctgcgcacggacatcctgtgcaacctgcccagctacaaggccaagatacgtgcttttcaacatgccttcagcactaatgactgctccaggaatgtctacattaagaagaatggctttactttacatcgaaaccccattgctcagagcactgatggtgcaaggaccaagattggtttcagtgagggccgccatgcatgggaagtgtggtgggagggccctctgggcactgtggcagtgattggaattgccacaaaacgggcccccatgcagtgccaaggttatgtggcattgctgggcagtgatgaccagagctggggctggaatctggtggacaataatctactacataatggagaagtcaatggcagttttccacagtgcaacaacgcaccaaaatatcagataggagaaagaattcgagtcatcttggacatggaagataagactttagcttttgaacgtggatatgagttcctgggggttgcttttagaggacttccaaaggtctgcttatacccagcagtttctgctgtatatggcaacacagaagtgactttggtttaccttggaaaacctttggacggatgacagtggctttcttgtgatgacagacagaatggaggagagatctgcttatgggaagtagaaccatgaagtgactgtcacacatgcatgtccaagaaacatcctgaaaacacatgaagtcgtaaactggagaagcagctctacagcagagattatcttcgtgtttcctctttctactgggccagaaaaatcctcagggttgcagttggttgagtgggcagttgacatatgcatgttgcacccgatgttgtctctaagttagcaatgtgttatttccagctttaaaggtgagattgtagagatgctgtcaaagggataaggaaatagcaagatttttaagtagtgtgtttgtgaagactgatcccattttacaactgcctgttctttctccagtccttttttttccagccagcttgactattagaaaagtatgaaactggttgggttttatttaatatttttaatatattgagaagcatggtctgcctggactgcacttctctaaaagtgagatataaaattgtgcagctattttaaaagttgtatataatatgtgtgtaaaaaaaaaaaactgtaaaaaagaaaggacaaacaggttgttttgttctagttctaatttcttaaaaaccactacatggttacaaaattggaataacatttggggacaactgggttaactacaaagaagaggattttaagaggagatgtgttgtattgactcattttgtattatttttggcttacagttcccatagctgttagagtctggtttgtttttgtttttactctcaaaatcatagtaaagatctctcagtctcctggctaaagattgaaggaaggcaaatctatttctaattatacatatatcagtaaggatgatctcaacataatagtaatgtgtatcttttggtatccagttttatttttggccttctaagaaagtgtctcataacacagaacattgccatttgctcttgtaggcctcaaatatgaaagctattagtcatagagcctaggaaaaaaagaattgattaatggtccttttattttgtaaccttataaatgctgtagatattatcaaaaaaattttaatttcatattgtttacatcatgcaactaatctaagcctcaaactcgttattggggctataaagaaaacgtttacttacccagctgaaacaggttaagaatattcttaatctcattatagataattgcccccatgggacttgaaatacaacaccttgtgctgaaaacttcaggttggcaatatttgaaggtttcgttgtagaagagtttaacattaactcctattttgacttacaaatcttgtttctcatcactaaaatgcttttgaattaataatccaacccacatgagctgagagtttttcttttgttagaaaagaaacagacatctttctgtatgaaagtataaattgtatggttttagatacataagaattgacaaaagcgagcgaaatctttgtacttctgagttcttgctgtatgtatgttttgttttaaatctgattagggacacccagcagctggccgggattcttggattgctccttgggagttaagattgtcaatactcctgtgaagcaagggatttcagccatagaacaaagatttattgttgccacctgaaaagtttacaagtatttattgtgtatttgatacattgcttgaaaagatgaaatctgttaaagattcttttcgatgtccaggttaagaagaaacctccttgtattgagtgaaattatatgttaaatgtattagagaatgtaggtggtatagaaattgatttttcttggtgtagaacaactcagttcggcaaagtttaaaatttgattaaacaagagaagtggttcaggttgaagatggacttgttaggaagtgatcaagtcctttaagtacttgtttctttttcaggttgtgatgtggccattccgaattttgttgagagtttggtttataattgtctcttttgtcttgttagtaaacattcatttgcaacagttttgaaggtgctgagtggaaaaccgaaacacatggttattgcgtattggacctagaatgaaataattgcctcaatatttaacaacaagccattcttatctcaaagatttaaattcccgaatgtcccattcgcaaatcatatgcaattgaagtgagcagcatgagcatctgggtcatgagggccttcatttacgtaaatttgtcactaaaacccagtagtagctctacaaaatcttaaactgctgcagtgctcaaggagatggaatatctttgtcattggtgctgaggagagcatttcggtagaagacagttgcgcctgaagattgagtgtaaatcattcaaaccagtggttctcagtgttggctgtatacactttgtagtcactttggaatgttggaagacacatcgatgcttgggttccgtatgccaagattctgatgttggtctggaatatgagctggtcataaggatttttaaaaactttctggtcatttcaatatgctgccaaggttgagaaccactgttgtaaaattcaccttgagttttctcatctgcaaaatagaaaaaaaaaaatccttgctccctcccttcactacctcacaaggatattgagggtaaaggagaaaataatgggaaagtgcttgtgccgtggatgaaaagtgctattaaaagtcaaaggagtgttctgtttcaattcatagtatgatcagggaaagtgtaactgagtatactttgttgacttgggaaacctggagcactttctttggttggttaacgaagcatgcagatgtggaagcagacgttactattatccctactatggtcttctgtcatactgagacaggctgttttaattacctggttttacataggaaagaagaaatattaaggcttaaagtttgtaatgatcaatggctcataattcattaaatcttttcatacaaggaatttgtggttaatgtcatttcatagttgccattattttctcattatttgacttaaatgttaagccatttatttcatctccctcattcacataaagtgtagatatggattcaataagacaccaaaagaaagtaagatttacccagttaatatttaaaatcattgttcagtgattaggcattttctgccttttagaattatttgactggagaaagagtttcaaaaatagcagagccctaaaccataaagaaactactactgtataatgaacttttgtttgtttttggagacagggtttcactctactgcctaggcaggtcttgaactcctgggctcaagcagtcttcctgcctcagcctcccaagtagctgggattacaggtgtatgccactatacccagctttaacttttaaatccccaaactatgtagattgtcatattaatattaatttttttttgttattttgaagaagtgagtaatttgaagagatagaaacttagggagtggtgtgtgtgtttcttttttggagacagagtcacgcaggctggagtgcacgatcttgactcactgcaacctttgccacccaggttcaagcaattctcgtgcctcagcctcccgagtagcatgtgccaccacacctggctaatttttttcttttttcttttagacggagtcttgctctgttgcccaggctggagtgcggtggtgtgatctcagttcactgcaacctttgcctcccgggttcaagtgattctcctgcctcagtctcccgagtagctgggattacaggcacctgccaccatgcctggctaatttttgtatttttaatagagacggggtttcaccatgttggccaggctggtctcgaactcctgaccttgtgatccacccacctcagcctcccaaagtgctgggattacaggcatgagccactgttcccgggcctaatctttgtatttttagtagagggggtttatgccatgttggccaggctggtcttgaactcctggccaacaccacccacctcgcctcccaaagtgctggggttacaggcgcgagccaccgtgccaggccagaaatttaaggagttttaaaggttagcattgaaaagattactttccagaaattgagaccaccacagttccacaattgggactgtggtagataatcaggaccacttggaagcctttattaggaacagcccacacccagcccaaatgctgtcctcaaaaacattcctcagtttctctagctgaatgtaatctctccttgaaatttccctagttttatatatctatagttgactcatgctgtatttatttataccttgtttaaaattatttattgattatttattggtgtcatatcgcccctaaactgggacaggatctctaacggactcatctttgtgccacaacatgtaagcccaataggcaggtgctcacatatttgctgaaggaacagagaaagaactgcggagaaagacaaaagctcctctgaagttttagactatagaagcaaaaattatagtagcaaaagatgaatgagaaattctgttctagtcccagtgaagcaggaaggaaagggttgcaaacttgaggctggtaaggaagaaataattactgtgaatgcatttagccactcccctctactcaaaaatactggtaaactctgatttttatatttgtttagaatttaaattagaattctgtatctttattttttggaattctgttgttttgccttagtttcttaataaaaagttaaacattaaaaaaaaaaaa

SEQ ID NO: 254 - DNA, 11373 bp, Homo sapiens
gtgcgcggggcggcgccgcggaacatgacggcgccctgggtggccctcgccctcctctggggatcgctgtgcgccggctctgggcgtggggaggctgagacacgggagtgcatctactacaacgccaactgggagctggagcgcaccaaccagagcggcctggagcgctgcgaaggcgagcaggacaagcggctgcactgctacgcctcctggcgcaacagctctggcaccatcgagctcgtgaagaagggctgctggctagatgacttcaactgctacgataggcaggagtgtgtggccactgaggagaacccccaggtgtacttctgctgctgtgaaggcaacttctgcaacgaacgcttcactcatttgccagaggctgggggcccggaagtcacgtacgagccacccccgacagcccccaccctgctcacggtgctggcctactcactgctgcccatcgggggcctttccctcatcgtcctgctggccttttggatgtaccggcatcgcaagcccccctacggtcatgtggacatccatgaggaccctgggcctccaccaccatcccctctggtgggcctgaagccactgcagctgctggagatcaaggctcgggggcgctttggctgtgtctggaaggcccagctcatgaatgactttgtagctgtcaagatcttcccactccaggacaagcagtcgtggcagagtgaacgggagatcttcagcacacctggcatgaagcacgagaacctgctacagttcattgctgccgagaagcgaggctccaacctcgaagtagagctgtggctcatcacggccttccatgacaagggctccctcacggattacctcaaggggaacatcatcacatggaacgaactgtgtcatgtagcagagacgatgtcacgaggcctctcatacctgcatgaggatgtgccctggtgccgtggcgagggccacaagccgtctattgcccacagggactttaaaagtaagaatgtattgctgaagagcgacctcacagccgtgctggctgactttggcttggctgttcgatttgagccagggaaacctccaggggacacccacggacaggtaggcacgagacggtacatggctcctgaggtgctcgagggagccatcaacttccagagagatgccttcctgcgcattgacatgtatgccatggggttggtgctgtgggagcttgtgtctcgctgcaaggctgcagacggacccgtggatgagtacatgctgccctttgaggaagagattggccagcacccttcgttggaggagctgcaggaggtggtggtgcacaagaagatgaggcccaccattaaagatcactggttgaaacacccgggcctggcccagctttgtgtgaccatcgaggagtgctgggaccatgatgcagaggctcgcttgtccgcgggctgtgtggaggagcgggtgtccctgattcggaggtcggtcaacggcactacctcggactgtctcgtttccctggtgacctctgtcaccaatgtggacctgccccctaaagagtcaagcatctaagcccaggacatgagtgtctgtccagactcagtggatctgaagaaaaaaggaaaaaaagttgtgttttgttttggaaatcccataaaaccaacaaacacataaaatgcagctgctattttaccttgactttttattattattattataattattataattattattattaatattattttttggattggatcagtttttaccagcatattgctctactgtatcacaaacagcggacacgtcagcaggcgttgaggtgctgagctgtggatgcagaaccagcgccatgctgaagagcctcagccacctcctgtcctttgggattcgtttttcccgctttctctttgtttgtcgtctcagaatctgtgacacaaagaaacccatctcctgtcttaggaaacctaatgctgcaaactctacctagaggaacctttgaagactgttacataagaacataccttcctcagaagaggagtttcctctgccctctgcccttctcccctgcctccctccctcccctccttttattttgttttagtgagcttaagaaacagcagatgtgtctttcacggatctaacgggtgttgtcctgatcgagaaaaaaactgggatgagaatggtttggactggagttggaaggggaggacggtactgggggtagggtttggaacagagctacactggactcgggcacattcggagcagcatcctttagtatggaggctacttctcaggtaaccaggaattgaggggaaggaccttgtggaggccgagcattaacagcaagagcggggtttggagaaagtctgagattgggtgcagccctgacttacctgctggccctgaccagtttcttttcactaacttggccttgggcataggatgaaacattttttctgccctaattttaaaactaggtgagggtagaatcatcacaggttaggaatacattcttcataagacacgatgctgtaaatacccttaatggacgaaaagttgaaatacttttgtttcctcttggagcagttcagggaaatgcccacaggggattgtcctgcacagatagggcaagaggatttcctgggtggagtctgccaaggcctgcctcgctggggaccccagagtcctgcacctctggttccgccccaggtggtgacattactgtccccgttctgtggctcgtggacaagactttctccagaccccttaaagtggtacatattctaaaaaactgtttttctattatgccataaccttgctctagtcagtgaatgttcctaatgctgctgtttcaacatttgaattctttttaatttatgaaacatgctaaattttttttttcaaacaaaacacacacatccacatatacacatgcttcgctatgtggcttccaaggtttaaattttgaaaagtaaaagaattaaaacttcacgaccacagatcacctcaaaccagaaatacctcagaattttctacttatgtaaggtttattatatattttgttagttgtgttgtcttgtagtaagtatattttaatgtaagttggcttttgtgacaaggaagtttaaaagaaatagagaaaaagaaaaaagtttgcatcttctagggagtgctaccatttttgtttgataacgcccccttgtaaataattgtcatcaactgtaggttggctgtctgggccaagtctgggcatttatcagtcttgtttgtgaaggcttttccttctggtttctttagatcattttatttaaaaacagtgcatctcttcatcgtgagggtaggcaaggcgggggccgtggggagaggttgacctgggtgagaactgaagaggccgcctcctcttgggttgtttggagcttcacatgtaattcacatgtaacatgtaacttgatcggtcagtgttcagaatgacaagtaaccccgcttaaacttggtagaaggatggcccttagacctgaatggggtgattttacttgggatttaacttcttcagcaaattaacagcaacgttggaagagatctgtggcgcctctgtgaagcacaccgtgactcaggccagtcttttagtgcagcgtgtctgggagtgaagggttttgcccttgctggtcttggagtccacagtgtgaggggcactgcacatgcctgggcatctacctagtgtgctatgttcagtgtctggggcttactgccccggggtcctttcctctgggtgttggggcacagggtgctatgggaggcccatttgcttccctctcggagctcagtttttgcttcatgggtcaaaatgtgggctggccaagtggttacaggaacagggtttcggtaagctatgttgtctttttttttttttttttttttttttttaatggtttgattttgtgctgtggtattttttttcccttagaataatttttaatggcaaaacaggccttacagcagttgcttttctttaccatttatttctttaagaagctttaaaatatttattgaaaagtgccatatctaatttctttagctttcgcctcaggcagtgcaggcatctttacttttcatcctcagaagaaacaaacgactaacaaatgtagcaaatttactgcaggaatagttaggtcatgatactacctgaacactaaaccccagcctctttgtttggttttagttcctctgggtggtttttcttttgtgtgctggcttgattcttgtgagaagttttgacctggccaagggagggttgagccatggttctggtgtgggactttgcggtcaagacacagtacagacaggtcaggcctgcgtgccttttctctgggtggcctccccgttaggcccaccgtacgctcagccactatagtgtccctgtggggccttgccatcagattgtgtgtcaggagatggtacctttttggtgtggctggggaggagtgtggtccatgccagttctttgggcttcaggccactcttcccctcatgctgtggtgtaaagtgcacccatcaggtggtatatctggttctgatggcaagaagaaggtgggggatctccttatagggcatgggtctaggagcacagatgggccttttgccccgggtaaatgcttgtctgtttgctgtcatgtgttctttgaggagtgagccatctcgagccctgctttgaatttactgggtcatagagcctctgcctgtgctcttttccataatgacttcatgtgacatgcacttttggtgggctcagataattggtttctttttgtttttgacctcaggctctgtggcagactggggaaaatggggcctggcatcattttccctgtcaatgggaggggctgttccatgcagggtgggaggggaccaagttagcagagagtagccaaggatccttgcttcttcctttctagtgtgctgtcatccaagcaggctcctggctgtagggatgggccttggggaagaatcttctttgaaagcatctatgataactgagaagtcatccctagttggagaaatccagtaatgagcagaaggaggaagcaagtgaggacagaggccattgtattacagtgtcacgcagagggccctcaatgatggggcattggggaaggctgtagacatagtcatcagaacatcctggcctggcataagctgggttttctcctgggaccattggtcctcagcaggagttctttgcatgagttgctcaggggcaagggctgcaagtgggctgtgcttaggagaaagtgacacctggcagtgagggaagatggtgagcattattagcctttgttgtccagcatggccttcttgtcctgtctgctctggagaggagcctgtgggaccagtcctgcctggggagggcatacccacacgtgccagctgattctgactctgaatacatcatgtccggacttgggggtgtttctgcagaaaaaggaggttgtttttcagccttgaacatcttcaggaggatagagactcttgctcacatattcttagcaaagggaagggtctctcatctccaggccacagagatagttcttccattgccctaagaggctaggctaaccctcttgacataacttagacagcaaagcacttcatcctgtagttgggctctgtcacctttctcttcagttggccacattctcgtttcctccatcctgctatgctttgtgtgctcgggctgtgtgtggggtttttccctggtggaaggaagcccagctgtgtattgaatgtccttcatgtgttgtgtgtggctcagaaagcctgtcacttggcccctgtgctctgagccgtgagggtggggaggtggctgttccattaaagtgggagtattggatggccctcttgaaactagaattttgccttttttagtatgcagtataaagtttccagcatctattggtaacacaaagatttgctggtttttaaaataatacagtaagcataagtatgtaagtttttagaattggtactagaagttggacagctagttattctcgagaactttatttcactagaaaaatatactaattggaaagcagtttccaggagttaactcagtttaattttcagtctcagttattttagcctgttgagtttttgatggcacacctttggagagatggccacgcctgattcccatttcaggggcatcagaccatacctttttaagaagctccgtgaatctagtcatctacccttcatcctgggcgaacagccaaaaagagaaggggacaaggtgtctttttctccttctcactggggtgacatgaattcttttagttaatggctgtttgcaaattctaaactaatgaaatacttagcagctaacatgttcaatctagtaatgatgagtttaaatctcaattgacagtaatgttttagataaacaggcccagtaattcagttgatgaactgtatatcttctcagtctagatttgtaaatgtttaatgaattcagggttataagcatagttctttaagtaagattccagatagttgatttgcaaccagcagtctacctatgaatgtatcccaaacctttagaagattggaaaagatttttgaaataatgatttagttttgtaggaaaaacacccccttgaaaattaattcggttgacccagtaacattttttaaaacaattggtggctccaaaaggcctgccaacaaagaaaagtccaaattatctagtgggacattttgaatgttttatgtttattttgggtccactgtaaactttggttcaaaaaagaatttgaatttaaagaatttaccattatttaaattattaccaagtttttacattttcatgatggtattttccaggtatgaatgaaacatgactttttgattgtggtacttcctgtatcccctgtagtgccaaaaccagtgatactttatttgctcctatggcagctcatagaggtaaccgaagtgatttttcctcagtaattgaaacacatattctctaaatgccaatgtgtggtgatgggccctgcactgccttcatttctctagggcagtgtctttggattgtctagggcctaggtaattctgagaactactgtaaaccaaccacagggcactaaagcaatgtacacaccactctttgtgtgtatggaaggggttatataaacctgggctatgctggacatctacagaagagtattacattcacttgcaaagtttacatttttgagctcacagttatgaaaaatatgacccacaagtttttcaggcaggtgaggatgggtcttcttgcaaatgcatgagttctgtcttgagtcctgggaacttctctgttggttgagtgtgggctcattccctgactctcctaatcatgtttgcgtcagaatgttagcattgtaaataaaagaataggttgtataatagatacacaacacttgaaactttactttaaaaaaatcgatagttctacatatatatttagttatatcacttgacagatttcttctacacagtgtggagattgttttataccacagattatttttataaagttagtgaatttgaatgattttgtaatcagagctaatgagctttacctttcaagagaaacgtacactggagcatgagtggtgtggaacttttacttagtgtttatatggattcttgtgatacactggcagactggagtcaatttgcgggtcttttttggccaaaactccacttgtggttgtgtaggacagtgatattcagctcagcttcttgtggattgggaggagagagggcctgcaatgtgttttacattggtgcttcctcctgagatttctgttgaacaaagggttctgaggtcaaaaattagtttgtaagcctttgccataggacatagtcatgtgagagtgtttgggggaacagaaattgtataggggtgcctattggggtgggatgggactcgaataagattcaggtacaaaaactttgaaatgagaatctggtggtttgagtaatccaccagactgaattatctaagatcacattatccaggttggggggcagaattacccagttaagtaattgttcagaaaagtggggagggtggcatgtggatgcagtgatccaattaaatggagagctgccaggcacattttgtcctctctggtcagtgagaatggttgggttggctcgctgcttcaatctgtggaatcagccaggagcccagtgaggaagctcagaaccccagtaacagcagagcatctttcagatagctccagagttttcctgcttttctgaggaagctcagcatcactgccacaatacggaaagtggtcttcattttagcctatttatttttaggcagagagtggatggttatttgtgtgggacttttggtggcgatatataatgaataattaagttaatttctggtatgcataatggccagtcctgaggcccagctgaagacctgtcccccagaccctgcccgctggcttcaggctgctgcttctagacagaggtgcactggacgggatagttttatcaagagaatccctaatgtgtcattttaaaccagctgtgctttttattcattctggttgagcgtataggtttacactttaccctttttatacttggaataaatttagttccagcagatctagtagcactccagaaaccaaccccatctgttccccataaaaagaacattttctctgctctccagccacgtgtcttggaatgtaattctgttgtgcctttgtttttatcactctcttcgccccaaaagcaactgctgtaagcttttttctacttgtcttttctagtccccaacctctacctttttcctttttcccagccctaatttctggatgcacttctgtgatccaggtattttaagaaccagttacctcagacctcatgttgaacagtgtcgccatctgggtcctcttgatactgcagacttttaacgtacacatgcaggaaccctgctgagcgtgggcacttgttttaaagcaaaactcttcccaaggactgaagaaagggcttctggcaagctcgtcatggcattgtggtgggatgggtctagagtgtcatctgaatggtgcttcctgtgttcctctttgaattctgccattttcagtattcttgtgtgtctgaataggcaaagcgatttaattggctggtcttgcacgcaaattagttccaaagataagctctttgtaacacatttccagtcgctaatgctcaaatgtagaacattcctttaaatggcaggataaaaaacccactatccaccatagtgcattttgggaagatgtctgtagcatatgttgctgtgaaattaggccttgtgggatatggctgtttgtcattttgatgtattttaaataaatatatatattttttaaagagccttttttaccagttcaaaaagtttaattaaccagcagtcaccgcatctgaatttttgtctctggggcatagatggcagaccaagattaaaagtggtaactcagctatacgagcatgggctaccttcctgggctctcctgcagtcctgtagacctgctgttccgcagaccatgggacacaaggtcagtgtgttcccagtgagggtcccaagtcagtcatcttaagtgtttgttctctgccccattcagtggactgttgacttcagtccctgcaagtgctttagcccgagtggggttttctcagagcactgccacgagttaagtgtgtgtttagccaaataatttctccgtaagggaaaaatgcagtcacccaaattttaccaacaatgacagagatgagagtagaaaagattaggcaacatctgagttttaacttgaaaagtgtccaagtcatcatgaaaggccgactgggagcaagtgattattagagattcttcaggagacctcatctgaaaatgttaagactgccagtgagggaaggaattgttaaaatgccagcggcttttttttcctctttttttctgtaattctgtaaaaatgcagagaaagttgagtggtacttcagaattgagggagagggttaccgcagagtagaaatatatttctagatttcagttccacaccacaaatccacaacaatgccatttttcaactgtacaaaaatctgcttatgaactggacatgatcttaatggtagtgtcaaaggccaagtttttcacctgttaatatttttccacatttgtccttgaatctgaataactttatacagtactgtaaatttaacttacatcgagtttgttgtcaattcttatgaaaagagctttctgcatgtaacacatacggttaaagaacacagcaaaggacaaaatttgcaggaacagttttggaaccaacagaaaatgtcaccttttatttgccatcttatatatatctatcagttttaccagctacttctaaatttgtacattatttgtaagggaaagaaggaaaaccctaagacttgtctaacttagtggagaatgtgtgtgttgggcttaggatggatagctaagtcttattgagctgtgttacctaacttgtatataaaaattgtaattaaaagtttgggttcacctgtttctcacagtttaaaatgatgagtaattgcaaactctggaaatgtgactagtatatgatttaaggctgtagaagcaaggaagctctttcaagtgctaaaactaaagacttctagtttttggctcaaataagtactgtttgtataccaggatatgtgagatgtaaatgtagtaggtcacttttcacccttgtagctataaaataaaaattttgtagaacagaaatagcttgtactactgaattaacaaaagttatactaaagtatcatgtttaaaaaaaatatatatatatatacagagttaagcttgttgctgttaccctgtctggatttgaaaagtgtgctgatttatatatatatattacacacacacacacacacacacacacacacacacacacacacacacacacacacacacacacacacacacacatacacctaaaatggcctaaagcagacatccatgtaattacagttgcaaaatgaaaacattttggaaagaacattgtatcatagttcattcatttgcagtggatctttgttcctttttactgtggtaattttagaaatgagtgtcaagtttgaaattagatctgctaagttggggttttgctgcttgaactctgcactgggtcctcaaataaaccgatgtgaatgtagttttttccccctgtgtgaagaagcagttacaccccaacaataggaggaaaaatctagaactatttcaagttttatctttttgtatatgaaaataaaataataataaaacaa

SEQ ID NO: 255 - DNA, 15450 bp, Homo sapiens
gcggccgctgactcggcgcagtggctctcggtgaaggaagagaccatcttcctgcacgacgggctgatccgggtcaccgacctggccgagctgcccagcgagatcctcggggccccagaggccgcggacaccgacctggagattttaacctttgagaccaagaacccgtcggaattagcagaacgtttgcgctctgtttgtgggaatcagagcaatgcctatgcccggctgctggaataccgcctgaatgccttgcgaggactgtggaatgcccagcgccagctggccttagaagaacagcatgaaagggaaagttcaggtgatgaggaaactttggccctgctcaaacgccagggcttgttgcagcaacctgagcaagcgcccttcacatcgaggatggggctcctgctggtcttcccccttattcagtcccagagtagaacagacccctctctctgtaacataactgctgaggtgctattgaactgccttcgtgactgccagcctttgagcttgaccaaggagcctgctgactgtctcaatggaattgaaactttgctgtgctcttggctagaggagacttctgacacaggccgacacatcccacataagcaaaaagaaaatgctgctgctgccctggtggctttggcttgtgccaggggatcattgaaaactttcgtccacacagtccatctattacagaaacagacggatctagggtccctgcctgtagctgatgtgctatataggctgttgcttttggaaggggggcctggatctccctcctgtttgcttgggggcaaacacatagtatcatggggttatgaagacatgttgcctgcgccggatagcaacactggctccagttctgaaaataaagatgctgacttgggacgctgtctcacggcagatggtctttacctgtatactactaactcagttggaagaggagtaagcaaattgggatctggattacatggtactctcagaggttttgtgtactgccggaacgaggagttggaaccaggatgggtggcttttggcagcggcagtcttctccaccggcctgtctctttcgataataaacctcactcccttttccaggtcattgaccagaacacccttcaggtgtgccaggtggtgccaatgccagccaatcacctccccattggcagcaccatgagcactgtgcacctgtcttcagatggcacttacttctattggatctggtctcctgccagcctgaatgagaaaacaccgaagggacattctgtcttcatggacatttttgaacttgtggttgaaaatggtgtatttgtagccaacccacttcaggaacgtacaattctaatgagaaaagagggcgaatctgccaaaagcattaatgagatgcttctaagtagactttctcggtatagagcctccccgtcagcaacgcttgctgccctgactggttccaccatctccaacacactgaaagaggatcaagcagcaaatactagctgtgggctgcctctaaaaatgctgcggaagacacccatatatacctgtggcacctacttggtgatgctggtgcctcctccagggggatcaggcagctctgccacccgatctctttttggtggaacaagtggtttgtcatctttaaaaatcctagcctccagcttggtgtataatatttcggatggtcagtttacaagtcgtgcagatctcatagatgctgctggaagctcactggggcgtggtgctctcgtaccaggattgggagcgtgttatgacacagtgaacaacatgctatggacatgctcaaatgactatatcgatcagtggtgtaaccctgggaatcaagccttccattatgtctgccagagacttggagtcagtcacattatcactgagcccaaagaagaggctataaccacgaatgaggttataaaccaattattgcaccacgttggtgcgatgtgcatacaccaactcaatcttcttgccaccaaccccaatcttccaatcacaagtgtcttgggcaagcagcatccaattgaagcacatcatcttagcagtatttgtgacattatggagaaggccatggttaatggagatacctgtattatacgctgcattctcgttgtctttcaggtggtatttaaatttttcttcagcccacaaactgaaaggaatcgagacatcattcgacggtcgggattgcttctttggcagttgttgatggctccaaaagatcaaatttgccctgaaattcagaaggaagtctgccttgccatcagctctggtttaaatatcttgtacccaggtgaaactgaaatcaataacttacttaaactggtcttaacagaaggagagagaaacagtggactctcccagctacgggatgtgatcctaaccaacctggctgaacagctccaaaacaaccgatttggcagtgatgaggatgatcattacagactaaatgatgaacttttacactacattctgaagattgttgtacgagaatcctgtatcttaatcaccaagtgccaaactgtctctaaagatgattttcaaaagctcctttcaactgtgcctgctgcatcctcctgcctgcgctatctgatggcagttcagaatcaccttctcagtaacactattttgattaaacctgatgagaatgatgacagtgacagctccttgcagggagagacattgaaggtacaggagctaaaagtcagtattttggctcttgccacccaaatcctgactggatgtgatgaagtgttggaaatgctacagcaggtcacaactgccctcataaatagtgacatagcagaccgtgagcagaggttaaaaggcttggaacaagttactaaggctactatgcttggtcaccttcttccagtgttactgacctccttgatgcatccaaatttacagactctgatcatggcggatgccctgatgcctcagctagtgcagctggtactctataccagccagacggcgttgctgcttaaaacccagtgtccggtttttgctgaggtgggctgttccccgtgtggtgcaccagaccagaagtgcaggctgttccctgatgagagaatgttagaagagaaggaagagccaggatttctcactggtttaaagattcctgccccatgggctgctggaaagactgtggaaacagtccaccccgtcagagacaactataaatttaaagaaacggtccatatcccaggagctcgctgcctgtaccttagatttgatagcagatgctcttcgcaatatgactatgacaaattggtgatatatgcggggcctaacacaaacagtaggaaggttgctgaatatggaggcaacacactgggatatggcagccgtagtgtcttaggaactggttggccgaaagacttggtgaagtgcatttcccccccttccttaaattttaaggtggaaggagatacagtcaccttctcctttgaaatgagaagtggccgtgaacacaacactcctgataaagccatgtggggctttgcttgcacagttcgcgctcaggagtcttcggaggatgtctcaggaggcttgccctttctggtagacctggctttaggtctgtctgtgttagcttgttccatgttaagaatcctgtacaatggaccagaaattaccaaagaagaagaagcctgtcaggagctattgcggtccaaacttttacaaaggtgccagtggcaggtggaggccaatggcgtgatctcccctgcccttactccgagcccctctccactgcctctgaccatagaggaagacagagaattcacctacccctctgatgtcctcgtgcctcctgttggaaactactttgatctgcctcggatcagactgcctccaggaatcatgataaagctcagggaaatttctgggcgtgctagacctcaatttagaccaagtataaaagaagtgattcagccagacgtgatggaggaaatggtggtatcttgtgttattaagcacttgaacttggttgatgcactgcagtctctaataaatttccaatatcaagaagaacatgctgaagaatatgatttattatgtaaaattatgggagagacctttaagaaactcaatgccatggagagacagctgcagagtgttgcagaactggaacaaaaatggcaaagtgaagttgatgatgccatgcaggggaaactggagaacaacatgcctttcttttatgattaccattttaatgagaacaaaatgaaagaactagaacttttatgttcaatgaaggaagtctcctttgatgggaatgatcttgaaaacatggtcctatcactgagggagaagttcctacaagaagtgaattctcttattcagaaaccctcacacccactggctaaaacaaagacgttagtgaagagtttaatgaaccgagccgagctgttgctgcatgtcaccatcgcagcccagtcgggcctcacgagaagcatctctgggacccctgctgaaacaccagcttgtaaatcagcttctgaaacaaaagtgatatctcacgctgtcaggcagcctgtttttcttcgcagcatgtcagctccttctgacctggaaatgattggtaatgaagatttggaatttactagagcaaatcagaggcgtcgccacgtgaccagccaccgcagcagctcctttacactcctgcagtcgctggccattgaggacagcagggacaagcccacctacagtgtcctgctagggcagctgtttgctttcatcggcaccaaccctgaccaagctgtgtccagcagcagtttccttttggctgcacagacaaggtggcggcggggaaacactcgcaagcaggcactggtgcacatgcgggaattgctgacagctgccgtacgagtcgggggagtgacgcatcttgtgggtccagtgacgatggtccttcagggaggacccagaattgaagaactcacatgtggtgggatggtcgagcaggtccaggaagcctttggcgagaccatgacctctgttgtgtctctgtgtgctcgttaccctatcgcttgcgcaaatagcattggactcttatgtaccataccttacaccaggagcgaagagaagtgcctggtacgcagtggccttgtgcagctcatggatcgactgtgtagcttgagcaatcagaccgagtccagctccagtgagaaacagaccaagaagcagaaggtggccaccatggcctgggctgccttccaggtgcttgccaaccgctgtgttgagtgggaaaaagaggaaggtggctccacagaggctgtgcactcaggtctggcccggcaggtgtccagccttctcactaaccatcttgcccgagccacagagtgctgtggcaaccaggctgctgggaatgacgcgctccaggatgtccttagtcttctcaatgatctctcaaggagccacataggtaaagccatcctgagccagccagcttgtgtgtccaaactcctctccctgctgcttgaccaacgcccgtctccaaagctagtccttattattctccagctgtgccgggcggcgctgcccctgatgagcgtagaagactgtggaaacgtggagctcccaccctggagctactctgtcccctccttaaacagtgagcaggaggatcccagcgacccagcttccaagatcgcctccctgctcttagcaaagctggcagattatgtggttccaggatgtcagacagttctttctccaaccgcttctgaacctgacaccacattgacaaaaaccagtcccaagaattccttgaaaggagataaagatcctggagaagagagtgaggctgtggatggcaagctctcgatatttatccacaagcgggaagaccagtcatcccatgaagtcctccagccattgctaagtagttcagaaggacggcccttccgacttggtactggcgccaacatggagaaagttgtgaagatggatcgagacatgaccaagggtggctgttgcgaagtgattacagaagaggctgcagccgccctgcggaaagccaccaagtgggcacagtcaggcctcatcgtcagcattgggccacctgtagagtctatcaacccagagactgtgagtggactatccacaggcgacaaaaagaaaactgcccaaacttccatttgccgagagaggaactcggagcttgcaaggactgatcctgtgcgtcccttcatcagtgggcatgtggcaaacagcatggctgcagaagtgatcgccttgctacatagcttgctcatggcacctgaatcaaatgctgctcaaatatggaccacaacagcagagaaggttctgtctagagcactgatgtacattccacaattggggaaatacgcagaaagcattctggaaaatggcagcagcagtggcaggaaacttgccaaacttcagagaattgcacgccaggccgttgccgcactgtgtgcacttggaggcttcaaagagacaatcaagataggatccgaggttcaggttttaggtagaggaatttcaggaagcattggagtagtggcttctatcaatgaacaggaaggtatagctacagtcagattcccacccatagactgtagaaagacttcgcaagcgtcagacacattgactattccattgtctagactttgtgttccaagatcagaggcattgcctcttcataaactgtccattactgagaaggtagtacaggcagtccagtccatgttgcttcctcaggagggaagtctctctattcacacctcacttcctgcaacaggagatgggtcagctcctgtgatggcagtcgttcggctccttgctgaaataaggacaagagcatgcctggtcatggcccagcttttagaagacagcttattttgtgaagaattcatacaacaatgtccagcagctgttgaagttcttaacctagtagcccaggaatgtagtgctggagagcgacttgcagttgtggaggtacagtgtgaacggctgaggatgctctaccgggactgtgctcggcccccaccacctcctttgcaggctgaccgaagacagcccaaagagattacttggagcccctcgcgagtgtttccgcctgttcgagcctgcatgttctcatctcaccttacctcagtcaccttcctggctgaccccagcgctgggggaggcctgccccggggcacttttatctatgccacttcaccactgccagttcaggccccgtctttttactgggaaattgaaatcgtttcctatggagacaccgatgatgacaccggacccatagtttcctttggcttcactacagaagcagagaagcgagatggggcttggactaatccagtgggcacttgtcttttccataacaacggccgagccgtgcactataatggctccagtttgttacagtggaagagcgttcgcttagacgtgactctctcccccggtgacgtggcaggaattggctgggagagaactgaggggactccacctcctccgggacagccagccaagggccgggtgtacttcacatactgcgggcagcgcctctcaccatatcttgaagacgtctctggtggcatgtggccagtggttcacattcagaaaaagaacaccaaaacccgagctaactttggctcccggccgtttgcctacgcggaagggcaggcccaccgcaatgctgctgacctgtgcactgacctagcagaagagatcagcgctaactttgaggccctgcctttcgccatggcatctgacagtgacaatgatgctggcaccagtattgcatcagacccaggcactcatgggccaccatgccggattgctgccgtggccaccgctcagcaacaatatgatagtgacacctcctgtcattataaagtcgagctcagctatgagaatttcatcacctctggcccagaccctcacccgcctcccattgcagatgatgaaagcgatgatgatgacgatgatgacatccctcaggaggaccactacgccctgctggtgaaagcatgggagaccaaggtttttcctaccatccgaagacgcttccgcaatgaagcagagcggaaatcgggcctggaccagataaagggggccttacaactaggtatggtggatattgcccgacagacggttgaatttctctacgaagagaatggtggcatcccaagagacctttatcttcccaccattgaagacattaaagacgaagcaaacaagttcacaattgataaagttcgaaaaggtctcacagtagtaacccgctctccagacagcaataatgtagccagcagtgctgttggaactgctctgccaaaatttgccatccgagggatgctgaaaacctttgggcttcatggagtcgtcttagatgttgattcagtgaatgaactggtgcaggtagaaacgtacctccgcagtgaaggtgtgctggtgcgatactggtatcctattgacatgttggaaaggcccccagcaggctaccgaaggactgccaccaatgggctggtcacactggacaataccaaccttcaaattcacagggagctgctgcgctgcgaggctgcgctggccaggctgtactgccgcatggccctgctcaatatcttcgccccgaagttgcctcacttgttcactcgcctcttccacatccctgccatccgggacattaccctggagcacctgcaactgctgtccaatcagctcctcgcacctcctctcccagacggcaccatcagctccagctcgatcctcctggcgcagtctttacagcattgcatccattcccagaactgctccgccacggacctcttttaccagggcaactcccagacagtgagagagtggctcaacgtggccatcacccggaccctgcaccagggcgaggagagccttttagagctgacgaaacagatctgctctttcctgcagacagcaccagagcagttcccctccgaagagttcccaatttccgaatccaaagtcaacatggacgtgaatttccccggggcagcttttgttgttgtgtcttgtaaagaaagtcaatctggattccgcaaagactcctctctgtacaaggcaccgtgggcacgggtgctcgtatatggcctcggccacaaagtgaagcgaaatggccagctgaacctcatcgaggccgcctgttacccgcgggacgcgtccccagccaacactgggcttgcacctccccccaccgctgaccagtacccctctgtggtcctctccacagacagggtccacatcaaactgggggtgtctccacctcctggagcagtcctggtgttacattccctgcccctggagttcccactggctatggccttcgcagagcagctgctgtcctggaaatcagaggacagtgaagggaagtccgaagatgagcctgacaccattccgacatccgtcctcctgcaggtggtggagctgctaggaaacttcttgtggaccacggacatggcagcctgcgtgaaggagcttgttttccatctcctggcagagctcctgcgcacggtgcacaccctggagcagaggcggcaccccgctggcctgtcctcctcaatcgccctccagctgaacccctgcctggccatgctgatggccttgcagtcggagctccacaagctgtacgacgaggagacgcagaactgggtctcaggcggcgcctgcgggggctccgggggggcggcggccggtgaccagggcaggttctctacgtattttcatgcactcatggaagggtgcctggctgtggccgaagtgaccctgcctactaacatgagtgtcacagccagtggggtgacctcagcgaccgccccaaatctcagtgactcgtcctcctcctcctcgtcctccccaggacagaccccacagagtcccagcctcctctccaagaggaaaaaagtcaagatgaagcgggaaaaggcctcctcgtcgggcaagcgccagtcttcccgcaccgtggactcggaccccaccgtgctcagcatcggaggcagcaagcccgaggacatgctgtggttccaccgcgcactcaccctgctcatcatcctccgccacctcaccaggaaggacccacaggggctgggcgtgacgagtgacgccatcgccgatgcctgccaggccctggtgggccccaccgcccacagccgcttgctggtgatctccgggatccccacccacctggacgagggcgtagtcagaggcgccatccgcaaggcctgcaacgcccacggcggggtcttcaaagacgagatctacatcccgctgcaggaagaagacaccaagaagccaaaagacaaggccgagggcggggacgggaaagttgagcccgagaagacactggccttccccggcacagacagcatggaggtcagcacgtccagcagcctgacccccgccatgagcatcagcgcctccgcctccaccagccaggcctccatctgcagctcgcagggcatctcccaaaccgtcagcgacctctctgtggatccgctgcctgccggcctcgagctgcccatccctccgggcctgttggagccccacgcggtgtccagccaggaaagcctggacatttccctgtgcagcaccggcagcctgggcagcctgggcagcctgggggagcccctggacaatgcagagacggcctcggtgtcggacatgggctccatgtacacagtcacttccctggacaaccagcccctcgccgcccgccccatcaaaggcttcgcagtcgtggagataagatcccgagccaaaattgagaaaattcgagcaagtttatttaacaataatgacttgattggtttgtcaagtttggatggtgaagatgaattgatggaaatgtcaacagaagagattctaaccgtgtctgtagtaaatcagagtctctttgatactcaagggagcccagggttagaagattatttcaatgataagtcaattaaaggggagaagctggtgcccggagccagagaggttctgacggagatatttaagagttgtgcccattcagagcagacgctgagcctgacaccagcgaagcccatcagagtctctgacatttatcttagcaaagagcagatcaactcccagaccccaggcaacctcctccacctcttcttcaccaatgtccggccgccaaaaaaggtgctggaggatcagctcacccagatcctgaggaagtatggcgtgccaaagcccaagtttgacaagagcaagtacagcaaggccgggaaggagcagcaccccgtgaaggtggtgagcaccaagcggcctatcaccaagccgcccgccaaggacaaggctgtgctcaacagcgtcagcaggactgccttaagtgagaagaagccaactgtgaagccaaaatcaccagaaaagagcaaaccagatgaaaaggacccagaaaagtcacctaccaaaaaacaagaagtccctgaggaaaaatacctgacgctggaaggatttcacaaatttgttattgaccgagccaggcaagatatccgtagcgtctggagggcgatcttgtcctgtggttacgatcttcactttgagaggtgcgcatgcatcgatgtccgacatgcacagaaggcctcaagaaagtggaccctggagatggacgtggcacttgtgcagtacatcaaccagctatgccgccacctcgccatcacacccgcacggctccatccccatgaggtgtacctggaccccgcggatgctgctgaccccagagtggcctgtctcctgaacgtgcccatcgagagcctgcgcctgcgcttcgccttgctgcagtccctcaacaccacactggagaccttcttcctgcccctggtggagctgcgccagacacccatgtatacccacagcatcgccgccctgctgaaggaggccaaagggctgatcttctatgacacgaaggtgaccgtgatgaatcgagtgctgaatgccactgtgcagaggacagcggaccacgcggcccctgagatcaccttggacccactggaaattgtgggaggggaaatcagagcttctgaaaactcctacttctgtcaggctgccaggcagctggcctcagtgccgtcgtctcagctctgcgtcaagctggccagtggcggtgaccccacatatgccttcaacatccgcttcactggcgaggaggtccatggcaccagcggctctttccgccacttcctgtggcaggtgtgtaaggagctgcagagttcctcgctgtcgctgctgctgctgtgccccagctcagctgtcaataagaacaagggcaagtatatcctgaccccgagccccatcacctacggggaggagcagctgctgcacttcctggggcagctgctggggattgcaattcgggcagacgtcccgctgcccctggacctcctgccctccttctggaagacgctggtgggcgagcccttggaccctgagcaagacctgcaggaagcggatatcctcacctacaattacgtcaagaagtttgagagcatcaatgatgagaccgagctggaggccctgtgcgctgagatcgcctcccagcacctggccacggagagccctgacagccccaacaagccctgctgcaggttcacctacctgaccatgacgggcgaggaggtggagctgtgcagccggggccggcacatccttgtggcgtgggagaacaaggacatctacgcggcagccatccggagcctgcggctgcgggagctgcagaatgtggagtgcgtgacggccgtgcgggccggcctgggctccatcatccccctgcagctgctgaccatgctcagcccactggagatggagctgcgcacctgcggcctcccctacatcaacctcgagttcctcaaggcccacaccatgtaccaagtggggctgatggagacggaccagcacatcgagttcttctggggggccctggagatgttcacccaggaggagctgtgcaagttcatcaagtttgcctgcaaccaggagcgcatcccgttcacctgcccctgcaaagatgggggtcccgacactgcccatgtgcccccgtaccccatgaagatcgcccccccagatggcacagcaggttccccagactctcgctacatccgcgtggagacctgcatgttcatgatcaagcttccccagtactcctctctggaaatcatgctggagaaacttcgttgtgccattcactaccgtgaagaccccctcagtggctgatgggagggagccccagaattaggctgtcactgaggcacccactctgctggcttgggaagccaccactgcggcccgtccctccagggccctgcgtgaggagttggcaacattttgcttttccaaactttcgtccacattccagggcctcctggaagacttaaccttttgtctttgtacgtttcgtgatgggttggttcttttgctgcctgtttgtggtctatttgtaggatagtttagttcccagacagtttgtgtctaatttgatcttcttggacattgtccctcatggccaccagattctaatgccataaggccccagctggttccccatcacagaaccacccagcaggaagccgggggtacaatgacctcggccacacagagcgctcgtgctttcagcagagcgcctccacagacaagcctgtggccagccctgccctccagcctcgagctggagttgctccagaggcagccccagcaggcctccctccacatagaggtggctgggccaattgcccaaacacgtgagacacacagggagctttatgtgttcatcttcctgctttagaacttgctcccggtcttggtttttctgaggaaaagcccacagtggttcccctgcccctcccatacctccctatctgccgtctgtctctttgggccctggtctgacagttttcatctgaggcctcctcgggagcaggagacttaagggttcatcccgaccttagttcacagagcctagctgggtgcatcccagccgcagggggtgagaagacacccagagatgggggacaatgctcaggtgggggcctcctccgagactctggttgagaggaaagcacatgattcaagcctaccccacaaaaaaggagcacaaaatgctcagaaatggcccttcctccctgcagtgacgtaggacaagggaaagggccacacccattttcaaaagagtggactgaggtgctctgctcaatttggggtctgctttagtgacccagacactcaagtccagatggagactccaggggggtccttctgcccctctggccagccccacccagcactccccatcaccccatgtaagtgtgtatgccagggctgagctgcctccaggctcacccactgcatctttgccccaaataggtctttgtccagtggtactttgttcatgagcagcacaggccatcttgttggacactgtcactttgggccttgccaggtctcacagaatcacatcgctgtatttattgtataatattgtgaatattggaagttttgagtgagtgctgtctagaaggttttggagtgtggatgctggtccaagaaagaagatgtgccctggcctgctggaaagattgtgaattctagagatagagccgttagcatccatctcctccctgtaactcttaggaaatgcatcaaggaccattatagaaaggatcccctgacctaaggatgaaatcgacctagggttaatcatgacagctgcatcagttgtattggatgcaagtcaactctggaggtgagtgcccgcaagcagttcccctgctttgaaagaagatggtcagcccgctgcctccccagcggccacagctcctttgagtgtggggggtcacagccaggatgtattcctgacaataaggatccttttattttcatttctgcataatgaaagagcctttcgatttattagaagtggtttttcctccctacatctttaaattcttggttctctttagtcctcatcccttgaatggacttgtcagctacctccccaggaggagttcagaagcttctgttggccatcacttgagtagatgacaagctgtaaggtatctgctgctaacgtggctgcttctccgagagcacattgaggtccagacagatccaaaccttggccctaaaaaatgtgtgctgtaaagttacttgatgtatatttattataattatttatggttgcatttaacaaacttttcattcaatctgatgctatttacaccatgctgtgtaaaggaagctcactaaaggaaaaaagtcacaccaataaataaccttcatctaattttgatttaccttaagagttgtgtgatcatctactcttgctgagcaagttcaaaggctggcatgcttggatggctctgatatttaagtgctgccaagtggctaggaattaaagtgtttctaattattatggtc

SEQ ID NO: 256 - DNA, 4922 bp, Homo sapiens
gcggccgctgacgcggggcgccagctgccaacttcgcgcgcggagctccccggcggtgcagtcccgtcccggcggcgcgggcggcatgaagactagccgccgcggccgagcgctcctggccgtggccctgaacctgctggcgctgctgttcgccaccaccgctttcctcaccacgcactggtgccagggcacgcagcgggtccccaagccgggctgcggccagggcgggcgcgccaactgccccaactcgggcgccaacgccacggccaacggcaccgccgcccccgccgccgccgccgccgccgccaccgcctcggggaacggcccccctggcggcgcgctctacagctgggagaccggcgacgaccgcttcctcttcaggaatttccacaccggcatctggtactcgtgcgaggaggagctcagcgggcttggtgaaaaatgtcgcagcttcattgacctggccccggcatcggagaaaggggtcctgtggctgtctgtggtctccgaggtgctgtacattctgctgctggtggttggcttcagcctcatgtgtctcgagctcttccactccagcaatgtcatcgacgggctcaagctcaatgccttcgcggctgtcttcacggtgctctcaggcctcctgggaatggtcgcccacatgatgtacacgcaggtgttccaggtcaccgtgagcctcggtcctgaggactggagaccccattcctgggactacgggtggtccttctgcctggcgtggggctcctttacctgctgcatggcagcctctgtcaccacgctcaactcctacaccaagacggtcattgagttccggcacaagcgcaaggtctttgagcagggctaccgggaagagccgaccttcatagaccctgaggccatcaagtacttccgggagaggatggagaagagggacgggagcgaggaggactttcacttagactgccgccacgagagataccctgcccgacaccagccacacatggcggattcctggccccggagctccgcacaggaagcaccagagctgaaccgacagtgctgggtcttggggcactgggtgtgaccaagacctcaacctggcccgcggacctcaggccatcgctggcaccagcccctgctgcaagaccaccagagtggtgcccccagaaccctggcctgtgtgccgtgaactcagtcagcctgcgtgggagatgccaggcctgtcctgcccatcgctgcctgggtcccatggccttggaaatggggccagggcaggcccaagggaatgcacagggctgcacagagtgactttgggacagcagccccggactcttgccatcatcacatgagccctgctgggcacagctgcgatgccaggagacacatggccactggccactgaatggctggcacccacaagccagtcaggtgcccagaggggcagagccctttggggggcagagagtggcttcctgaaggagggggcagtggcgcaggcactgcaggggtgtcacacagcaggcacacagcaggggctcaataaatgcttgttgaacttgttttcttgcggtgtatggaggccagttgctctgtgggctgtggctgccctgtcattgccccaccccattactcctcaaggaggctgaaggtgacagcagagactgtgcagaggccagggccagacactgcagggtggcagggagggagcacagagcccaggctggacacaggctggcagggctgccttgtattccagagagtgggcaaggcaggggccaggcaagcaagagatgtggggcgagcaagaagtgggcccccaaacccaagccctaagcagggagggtgaagaagccacatttctcttcagagctcagcaacatcacaccaccctgaccctgaggaggctttaccctgtgcctagcaccacctttacagaaaatcccagggcttagatgcctggagaaacagattcttattataaagaggaggaaaattagggtcacagagatgaatgaagtaacttgcctgtgattacagagctagcaaatggcagagatggggtttgaatcaggactcctgactccaagttcagtcatttcccaagaggccttattccttcccagaagaatttctagagcttttccccacgtagaatatattcttctcctttatccttccatccttccatccatcatccatcactcatccagccattatccattatccatccatccattcatcattcgtccatctattatccacccattcatcatctattatccatccatcattcatcatccatccatcattcataattcatctttccactcatccatccatcattcattcattcatccatccttccatccatccatcatctatccattcatccatccatttgccatccatccactcattcatcagctatccatcatctatccatccatccatccatccagcatctatcactcatccagctattgtccattgtccattcatccatttttcattcatccctccatcatcattaatccattatccacccactcatcatctattatccatctatagtccatcaaccatccatccttcatcatccatccatccatccttcatccatccatccacccatccatccatccatcatctgtccatccattatctatccattcatccatccattcatcatccacccacctattcatcagctatctatccatcatccatccatccatcatccatccatccatccatccatccatcatctatccattcattgtctatgctttcatccatccattcatcatccatccacccattcgttagctatttatccattatccattcctccatctatccatcatccattcatcccttatccattcaaccattatgcatttcttcatttatccattatttatccttccatccatcatccatcatctttccatccactatctatccattcatccatctatccatcatccatccatcctttatccatcattcatcagccatcatccctccatctatccattatccatcatccactcatccattcatccctccatctgcccattatccatcaaccatccatccatccattatccgtcatccacacatccattcatccctccatctgcccattatccatcaaccatccatccatccattatccatttctgcattatccatttattctttatccatttcttcatctattcatcatctatccatccattatccttacacctatctatcatccatccattccttcatctatccatcatccatcaattatccatccattcatccatccatctatccatcttctattgattgcttgtcatccttccttgtatcagacttccatccatcctccttccatgtgtcacacatcctcattactcaaccatccagctgtgcatccatctattcactgatatagttcactgtgcccctactatgtgccaagcactgtggtaggcacttgaggtgggatgctggagcatccagagagggcatctattgtcgtgagcctgggttcagattccaccttctccacttgtgaccttgggcgagttacttgacctttctgtgcctgtttcctcatccattaaatccggataatcattatacctacctcttcaagctgttgtgcaaattaaatgagctaacatatttgaagtgtctagaacagagcctggcacaagtaaacactttgtgggtgtttactaacaggacaacaaggggaaatcggggctgtgggagctgtagtctagggaggctcctttgagaaaatgatgtctaagccaagacatgaagattgtctgggcatcagccaggcaagagtatagcagggaaagaaagtacattagaggactttaaaatagtcccaatggcaggtgtggagagcagggaggtcaggaggcagttgtgggaaattaggcatcagagggcagtggagccaggccaggaggaactggaaaccttcttagggagcttagagtttaccctggggcaatggggagtgggcagtgagatgcttttagcagactgggatgcgcctgggtgtacatttgaggaagatcaccgcaactatgggcacagaatagttgtgggagatgcttctcccttcctcatccctcttacactcaagaaagagaagaaagtgggctggcttaggaaagttgccctggggaggggaccatgcgggcagattcaggaaccaattaggagggaatagactgagtgggagaagaggaaagttggtgacgactctcaggttacagggtcagcttgggggatagggaagacggagacttcgtggttcagatgtcttgagtctcaggggctcaggggacagccagctggaggtttgtgctcattcattcacgcattgattcatcaagcgaacaatttgttaattcactttccattcattcagtaaatattaatgacctactaggtggggcttaaggcggggctggaaatgggcctgggagagcaattatggtccagctctactgaggccttgaatgtcagaacaaggaatttgggctttggcctcatgcaagagagggcggctgccatatatgggcctgggcagggacagatctgacagggatctagccctggccaccaggcatctaggagctcttgttctcacccagggtccttctgaagttggcgagtggaccgcaggaggtccaggagatgattgtagttgacacatggggaaaattttaatctattttaatagttgtgtttatgtaaatgtgtattagaaaaaaatgtacagtgggcacatcagtgctatgacttcacagacgttactgcttaggatgaaaccaaaataggcatttaagtaaaagaaaaaaagagttggcttaaagaaaaatattaaataaataatcgtgcaagtg

SEQ ID NO: 257 - DNA, 8777 bp, Homo sapiens
gttgcgctgccgtcgggcaggtggccgagccccgcgggagctgtcgtcggggccgaattcactgcgccaaggtccagcggaaagctggggcatcccggcgaccgcagggtgtcccttcgcaaattcatcaggcgaaggggaggcggaagctcctggccgctgctctgggggagggctccgagctccaacctgcaagtccaggactgaagtgtgtatgtcttttgtgtgattcttcaaactttacctgccaaacagaaggagcatgttgggcatcagtcatgctaaccaatggaaaagagcaggtgatcaaatcctgtgtctcccttccagaactgaatgctcaagtcttctgtcatagttccaacaatgttaccaaaaccgaatgctgcttcacagatttttgcaacaacataacactgcaccttccaacagcatcaccaaatgccccaaaacttggacccatggagctggccatcattattactgtgcctgtttgcctcctgtccatagctgcgatgctgacagtatgggcatgccagggtcgacagtgctcctacaggaagaaaaagagaccaaatgtggaggaaccactctctgagtgcaatctggtaaatgctggaaaaactctgaaagatctgatttatgatgtgaccgcctctggatctggctctggtctacctctgttggttcaaaggacaattgcaaggacgattgtgcttcaggaaatagtaggaaaaggtagatttggtgaggtgtggcatggaagatggtgtggggaagatgtggctgtgaaaatattctcctccagagatgaaagatcttggtttcgtgaggcagaaatttaccagacggtcatgctgcgacatgaaaacatccttggtttcattgctgctgacaacaaagataatggaacttggactcaactttggctggtatctgaatatcatgaacagggctccttatatgactatttgaatagaaatatagtgaccgtggctggaatgatcaagctggcgctctcaattgctagtggtctggcacaccttcatatggagattgttggtacacaaggtaaacctgctattgctcatcgagacataaaatcaaagaatatcttagtgaaaaagtgtgaaacttgtgccatagcggacttagggttggctgtgaagcatgattcaatactgaacactatcgacatacctcagaatcctaaagtgggaaccaagaggtatatggctcctgaaatgcttgatgatacaatgaatgtgaatatctttgagtccttcaaacgagctgacatctattctgttggtctggtttactgggaaatagcccggaggtgttcagtcggaggaattgttgaggagtaccaattgccttattatgacatggtgccttcagatccctcgatagaggaaatgagaaaggttgtttgtgaccagaagtttcgaccaagtatcccaaaccagtggcaaagttgtgaagcactccgagtcatggggagaataatgcgtgagtgttggtatgccaacggagcggcccgcctaactgctcttcgtattaagaagactatatctcaactttgtgtcaaagaagactgcaaagcctaatgatgataattatgttaaaaagaaatctctcatagctttcttttccattttcccctttatgtgaatgtttttgccattttttttttgttctacctcaaagataagacagtacagtatttaagtgcccataaggcagcatgaaaagataactctaaagttaagcatgggcaggagttgacttcatccaatctctatgttatgtttaattttattttgaaagcaacacctcaactcatctttttatttaataaggaagaaatatattacaaaagtataaaataagctctataaaaatgttatagtcattaagtttttattttacttgaaccaagagcacatgaatgaacaggaaaagatgtaaaaacatttttttctgagatgaaaacatattaattaaacatgcaaattagagcatgctatctttaggtgatgcaatctatgtttccccctttttaagttagcaggactttttaaaaataaatattgctctaaactttaatatatcgaacgtgagagtggagctgcttagtggaagatgtaagtgaggtgggtgtcccatgtgcttggtctccccttctgctgttctcctgttcttcataatccactactgcagcagtccctgaaccactaaacttgttcctttcatttacaaaagagatacctgacatcctgagacactgagaaatgtcctgaagtcacacagctaatggcagaactggcactaggtccaaatcttgtgataatgaacaccgtaaggttagctagcttcctactttcccttgaatagtgcttttctccctatgtaatatcttttattatgatatttgtggtttagaaggcatattgagttattttgcagaatcataatggacccgcacaaaatctcagaaccatatctgttgacattttttctcatagaaatatcatggttaccccatttgttaatgagcattaatgttttctgaacacttccaaagattaatcaaacataaatattcattgtctgaaaatgtctttaagatacaattcagaggtccctatttcctttgtacatacacacttagaaagaaaagacagaaaaggaagaggaaggaaggaaatattttgagaatatattgagaagaattaagaaaactcttcaatgaagtgttaacaaccaaaccctacagacggtatcagaaacagcaaatagatattcctctaccctttcacagtgagtgagtgagtacagaagaatgctcatgatagttttgccttcattctactttctgtggacacagagtaatgaatatttaatgggacattaaatatgcccttcaaatctataattttactttggtaaacgagatttaacatgatgtcttttatgctcctaaaacatcttttttcaaactccattccttagaacattcttctactgagatgatccaagaccaaaagtgttctttggtacttgcttataaagtgatagtacatgttagcatataatgtattttgaagagtgaagtaaatgctattgataacagtaaaaaaaaaaaaaaaaactaataacagtaaagaaatgctacttgatttttttttaaactggattgctcagattacctgatcgtggtggaacccttttattaagaggaggggaaactttttactatcccatatttaactgttctataaagcaaagcacagcttgggtaatagcgttctgaaggatatacttctgtattttctcatagagtacaatttagtgattatgcttcatttcactatggaaatatgttactgaatctatcttcattttactgagttgaaataaggaaggcaaaaaactgacagctatggagtttgcgtgtacttccatactcgttaatgctctcatccacttattaaataatcatagagcacccatatcttgcttgccacaatatcgggtacaagagggaatacaaagatagataggtcctgccctcagggattttaaagtctaatttgggaatgggaatagggatgtgagtgtgtgggggaagagattaaattgacagataaaatacgaagtgggatgtcttgagttctgcatgacagtgggtttctaggataggtctgaaaattgctttcatttgcaacacatttagaaagtagctttatttggatattacagacaatctaaatatatcatcagtttttaaaagtgcctatgtgaagtgatttttaaaaagagcctatgtgaaggggtaatcttgcttgttcttgttactaatttctcatagattgtttttctgcatatataagaacgaaattatttatttactatggttgtacgtgcctcaaataaacaagaatgatatttcctgttttatttacttatgttgggtaaatatgcttattgaatttttaagagaggattttttaccatctccatttttcttgtcattatgttttgtagcttatttgagggtgtctaaatataatttcatattttattggttcaactttcactctgaagaaatccgtatgttagtacattttgaggtatttttcttgttcttgtgttgtttaactatgactcctaactgagtagtcttatatttcaattacaaaatacattttttaagaaagggaatagagcagcaaaaatgataaggaaaatgttaaaagttgtaatatttcctttactcttaacaggattatatatagaacatgctcacttacaaaaataggatgatgaagtttagagcataaggcaggcttcttgtatatacttatgctgtcaaatgttatattgtttttaatggagtcccattgtgtaatatttatttcttttacattttgttataagcaaaaaaaaaaaaaattctccttaggttatgttcagagtatcagtgttctttactccttacagatattttggctttggggtataatacaagacttgggaaaacactattatgaattttcagtactgtataaagtggtgatgggatttaaatgcagcatcactttctgaaaataagagaaacattatttgttgtcagtatttcagcatgaacttgttgccttgtaaattttgcctttaagtttgtaattggtacagattctgttgtatgctttcttctatgtctaaaatatttggcatgtcacatctagaattcttaatttatgttctgacttgagagttaagtgaaacatgactgtcgtgcactattttaggcatagcacttgcttttcatctttatactttcaattaactttgcattttaaatttccatgattgtatgaaaatagtaacctggttgcagtatctgaaaaaattaaaattagcttttatttaaaaatgaaaatctacaatagattcattaggttagaagttccagaataatttattattttattacacctactattgtagaattactaataaaacaaaacaaaactactcctattttcctggaattttgccaccatgtgacttattggggcagagaaaactcagggttgtctttgagtctgcacaaaagcaccagggaacctgcttagcaaatcgtctgaaaacagggagctgatgtttgccattatacaaagtttgagtaaacaacttaaaattgcttgttagggcatagtctttgattgaaataagtatgagaatgtatttggctaaataaatgtatttaaaatatacaaattttatttcccactggaaaattaagaaagtagcagtaccaaatgaataaaagctggcagttgatgtcttcaataatcattcctttaaaataaattcacaaacacatcattacaagctacttagaaatgtttagtattcgtatcttaaaatggcaccattgtggttttcaaagatattttaaacatcttttgtgaaacatactatttctgtttgacaatgctttgttctagctctgtgtgctgatacctacatggagtttttctgctattttagtgaaaacagtaattcttttatcttgagagctgcttctaaataacaaaaaagttaattggaatgtaagtttttaaaaaatgttaatattaaatagaatttttataatatgggcatttttcaaaacattttaatgaaaatatatagatatttgactttctttttttcatctagccttgctttatatttcattatttttctcactttttttcttaatattccctcactatctttcaacattatcattagttcctaattttaaaaataactcttatttaacttaaccgtctggaatttagccttctaatgaaagagaatcccttagtactctcagagattatataaagttattccaattttgtgtagatgacgaaaccaaggatcagagattaaatgactactagttactagcagaactcttatgaaagcctggtggtgacacccagcactgttccctgccatatccccaacttttactgattaaaaattaattcgcatgcatctaaacctaccttgaatgcacactaacgtaatgtgccattcaatgatgatgataaaatcccacttttctttgggtttctactaaaataatttactcactcagagtgaggtcaatgagaaaaactaaactaggctaagaaagagttgtagaatggttgttgagctaagtaggcaaccactggggtgctgataaaattaatggataaaatttaggaactgtgagagtatagaatttcttagtgcaagtaatgattagagaagcttcctgacatcccccaccctttctgtaaggactgttctttctctttgtaccttggaatgggggtgaaaggtgatttgatagctgaatttgggactatgtccagtgggatattatctaacttttctctctttctcttttttttcccctcagtttctcattagtttgtctttggcattcatcttcttttagtgcattaaaaaatgtttggcagatctcatcaatcccaagtcactctataattcctgtatttctttagttgtcgtttaacctgtccaaacttctacacaatgaacttcttaacaagattttaagttctctgtataagaggtttcacctcataacttctccagtaatccttcatttggcactatagagtatttgttaatggcagagatgatttttcttttaaaacctaaaaagactagctgttatttgtattctagcttttagctaacatataaagaatgtctacttttgctttaatgctaaattccgcttgagaaatagtaactgggaaagacaatttgaaatatatgccccataatgtgattgttaaatttatttctgctgttccataccattgctttgttttgcttttgacaaactaagccattatgctattagtttggaatataatactacagcaaaattaggtaacaatccctattttaaaattcccctaacaataatagaactgccagcatacttttctctttcagttgtagatgaatacattcgagagaatatgagctgtatttcatcctagattttaatattttcagatgtgactgtatttcctgatcattggtccaagttgtcctaaaagaaatttttctctccagacctaacagttttaactgcaagagtttactgtgggttatgttaatctgaattttaatagggccactaagaatctgagtgccttaggagattacccttatacccactgccatcacatccagtcaggcctgttgtgctctatataaatcttcccagctgaggggcaggtgcgggctaaaatccaactgcaattggctcccagacataattttatattttacagagaagcatcttattggcttatatgtgtttaaagaatggtctggcttatacatcttcagaaaatgagaattaaaaagtcaaaataattcttgacatctacagattgaacaaagaacttagaagaaataatactttatcttttcatcctggcattcctgagagaagagaaattgattgtttatcatgttggtttaatttttcaacccagacaatctgcagcaaggcacatggaccccaattttgatatcgtccatacagttttcattctatgcatggagctaattactgactttgcctgtaaagagaggattgtgtgcctaaattttgtctaacaaatgcaagcgtagaatgacatttactaatatttctatttcttccataggctaaataatagtaactaagtatttttaaggacacagccctttttttctctttatacaaaatgagagtatctgagccaaaatattaaattctagttcttttccgcaatgactagtgtcaagctcatgtactcttctgattctagactggagaagattattcaaacttgatctgtgtttcaggtttttaaatgtcctaaaaacagaaaattagattcagatctcaaaaaaggaattttggattgactttcaaagtactaatactaattatacttttcttttggtagcgtgactcttcttatacctaagaacatattacaaatgtcaaaaccattgcattttgacattgcaaaacatgccttgaactcttgaactactgtgaaaagaatcaccgttgtaaagactttttgtaagctagctgatactcttaagtatgtaaaaagattgtctttcagccgacaggcccaaaggaatgtatataaggaaggaatatgaaaaaataaattaggttttaaaataggaattgggcaataaactgtatcaaaaatatgtagatggattttagtagttgtaatttaaatgtggaaggtgaagagaatttcaaactccaaagagaaatgaatgatattcagatgtttcattaatttctagtctgtgaaaatatgcattttatagtaatatgtatagacttattttatttagaaataatagtgttttagaatttattaaaaactcagtgatagcctttataccaaaatgtttaactttaccaacagcaagtcataaaagtatttattttaaagctttttaatattatcgtgtaactttcatctgtcttcagatgtaaataattatctgcctaaatgttatatttttatgtatgcattttctgaaaatgtattgttttgtaaagtgggaaagataataaatcaagcacttcttgcacttgtttctgtgaagcatatagaactctattttaaataaaggaagatgtgtcgtaaaaaaaaaaaaaaaaa

SEQ ID NO: 258 - DNA, 8296 bp, Homo sapiens
ggctgagagcagctcggcggcgagactggcccgccgccccttccccccacacccgtcgaccttgtgggcagaagcttcccagagctccttaggccggcgcgatggcgactgctgtggagacggaggcctgtcagccgacggatgcgagttgggaaagtggcggcggcggagacgacgagatgaagcaggcgcttccggagcttgagtcctcccaacaaaatggcggcggcggcggcctcaacatcgctgagcccagcggcggcgctgggcgtgaggagaacgcgggggccgaggccgcccagagcctcagccacgagcagcctcaggactcctctgaggcgggcgcggccgccctgcccagaggccccgaagagcccgaaaggcctgttaggaggagttttcagatccccaggaagagcagagaaaagaaagcacttttccagccattaactccaggctctcgagaatttgaagatgttgtaaatattctccattcttcttaccttgaaccaacctcagtaacaaattttaactacagacgtgcttgcttggtacacaatgagcttttggaaaaggagtttacagaaaagcgaagagaactgaagtttgatggtcgtttagataaggaactttcagaatcctatgcatttctgatggttgatcgataccaggttcaaaccatatgtgaaaaaggattacatgtgggtcagtccaaaataacaattcttggcagtccttccatgggtgtctatctttctaggtatgctgatttattacaagcgaatcctttggacacgggggcaatgggtgatgttgttatttttaaaataatgaagggtaaaataaagagtatatatgaccccatgggtgtaaaaagtttggaatctatgttaaataagagtgctttggaccccacaccaaagcatgaatgtcacgtgtcaaagaatgccaatcgaattacatcacttttggcttacagagcctatgagcttactcagtattatttttatgagtatggctttgatgagctaaggcgaagaccaagacacgtttgtccatatgcagttgtgtcttttacttacaaagatgatatacaaactccgaagtttgtaccttcatcaagatctaacagctttaatacagatagaaacatagataaatataactataccttgtggaaaggacagcttttaaataaaggaaaacttttgtgttatatttctctgaggtcagccactcgtgcttttttgcctatcaaactacctgagaaattagatgttgaaacagttatgagtattgatcatctgaaacagaaaatccctccagcactgttttataaggaaacatacttaggtccaaatgaagttttgaagaatggaatgtattgcagcctttatgaagttgtggaaaagacaagaattggaagtaacatggagagtttactgcaaaaactagacagagaaaaacttgttcttgttaaacctttgggagaccgaggatacctttttcttctctccccttatcagatggttcctccatatgaatatcagactgccaagtctcgagtcctacatgctttgtttctatttcaagaacctagaagcatagttacttcacaaaaaggttcaaccaatgcagcaccacaggagaggcatgagagcatgccagatgtattaaaaatagctcagtttttacaattttctttgattcagtgtcgaaaggaattcaaaaatataagcgccataaattttcattctgttgttgaaaagtatgtaagtgaattttttaagcgaggttttggttcaggtaaacgagagtttattatgtttccatatgattcacgattagatgataaaaaattcttatactcagctcccagaaataaatcccatattgatacttgtttgcatgcctatatttttcggcctgaagtgtatcagttacctatttgtaaattaaaagaactatttgaagaaaatagaaaacttcagcagtttagtccactttcagattatgaaggtcaagaagaagaaatgaatggtacaaaaatgaaatttggaaaacgaaataactcaagaggtgaagccattatatctggaaagcaaagatcatctcattctttggattatgataaggatagagtcaaagaattgattaatttaattcagtgtaggaaaaagagtgtgggtggggactcagacacagaagatatgagaagcaaaactgtcttgaagaggaagcttgaggatctacctgaaaatatgagaaagctcgccaaaaccagtaatttatctgaaaattgccatctgtatgaagagtctccacagcctattggctcacttggacatgatgctgacttgaggcggcagcagcaggatacctgtaactccggcattgctgacatccataggctgtttaattggttatcagaaacactagcaaatgcgcgccattctgatgcatctctgacagacacagtcaacaaagccttaggattgagcactgatgatgcctatgaagagctgaggcaaaaacatgagtatgagttgaactctaccccagataagaaagactatgagcagcctacttgtgcaaaagttgaaaatgcacagtttaagggtactcagagcttattactagaagttgatgcaacatctaagtattctgttgctatttctaccagcgaagtgggcactgaccataagctacatttgaaagaagatccaaatttaattagcgtgaataattttgaagattgcagtttgtgtcccagtgttcccattgaacatggatttcgtagacaacagtctaagtcaaataatgttgaagagactgaaatacattggaaactgattccaattacaggagggaatgcaagaagcccagaagaccagctggggaaacatggtgagaaacaaacaccaggtatgaaatcaccagaagaacaactggtgtgtgtgccaccacaggaggcctttcctaacgacccccgggtaataaatagacagagaagttctgattaccagtttccatcctctccatttacagacacactaaagggcaccactgaggatgacgtgttgacaggtcaggtggaggagcagtgtgtgccagcagcagaggcagagccgcctgcagtgagcgaaaccacagagaggacagtgttaggagagtacaatctcttttctaggaagatagaagagattttgaagcaaaagaatgtttcatatgtcagtacagtttccacacctatcttttcaacacaagagaagatgaaacggctttccgagttcatatattctaagacttccaaagctggtgtgcaggagtttgtagatggtttgcatgagaagctaaatactattattattaaagcatcagccaagggtgggaatttgccaccagtcagtcctaacgattctggtgctaagatagcatcgaatcctctggaaaggcatgtcataccagtttcctcaagtgacttcaacaataaacatctccttgagccactgtgtagtgatcctttgaaagataccaactctgatgagcagcattccacttcggctttaactgaagtagaaatgaaccagcctcaacatgccacagagttaatggtgacttctgatcatattgtacctggtgatatggcccgggaaccagtagaagaaacaacaaaatcccccagtgatgtaaacatttctgctcaaccagctctttcaaattttataagccagttagaacctgaagtatttaatagtttggttaaaatcatgaaagacgtccagaaaaatactgtgaaattttatattcatgaagaagaagagagtgtgctctgtaaagaaataaaggaatatcttatcaaattaggcaatacagaatgtcatcctgaacagtttttggaaagaagatcaaaattagataaactattgattattattcaaaatgaagacattgcaggtttcattcacaagatacctggcttggtgactttaaagaagctcccctgtgttagttttgctggtgttgatagcctggatgatgttaaaaatcatacatacaatgaattatttgtatctggaggttttatcgtatctgatgaatcaattctaaacccagaggttgtcacagttgagaaccttaaaaattttttgacattccttgaggaacttagtactccagaaggaaaatggcaatggaaagtccactgtaaatttcagaagaaactaaaggaactaggcagattgaatgctaaagctctaagtctgttgacgcttctgaatgtctatcagaagaaacatctggttgaaattttgtcataccacaattgtgattcacaaactcgaaatgctccagaattggattgccttatcagacttcaggctcagaacatacagcaacgacacatagtctttttaacagagaagaacatcaagatgctttccagttatacagataatggaatagtggttgcaactgctgaagacttcatgcaaaactttaaaaatcttgtgggctatcacaattcaatcacagaagaaaaccttccacagcttggtgctaatgagaatcttgagtcgcagtcagatgctgttttgacattaacccctttggagctgggagttgggatttcccaacattaaacgtgaacacatttcgcagaagcttttagcatcggattatctggacattcacatctagtgtgagtgttgtgactaagtgaacttgtggcagaagaccaagctttaagggattgtggacttgcagaccctgacgcgttatattgtgtgagtagtgtataattttaaaacttaaacaaactgtgtatttcaatagaggaggactttttgttttttaaatgtagctcttttagaaaacgatgaaaaggatgaagaggatatgtctctggattcaggggatgaaatctcacatatagaagtatgcagcaattttcattcagaaatatgggagaaagagaccaaaggatcacgtggaacagatcaaaaaaagaatactcaaattgagttgcaatcgtctcctgatgtgcaaaacagtttattagaagataagacttaccttgattctgaagagagaacttctattgatatagtatgctctgaaggagagaacagcaattcaacagaacaagattcatatagtaactttcaggtttatcatagtcaattaaatatgtcccatcagtttagtcattttaatgttctcactcatcagacatttttggggacaccatatgccctttcatcaagtcagtctcaagaaaatgagaattacttcttatctgcttatactgaaagcttggatagagataaatctccacctcccttaagttgggggaaaagtgattcttccaggccatattcacaagagaaataactgtagtaactttttttttaagagattgttgtggactttgtttattaacaatttatatttcattctctaaacaaaaggttcttgttctttctcaaatgttttttcttttatttaaatcatgatggcctgtaacagttgaagcatctaaaaattgaaataaatatatatttttaacatatattgtacttgaattatctcatgttggcacttctaagttttactttttgtatgttacctgtacttaggcttcaaattgaagcctgttttatgtgtaaaatcagatgcttgcaggaggacggtaaacagcaaaggctttacttctttttctctaatgtcacctgatataaagtacttttgttgaagtgaattattttgatgtaggcttttgtatactgtgtttacacaggtataagtcagtaatagcagtgttaatatttacaggattttggctcgatacctcaagatttatctaacagtgcagtttcatttagataataaactatgtacataggacacattttttatctctaggcttagtcatgtaaaaactgcctattgctaaaattctggtaactttttgagagtattggataattttcagtacctgcgcaatccttgatttaatgaaattaaattttttatttcaaaagataggcttctgtttatcaaaggcgttgaacaatttgatttttaaattagttttagcaaaatggaagtataatgggaatatatttttgaggtggtcttagtagtaattaccatttgttgaacacattaatgctatactagacagatacagtggagatagctttcaaacccgtatctattcctaactactgcctctaatactaattactaacttgttactaatgctaacttttaaaaatgtttttgaaaattgcaatttctacaaataaatgtcatagtgcaaataaatgtcaggatttagagaaggagcctaaactgaatttgtgttatttcagtaaaagttatggagttatgggtctagacgtgttaataagttagacagaactttggcactttagaacaaatgcatgagtggtatttcagttcctaagttacataaaaagtgtgaaagaacactgtgaggtcccagcaacgccagactatattaaggtaagtagaaagtgtttttatagggcttcaatacccaggtggtgacagagcagaagaaccggtttttttttttttttttttactactaagcttttacaaaagaagtatctgttttattgtatagaacaagtacagcattttactacatagtatacaagtttttaatgagcatttaaaaaaataagtaaatctaggctatttgaaaaatacagttgagccagtgagcacattttataatttggaagacacaaatcaaatgtgaaggatttgattttctacatttaaaatgaagaaccaaaactctcttcttgattttcagctaaaggcaggagactactttccaactccttttgcttctggagaaggccctgaaatcacattgatatatgtttgttagtaaaatgtgcacacctgacttgcaatgttgtgttaaactagaattatattcacttggaaaacatatcgcttaggataaaattttgtcattcaaaaattttttcagaaatgcttgtactagaccacctcatttggatatatagctatcacatttgtaagattctgtttttagcataaaaatcaatagggatgaaaattttcttagaactcaagactccataactatgggggtaaatgaagtcatcccttctcccccagtccacccccaagtgctcttagatactgaaggagtctcccttaacatacagtgttttttttttgttgttgttgttttgtttttttttggagatggagtctcgctctgtcgcccaagctggagtacagtggtgcaatctcactgcaagctctgcctcccaggttcacaccattctcctgcctcaacctcccgaatggctgggactacaggcacccaccaccacgcctggctaactaactaactaactttttgtatttttagtagagacagggtttcactgtgttagccaggatggtcttgatctcctgacctcatgatctgcctgcctcagcctcccaaagtgctgggattacaggcttgagccactgctcctggccaacatccagtattttatcttgactgtcctaaccttaccttagatgctaacagaagggtcctgctgaaataacactgggtgctatattgatgggtaaatgtgtacatcctattccttcctctttatctcacaatttttgtctccactaagcaagaagtaaactaacacttcgtcactctaaagaaataacttatgtaaaactcttagtaaccctgtttgtcttcaaatgagtaaatagaccaaagtggggggacaattttctagttctgtagagggaaaaacatctgagtcaacattttgaaatgcagagggtattggtacatgacgacatggaaaagggcacttttaaacacagcttactcttcctcaagtacagagagtatatagtgaatcaaaactaactacagccattctttttaaagcccaagggatggagcaaaggtgtaaggatgttacctgtttgttttaatcagagagcaaaaagaagtcacaatagtttgggagaaaaagtagtatggtgagtaaggttatgcgtataatttcatactgaatttattactatttgggatgtacgtcaatgttctaacaaacactgccaacacgtcaattttttaaaaagcgtgggccacattgctaagaatttgttaaagcataactgtattttttgttttagggccttattgatgttttgccgttccaatgtatgcatttttttactcaataaacttgtcttaatttta

SEQ ID NO: 259 - DNA, 15164 bp, Homo sapiens
cgctccgcccgcccggccgccccgagccccgagccccgagccccccgcgccgggcccgggcggcagcggcggcggcggcggcggcggcgcgcccggccccctcccccggcgccggccacgggaggcggtgatgcgggcgcgggcggcctcggctgcgccgagagcggagacacaggctcaagatggcagattccgactgaggctgggggggccgagctcgcgcgccgctttcccgtccccgttgccatgaaccgcggacaccccggccccgatggcccccgtgtacgaaggtatggcctcacatgtgcaagttttctcccctcacacccttcaatcaagtgccttctgtagtgtgaagaaactgaaaatagagccgagttccaactgggacatgactgggtacggctcccacagcaaagtgtatagccagagcaagaacatccccctgtcgcagccagccaccacaaccgtcagcacctccttgccggtcccaaacccaagcctaccttacgagcagaccatcgtcttcccaggaagcaccgggcacatcgtggtcacctcagcaagcagcacttctgtcaccgggcaagtcctcggcggaccacacaacctaatgcgtcgaagcactgtgagcctccttgatacctaccaaaaatgtggactcaagcgtaagagcgaggagatcgagaacacaagcagcgtgcagatcatcgaggagcatccacccatgattcagaataatgcaagcggggccactgtcgccactgccaccacgtctactgccacctccaaaaacagcggctccaacagcgagggcgactatcagctggtgcagcatgaggtgctgtgctccatgaccaacacctacgaggtcttagagttcttgggccgagggacgtttgggcaagtggtcaagtgctggaaacggggcaccaatgagatcgtagccatcaagatcctgaagaaccacccatcctatgcccgacaaggtcagattgaagtgagcatcctggcccggttgagcacggagagtgccgatgactataacttcgtccgggcctacgaatgcttccagcacaagaaccacacgtgcttggtcttcgagatgttggagcagaacctctatgactttctgaagcaaaacaagtttagccccttgcccctcaaatacattcgcccagttctccagcaggtagccacagccctgatgaaactcaaaagcctaggtcttatccacgctgacctcaaaccagaaaacatcatgctggtggatccatctagacaaccatacagagtcaaggtcatcgactttggttcagccagccacgtctccaaggctgtgtgctccacctacttgcagtccagatattacagggcccctgagatcatccttggtttaccattttgtgaggcaattgacatgtggtccctgggctgtgttattgcagaattgttcctgggttggccgttatatccaggagcttcggagtatgatcagattcggtatatttcacaaacacagggtttgcctgctgaatatttattaagcgccgggacaaagacaactaggtttttcaaccgtgacacggactcaccatatcctttgtggagactgaagacaccagatgaccatgaagcagagacagggattaagtcaaaagaagcaagaaagtacattttcaactgtttagatgatatggcccaggtgaacatgacgacagatttggaagggagcgacatgttggtagaaaaggctgaccggcgggagttcattgacctgttgaagaagatgctgaccattgatgctgacaagagaatcactccaatcgaaaccctgaaccatccctttgtcaccatgacacacttactcgattttccccacagcacacacgtcaaatcatgtttccagaacatggagatctgcaagcgtcgggtgaatatgtatgacacggtgaaccagagcaaaacccctttcatcacgcacgtggcccccagcacgtccaccaacctgaccatgacctttaacaaccagctgaccactgtccacaaccagccctcagcggcatccatggctgcagtggcccagcggagcatgcccctgcagacaggaacagcccagatttgtgcccggcctgacccgttccagcaagctctcatcgtgtgtccccccggcttccaaggcttgcaggcctctccctctaagcacgctggctactcggtgcgaatggaaaatgcagttcccatcgtcactcaagccccaggagctcagcctcttcagatccaaccaggtctgcttgcccagcaggcttggccaagtgggacccagcagatcctgcttcccccagcatggcagcaactgactggagtggccacccacacatcagtgcagcatgccaccgtgattcccgagaccatggcaggcacccagcagctggcggactggagaaatacgcatgctcacggaagccattataatcccatcatgcagcagcctgcactattgaccggtcatgtgacccttccagcagcacagcccttaaatgtgggtgtggcccacgtgatgcggcagcagccaaccagcaccacctcctcccggaagagtaagcagcaccagtcatctgtgagaaatgtctccacctgtgaggtgtcctcctctcaggccatcagctccccacagcgatccaagcgtgtcaaggagaacacacctccccgctgtgccatggtgcacagtagcccggcctgcagcacctcggtcacctgtgggtggggcgacgtggcctccagcaccacccgggaacggcagcggcagacaattgtcattcccgacactcccagccccacggtcagcgtcatcaccatcagcagtgacacggacgaggaggaggaacagaaacacgcccccaccagcactgtctccaagcaaagaaaaaacgtcatcagctgtgtcacagtccacgactccccctactccgactcctccagcaacaccagcccctactccgtgcagcagcgtgctgggcacaacaatgccaatgcctttgacaccaaggggagcctggagaatcactgcacggggaacccccgaaccatcatcgtgccacccctgaaaacccaggccagcgaagtattggtggagtgtgatagcctggtgccagtcaacaccagtcaccactcgtcctcctacaagtccaagtcctccagcaacgtgacctccaccagcggtcactcttcagggagctcatctggagccatcacctaccggcagcagcggccgggcccccacttccagcagcagcagccactcaatctcagccaggctcagcagcacatcaccacggaccgcactgggagccaccgaaggcagcaggcctacatcactcccaccatggcccaggctccgtactccttcccgcacaacagccccagccacggcactgtgcacccgcatctggctgcagccgctgccgctgcccacctccccacccagccccacctctacacctacactgcgccggcggccctgggctccaccggcaccgtggcccacctggtggcctcgcaaggctctgcgcgccacaccgtgcagcacactgcctacccagccagcatcgtccaccaggtccccgtgagcatgggcccccgggtcctgccctcgcccaccatccacccgagtcagtatccagcccaatttgcccaccagacctacatcagcgcctcgccagcctccaccgtctacactggatacccactgagccccgccaaggtcaaccagtacccttacatataaacactggaggggagggagggagggagggagggagagaatggcccgagggaggagggagagaaggagggaggcgctcctgggaccgtgggcgctggccttttatactgaagatgccgcacacaaacaatgcaaacggggcaggggcgggggggggggggggggcagagggcagggggacgggtcgggacaccagtgaaacttgaaccgggaagtgggaggacgtagagcagagaagagaacatttttaaaaggaagggattaaagagggtgggaaatctatggtttttattttaaaaaagaaaaaggaaaaaaaaaaagtcaataacaaaaaacccagctcaagaacccattctacgccaaactggaaaggagaagagagcaacaggaagattccagaaacggggggccccagtttttgaagaactttatgaacttttcaaagattattttcatatggcagcaagtgatacggaagactgctgtcagggacacctgatatggaaatcaaatagatttttaattaattgaacataagatttagggatttttccagaactcgaaagggtcaacagccctccagaatgtcgggctgcagcctgaggaggctgatgtttggagctggtgtgggattggcgaagcccagtccgggctccctagtcaggaaagacgggggacggccaggctgctggaaggcccccgggggcgcggggcgagttttctttttctgagcactctggataaatccctaagcaacgttgtttctcaaatgtcattaataatgtgtgttgcaaactttaggtttttttcttttctgaaaatgtattttctctttgaatccacccctagtcgcgtagcgtagggctagcggtcgtcacagacaccctagtagaatgtagcactcagcacccttgtctcctaccttgtgttcaactccaatgataccaatagaatattcctcaatgtaattgcacaaaaaaaagcgatataacataggcatgtaaccaatgtggcggtgcaggtgtgcgggtgagcgagcacgtgtgggtgtgcacgcgccgccctccccgcgtggccctcggcgccgccaccctagctggcgcagtcttgacactgcatccttccctcctagtgccttaccgagcgacagacgcggcgtgagggtttacttccactggtactccaagaaactgaggctagtcagacacaatctcagctcttctgttgtgctgttgtaacagtttacgctggccttttttttttctttttctttttctttttaaaatgttaatgcccgttgtctttcctgggctgtttgctagcggaaggatgccagggaagccagcaggagctaggagagagtccgtggatctcgaaagaaatatgggagacagatgcccggcgggtgcgtctggagatggggacggcgggagttgagttgtggcagtagttgagttgtaatttgtgggcggaggcccagagagactccccacccttcacccctgccccactctgtccccagttccgccatttgtgaggccagaggtttccggactgttggcctcgccaggcagccgtctcccgccccaggcggcatcccccagtccctcccgcctccacgagagcctggagctctcagcctcgcccggggctccactctctcctccggctccctgggctgttttgctctaacgatcttgccagatccctccctctgtagacaaccaccaacctctgtttgctgttgaattctctcctcacattacccaggtctgctcaagacatgattttggttttggtttctgagggttctagtgggcagaaggttggagggacacttatgagggtggccgggggtctgacgctgcactttggaaaaactcacacagttgaatttccaaagaaatctgccctttgccctctttgcacctttgatacattctggaagttttctcaggctttggacacttctggggatggaggtgtggagaagtggggagttccctctcttcatagtaaataactctgaaatatgtgaatgtgaatggcaggagaatctggccaaggatggggccgaaaagggtggttctaattgtttgcttctgatgttgagtctttagctgaccccacaggcaggtttccaaggtgcaaagagatctttcccgagtcagcggccccatcctcatcctccctccctttacttcctcactgtgcagtctccctcaaggatctactgtgaaaggtgtgtttgtagtgatatccaacctaactcagtaacgaagtcgttacttagctcttagctgtgaaataactctggaaacttccccaccccaaccataaattcttacttataaagaaacaggtccccaaactggaaacagcttagtccaggcctcagcgagaaggaaggacaccatgactgctccatgctgggcacagccgggcagtcttgccaagtgcctgctggaggctgtgccggcaagaggcctgcagcaaggagattcccttccctcgggccattatcaatactgtctttatctggaggtggggaagcgcagccctctgagacagcaggacaatggtcagttcagagagggtgagggcagcaaacgcttcagaggacacagaagccagaggacccccccccgccccacagctgggtcagcctggaaaatccatctattagggactttttggcagccagatggcagcaatagcccattaggtctcatcccgagttccaagtcttggctgcaaatgagcctcagttcgccttactggagagcacccccagattcctgggcacagttcatttccagccctttctagatctgatcttttagggggaaagacagcttaaaatgttcttttcattttaaagaaaattattctgtctgcttaagttggaggctacttactctttcacctgacattttctttccttttattcttccagatcaggaatgaaatttccatgctgctcataaagataatattattgtactaattatttttattaccattgtaattatgatcattatgttgatattttagtcagggttttaaatgcacatttattccaagtatctttgtgttttctctttaatatttaaacttattctctctgtgagtatataagtagactggagggacatccagatgtccagttttgtcaggcaaaaaaaaaaaggaaagacttaggaagtaggaaaattgtttctgtcatctctatcccaacaagagacgtcaagaaagatccaccacagaacaaaagtttaaagaagaatcaaagccttgattgggcttctgacaacatggtcaccatcaaggttgtcattttctagatcccagaggcctgggatgcgacgtcaggtggcatctcatgggctcggggaatgtcgagtcactgactgtccagcccttagccagcttctctcccacatcctcagagctctcctgtgcttctgaaatctgttaactaaatctttggcttgcctctggtatttaagcaagaaaattccctcccagaggtgaccccatccgcttccccacaatccatccttttgccatcggcgcacctggggcgtggcttaggttcttcaatgcagggacatttgccccctcccagaagctgctgggcacagtgaggtggcgtaagagtgactggcaggtggtaccttccccaggaaatttcaccacaccacccagttcctcagcctgccccctccccctgtgatgcatgcccccagcacccaattctagccagctggaagtgggtggagggacagcaggaggccagagaaaccctgaacaaagctgggcggctgctcaggcatcacaggctgcaccccctctgaaagcatccccactgggctccggccacatcttcagtgcactgtgctgtgtgcgctgggtgctcacacgctgtccccagacccacaaagtgctaggccccagttgaagaaaggggtgaaatagccagcttcaccgaagggaagggaagggaagtattgggcgatgccagccccacagacgctcagcaaacattagtgcacattctcctagtcctcacccaatggcctcctctacccccatgcatggagctgccacatcagaagccccaagagaagctccctgcaggagaggccagctccctggatgcccaattgcatacctggccgaatctgccattgagtcaccttagcaaataggctgctgtcactaggaccaagctctcaagcagagggatgccaacctagtccttacttagcccacgaatcatctagagcatcctctagtcttttgtgggctccctccttcccatttgaagagacattgttcagaggaagaggggaagatttgaaatgtcaggtcacggaggagtgtttaactggagcctggtgaaccgcagggcaatttgcttctgctcactgggttctgactggcccgtctggacgtgggcccccatgtctctgtgcttagggcctcttcatgatgttttggatgtttccaagggaagtgggtgagcagatcaaggggtgggagagtcgaggcttgatgccagttaatactgtgaagtggagcgtgcggtcagtggaattcagaggaaaaagaagggttggagcaaagcggcattcatctcctggactgttagcctttctagtcttcctggtggctgaggtgttcacgggctgggggagccagctgacctttgtcctcttcaacctagaagactcagcccgcccagacaccaacgtgtgagacggatggacatcaggaagggaaggggagattagcccaactgctgacagaacgatttcccttggttggaccttgggaatggcaaacactcatattggaacaagcttggggtggaagatttaggccgtgtgagcatgtgtgagtgagtggaacaaactttcttggaaactggagggaggagatgaggaggcttcgggaagtattactgatggctcatggttgagagagcgacgtggggacccagctcgccccagcttttgtcccaggttctctttgtctgatgctgagggcagggtggggtgtgggaccaccactcttgttggcctgtcaagtagaccctaggacagaaaatggaaagaaggaaatggctcggtgctctcaactagcagagagaattgaggagaggtaagggttccttctgcaggccagcctgggactccacagcgccagcaggagtgacttggccacaagacattccagccccagggactttgcaggcttcattccctgtctgtgtcttttccttctggtgtgttttacagacttctgatggggaagcttcaaacttgagcaggccagagatgtccttaccaaattggaaaggaaggtgaaactgttcctttctttagccaaagaacccttctcaaagacgcctccagaaatggacaaaatggccttcccttcgttcctttccaggcaataatgacatcattagtgatgcaattctatttgtctttctctttcctctctgtccttttttttaaaaaaaaaaaatgcatttatttcaaaactgtgctattcttttaagaggagtggaggtgaccccttcgatgctgctgctatcgggagacaaggtgccataccaatacgtgggcttgactaatcccaggccaccatgggagagagcaaagcagggctgccaggagttcagttgcatcaagggcgtagagcacgcgggggctgggctcggaatagcagtacttttccactttgatgccttagaactctcacttctcatctccacagaccagactcagtaaaatctcaggccactagagaatggaaggcggtgaaacaggatttaaatgcaaaaaaaacctattggaggcttttggcaccgtggctcactagagggacccagcatagtagaggtttctcttgttgcagcttctgaaaagttcaaaaaagaactccaggccgttcttccctcaaacccagtgagagtttgcagagaagtgccccctgcagggctcccgtcccagaacaccagcaccagagagggtcttcccgatgccccccgctggacttgcccaagcctctgggagcccctcatctcagatccctgtgttgaacatgacactgactgtcccttatttgttaaaatttgcaatatctctcaagtaaataatagccaacatttgttgaatgctttcatgactcccgggctaaggcctttatgagcgttgtctcaaggggccccaacagccatcccacagggagggggataacagcccccatttatagataagggagctgaccggatgctctgagaagtggcaggtgttgaaggaaggataaagcagtgatgggccagaatccccaaggttcccttttttgttcatcaggcccttcctgagatgtgatttttaatcttttaactttttttaattaatagcaatgcgtggcctcatatttctatgaaccatttagtgatactcccgcttcctgcatgccacacactgtgctgggaattgctcatgggttgtcctgtttcatcttctccgtagccctgtgagatcggcaatattagtccccctacagccaaggaaactgcccagagccacacaactcttgaggggcgaggagggcttgaacctgagtctgcccagctccagaactgagcttgcagccattagccacagctgtctcctgcatgtctgagcaaagaaaggcctttacacagcatcaccctgtgccatcccatgcaccgtgggactcagctaaaggactgtgcaaagagggggctcctgagttggatttaggcaaaaggggcagaattcgtttgatttttagagaaaatctctggagagtttcttttgattcatagaattccttttagatttctttccagcataccaactagctttagtagtgctgctacaaccagctcttataagtaagagtgaaaaagtattcttttcttctttaaaaaataagtttttcttgcttatagttaattctagaaaggcaatactaaaggtatatatttttttcaaaatgctattttttactgcacttgataattatcctgacagctctgatctctgtaatagattcactcttcagctctgggcagaaccagaggcagggttcacaccaaatttgtaaataccatatgtgggtctggtgtccaggaacttttttctttctgttaaaaaaaagaaaaaaaaaagaaaaaaaaaaagaagtagaggtggaagaaagacaagacttagaggaacaaaagaatgttttcttttgagatactcttctcaaagaaatagcaacaattgtataaacaggaaaaccagccagctttcatgataaaaggaaggcgtgtctcttgccctggtatgagattaacagaaatacagatgcatttttattttgattgaaagatggtgagaatgtagaaatgcttaggactagatttttaattttttaaaataactattatcatttattatgaaatatttgttcagttgttttgagtgggtttcttgttccttttttcatttaaaaccttctttgttgactggctccaggcttgtttgcctaaattcttaggtagtttacacaagttctagaatcttttagaactttaactccattggaagcaaacctaactaatcggagtttgagatcctggttggtttcaataggtattctggaattctggcagaacacctaaagattttttttttttttagaaggttttagatacattatcttacacaaactgtgacctaatggcaataattacctcaaatgtgggcattcatcctggttttagccttttttgaaatcatgtagccagcttgatcttggaatttaaagactatgaattctctgtgggctgaaaataatgattacttcatacccccggtcatcgttgcttaagtgaattctgaaaatagctcatctttacaacaaaaattaaaccaaggaagagattattctttgtgtgttgtactcaaatgcgatgttcaaatgcacatgttaagtatatatgtttttagctactgtaaaatgctgttagccttctaagctatcaaaacagtcacattttaaatgagtaaactaaacaattgactgtggatacttaagcatatttctggctacgttttatagttaaagtgttttatagtttacatttagactggtactttttaaagaaaagttctgtttataactgacatccgcaaaccccagtgaatgcctcttagttggaggttgtgtctcccccaaggcaagtgtgttgtcccagactcttctgtagtccagcatgcgcacttccctctggattattactttccacgtgaactcaagagaacatgaaaggcaatccagatggagggaaaaggtgtgagtccgcagcccgggccagatgcgaaggtctcatgcgtgtcgtctaaacacttgtcttcaaggccttctctctgacatcttggaagagtcattgagaacagataacctggttcattgatttttgtcttgatttgaatatttaacttattaatagatccactgatttccaggcaccaggcagtagaagagactgggattcaggtgaccatgaaggcacagctgctacttctgggccgggggtgatattttgatcagcgttttgtaggggaggaccatatacccctattcccatggtcgctggctgggttttccatatatctgctgtcatttattcgttttccccttaaaagcaaaatcaatgtaaaaggctatgtttacgttttactcattgtccagcttagactcaaagtctagttcggtgggagggggaccttagcatcctctcagagatggtcagggctgagcaggaggaggcagagacagaggggcagctcagcctggtccattgagacccactctaaacagacatcatatttggaacaagaagatgcttcgagacaggaatgggccccactgtcatgcagaaacagactgggggaatggcagtttccctgagtcttggtttcttttatgttttctcttgtgccaccaccaaactgcagaggacctgctgtgacctaaagggcattcctttagcagataagaccttgaaaactgcaaaacacctgggaccagggagcttttaaaaaatacaaaaaaataccacatttgctttttccctgtgaactgtattgacagcgtgttcttaggacagtcttttggtggaaatgttactgtaaaatagttttcatctcacccctcctaatcatactcccactttcctgtttgtgtggtggtgttgctgttttttcctttacatgaattaaccaaatgaattttgtgtcattgtttttggggcttatatttttaaaacatagaaattgccttttgttcatttgaaaagtaagtatgttgtatctgaaaaagggctctgcctctgctctccctcgcttccttgtaaccaatctccaaacgaatctctcctggcaccgcccccttccttatatagggtcactgtccccggggccacctctgcctccaccctgctgtcaccactgccctgggccaaggcacccaggactcccagaaagcgcgagagccagcaagaaggccccactcagccttgagactggtggtcacacctccctgtcagagtcgcctgctgggctgaaggggcaatggattgtcattgttgaaattgtttggctcaggttataaggaggaacttgggaagtagaaagtgacttgaccatgtgcatccttggtagcttcctgtaactaacaaatggaacagagagcacacccccgccccgccccaccccaagcagatgttcccgtcagcgctgccctgagtcagtcggtcccccgtttctgctctcctcccttttgtgttcctgctcacttcaagcttcttccatggactttccagggcacagtcatctctagcccccaaatcatctcttcatcctctgtgtgtgcatttttttaaccaaatgaaatagacaagaaagtcatactttggggcagcagaatttctaatttagtagaatcactgtatagagatagatgttgatatatatgtttgtgtatatatatcaaaccaaattggataggagaagtatagctttacagatgaggagaaggagctctttagaggtcggagtcaagactggtgtcttggacgtgcatgggctgtgtcccaggccactccgcacacatggggctgaggcgtggcgccgggcccttgtcatccacctcaccacggcagagccagcaggccctgtagggtgctgctgctgtctcactgggtcccagcttcaagcgcatcagtgggtgacgggggcaacaaatcagagtgactggaagtttccatcccgttttgctttgaccacgtgtactgagctgcagcctctgatactctgtcacgtttccaaaaatggtatccattaggatagaaagagaatggatctgcagaaatgtttacctttcaactgctcatgaattcaggacactggatagaaagactcactccccaaaatgagaacagggaagaggagacccggcgacactaagtcaccaggtccaaggaacgtggctccctccccagggtcatctcacctagatctttctctcccaggtcatctcagctcaatctcaataaccctatgaaagccctggtctgttgtgttccttcaccgtacggtttctgtaataaaaagtgttaatccatgttaatctgtgtgaaaattattgcgtgcaacagtattttctcgtgtacctctttttcctatgtgaattgtccctcttttttatttataaatgtctacttttgtttttttaaagacaaaccaatgtgttgtagacctatatgtaacctattccttagtctcatattataggtatgttataagaatggatattttacttggctttagaatgttttacaagaaaactaattcttaactgatcaagtccttgctactaaaatgcttgtgtttttcatcatgacgtcgtgtgcttctaaattaatcattttcgttgtagaaaaatggagtgaatttatattagtcttggaaactaataatagcattgtaaatttatgagatgattttaacagaaaaaatatagaagaatatagttattttaattgtaatattactaactgtagggtgagaaaaaggggggggggtcccattgtggtgaactatgttatagcttgttactcatagtttctttttgatcattttttcggtctccgaggtgaaatgacttattaattaaaatttgtaaactcacatatgcatattgtatatgtgtagaaatgtaatcacactttgtcttggaattacattaaactgtttgaaatcactgtaaaaaaaaaaaaaaaaaaaaa

SEQ ID NO: 260 - DNA, 6945 bp, Homo sapiens
atgagaaattctgaagaacagccaagtggagggaccacggtattgcagcgtttgctacaagagcagcttcgctatggcaatcctagtgagaatcgcagcctgcttgccatacaccagcaagccacagggaatggccctcctttccccagtggcagtgggaacccgggccctcagagtgatgtgttgagtccccaagaccaccaccaacagcttgtggctcatgctgctcgacaagaaccccaggggcaggaaatccagtcagaaaacctcatcatggagaagcagctgtctcctcgaatgcaaaataatgaagaactcccgacctatgaagaagccaaggtccagtcccagtactttcggggccaacagcatgccagtgttggagctgccttctatgtcactggagtcaccaaccagaagatgaggactgagggacgcccatcagttcagcggctcaatcctggaaagatgcaccaagatgagggactcagagaccttaagcaagggcatgtccgttccttgagtgaacgactaatgcagatgtcactggccaccagtggagttaaggcccatccacctgttaccagtgctcccctctccccaccacaacccaatgacctctacaagaatcccacaagttccagtgaattctacaaggcccaagggccacttcctaaccagcatagcctgaagggcatggaacaccgaggccccccaccagaatatcccttcaagggcatgccaccccaatctgtagtgtgcaagccccaagagccagggcacttctatagtgagcatcgcctgaaccagccagggagaacagaggggcaactgatgaggtatcagcatccccctgagtatggagcagccaggccagcgcaggacatctcattgccattgtcagccaggaactcgcagcctcacagccctacttcttctctgacctctggggggtccttgcccttgctacaatctccaccatccactagattgtctcctgcccgacaccccttggtcccaaaccagggagaccattcagctcacctgcctaggccgcagcagcatttccttcctaatcaggctcaccagggggatcattaccgtctctcccaacctggcctgagtcagcagcagcagcaacagcagcagcagcaccatcatcaccatcaccaccaacaacagcagcagcagcagccacagcagcagccaggagaagcctattcagctatgcctcgggctcagccatcctctgcttcttatcagccagtgccagcagacccttttgccattgtttccagagcccagcagatggttgagatcctctcagacgagaaccggaacttgaggcaagagttggaaggatgctatgagaaggtggcaagactgcagaaggtggagacagaaatccagcgcgtctcggaggcatatgagaacctcgtgaagtcatcctccaaaagagaggccctagagaaagccatgagaaacaagctagagggcgagattcggaggatgcatgatttcaacagggatctgagagagcgtctagagactgccaacaagcagcttgcagagaaggaatatgaggggtcagaggacaccagaaaaaccatctcgcagctctttgcaaaaaataaagaaagccagcgtgagaaggagaagctggaagcggagctggccactgcccgttctaccaatgaggaccaaagacgacacatcgaaatccgagatcaggccctgagtaatgcccaggccaaggtggtaaagctggaagaagagctgaaaaagaagcaagtgtacgttgacaaggtggagaagatgcagcaggcccttgtacagctccaggcagcatgtgaaaaacgtgagcagctagagcaccgtctccggacacgactggagagggaactggaatccctgagaatccagcagcgtcagggcaactgtcagcccaccaacgtttcagaatacaatgctgctgcactgatggagctccttcgggagaaagaggagaggattctggctctggaagctgatatgacaaagtgggagcagaaatatttggaggagaatgtgatgagacattttgctctggatgctgctgcaactgtggctgctcagagggacacaacagtcatcagtcactctcctaacaccagctatgacacagctctagaagctcgcatccagaaagaggaggaagaaatcttgatggccaataagcgttgccttgacatggagggcaggattaagaccctccatgcccagattattgagaaggatgccatgatcaaagtactccagcagcgttcccggaaggagccgagcaagacagagcagctgtcgtgcatgcggccagcgaagtctctgatgtccatttccaatgctggatcaggcttgctctcccactcatccaccctgactggctcccccatcatggaagaaaagcgagacgacaagagctggaaggggagcctaggcattctcctgggtggagactaccgtgctgaatatgtcccttccacaccctcgcctgtgccaccctcgactcccctgctctcggctcactccaagacaggcagccgagactgcagtacccaaactgaacgtgggacggaatcgaacaaaactgcagctgttgctcccatctctgttcctgctccagttgctgctgccgccactgctgccgccatcactgccactgctgccaccatcaccaccaccatggtagctgctgctccagttgctgttgctgctgctgctgctccagctgctgctgctgccccgtctccagccactgccgctgctactgctgctgctgtttctccagctgctgctggtcagattccagctgctgcctctgttgcctcagctgctgccgttgctccttctgctgctgctgctgctgctgttcaggttgctccagctgctccggctccagttccagctccggctctggttccggttccagctccagcagcggctcaggcttctgctcctgctcagactcaggcaccaacttcagctccggctgtggctccaactccagctccaactccaactccagctgtggctcaggctgaggttcctgcaagtccagctaccggtcctggaccacatcgtttgtctataccaagtttgacctgcaatccagacaaaacagatgggcctgtgttccactccaatactctggaaagaaaaactcccattcagatcctgggacaagagcctgatgcagagatggtggaatatctcatctaaacggccaaatcaagagctgcagattatcagcaaaaatgcttttaatcattttcccccttttattggttcttgttttgagggtgaggacaagggttgtggggaggggatgttttttaacaggactttttattggaacaatgtactacttgagtaataccatgtgaacaccagtctattttggtatgcttagggagtacctctaaagacagattaatcagaatgtgctctaaagcttattgtttgaatttatacgaatactgggactgttaacaggtggctatacatcgacgttttcaatgtgcttaaatttgtttaaattttccatattctagatcattttttattgaagagcacagtatgtgtggaagacagtgtataacacgtagtttggaagtgggaagctagagagaattgagtgtgtgctgttttgtatagttactatcctgtgcagcagctggagaaagcactcacctcaggcttacaaaagggaatagtttcaggagctatgtaagctggaaaaaaggtagggagttttggggtgcagaagggtactggagctaattttttcttccagtttcccagctaccctgccccagggaattgtgtttgtcttcatttcagtggtgctttggaaatggattcttttggttccctcctggaggttcatacattcatatatatgctctggagtaatttatgcatttggataattaatatattgctttcagatgctgggagagtacattaactgagtgatgcgcaacttcctctctcttagggaattagaccatcagaggccttgatggagagttgcatggggtgctatatgcagacttccatggtttgtgtgtagccatgaacacagcttgcttgcatttagtaagaccaatcagcttagtgtttatttcttctacagcacagattcactggctgggtctccagtctcaaattgccaatcatttgcaaagtgaggaaggatctttgttgacaggttgaatgctttgaatttctggtgactactttgaaataacttgttttgtttgtcaaattctaagcatatgtcttaaaaggcatttttgactatcacctccaagggaatagcttgagaaacccaaagtactatgctgcagtcgggggagaggtggattgcagcagtatcctcaactacctcttctcactgtcagtgacaccatcttggaatacctttgggaagcagcaggaaatgtgcatgtgggtagagatcaaaggaggcaatggctccaagccttgccatagggctgcctccaaggacacagaaggatgccagttgccacaggtccctgccctgtgtcacctgtctgcccttcattaaggtgagaaatctgcagatagcatcattaagatcagttttaaggggtatagggagggtgagggaagtggggggtgttaggtaagggttgggggtagaggttttgggatgtcttagttagaaaccagattaatagaagagtaggcctgatatattacatcatgagccatagtggtgggaaagaactttagcaatatagccctacctcctcattttagtgatgaggaatctgagaactggagaggttcagtgactttttgaaagtcatacaacacagctaaccattatgccaatcaccatgcttattttgggaaactctttatcttttttaaattccattttatgaaaaggcatcttcatggtccagggaatatgtatcttgtaaaatgtacctggttggagtagcttgtccagtcttgacaaactactgaatttctgtcttgcctctccttcagtgccttttaaaaggttttcccttttctgatctgcatttcaacatagagtcacataaatgtccccctgagaaaccaatcccacttctttctaggagattgggtatcttagataatcttttggggttcctctgtgagtataggaatggtatccttcctaattatcttccaaaggaattattttgtgtgtgtgcctgtgtgtgtgtagagacataaaggagggtgatgtgattttcagctagtcctttcacattttcaataatgaggtaatcatgttacatacacattagtcctcagttataaagtgaatctcagatagaaattaaaagtgcagttgtgttaagactctttcatactaccctttagtcataaggagaaaaaaacactcaaatagtagaagcagcaagtagcaaacttcaggagagctactttctatccaaataatttaaaaaacacttttcacctactcctttcatggttataacacattggcagactttttgctggctctgggagccatgattttaatcacattctgcaaggtgacaaatgtcatacattccacattgtgtggtagccatctctttagactcatgtgttttggggaaaggaagaagttcttggctgagtactattttgaactttccagaaccctctcacaccagagacagttcttctctgttcagtttccaatccccgataatttgctaaaataacattgtacatccaagagagggaagaagagtatgtcagtatattatgcagaagatagatacagccttttcagaagatctccactagtttttgttccaaaaattcaagtttatgggagaaatctcaattagccaccttttcacagttgtgtggatataacatttgggggatctttctggactcctacctatctgtgcattttaccggcacctcaggaaaggagggtgaccaggttgtcttagcttgtactgcttggtgatctctgaggaccttctaattcagttgtaccccagtgttccatgtatagaaaaacttcattagaacaaactttacttgatatgaaactcctattaacagtctttttttgaaataaaaagtagcttgagctttcttttaaaatcatgtatcttgattgttgatttaatgaaggatttccttttaatgctgcttttgagcttcaaggtaataggacagcaggaacctaaaatatctgccatcatctgccataggaaagatacccagagacccatcatgttctctttttgttgttacactgttgggtgggtataacaattggaaaatgaacaaactgattgattgtgcaaactactttttatgacaagcctaaaccctcataatgcggcagcttaaagtgtatacatatgcactaactttgatcaattatattctcatatctgttagctacacagtctcctattatctcaattgcttatgtgcatatggaatatgttacttaaaacgtgtgcattcttactgaaaatgttttcaaaggaaggtatcagctgtgggctaattgccaccaatttcagcctgccacgattcttggaaatatgtcttccaagtgccatccatcatcagtaggacaagtgtcgggagtttgtttatttttttccagtagcaacgatgggttacatggagccatgaaacctccttctggcctcccttgtgattaatggcatgtgtttgtaaaatggatagctggggttggcagatggctagagaagaatcgcctttggtttaaaatgtatgtggtcccctaatgattgtgaccccattctgtaatcaactgagctagttccaataaagttaagcaggtttaaatccactttgtgcctatcttttcactgacaataaagttagctattttaaaatgca

SEQ ID NO: 261 - DNA, 4956 bp, Homo sapiens
attgcagaggcctctccgtcagtattgagatggtggaaagtgaggagaagcaaaaagacgactacttctttccccatttcccggtctggtctttttggggtctactacgtagaggtgcatcagccagcgctaccatggaggcaggaggcattcttttgctctcgtacgtttgatgcaaatgatttgtatcaggggcagaattttaacaaggtcctcagttccttagtgactctaaataaagtaacagcagacatcgggctggggagtgactccgtgtgtgcccggccctcgtctcaccgcataaagtcttttgactcccttggatcacagtctttgcacactcggacttcaaaactgttccagggccagtatcggagtttggacatgaccgataatagcaacaatcaactggtagtaagagcaaagtttaacttccagcagaccaatgaggacgagctttccttctcaaaaggagacgtcatccatgtcacccgtgtggaagagggaggctggtgggagggcacactcaacggccggaccggctggttccccagcaactacgtgcgcgaggtcaaggccagcgagaagcctgtgtctcccaaatcaggaacactgaagagccctcccaaaggatttgatacgactgccataaacaaaagctattacaatgtggtgctacagaatattttagaaacagaaaatgaatattctaaagaacttcagactgtgctttcaacgtacctacggccattgcagaccagtgagaagttaagttcagcaaacatttcatatttaatgggaaatctagaagaaatatgttctttccagcaaatgctcgtacagtctttagaagaatgcaccaagttgcccgaagctcagcagagagtcggaggctgctttttaaacctgatgccacagatgaaaaccctgtacctcacgtattgtgccaatcacccttctgcagtgaatgtcctcacggaacacagtgaggagttgggggagttcatggagaccaaaggtgccagcagccctgggattctcgtgctgaccacgggcctgagcaaacccttcatgcgcctggataaataccctacgctgctcaaagagctcgagagacacatggaggattatcatacagatagacaagatattcaaaaatccatggctgccttcaaaaacctttcagcccaatgtcaagaagtccggaagaggaaagagcttgagctgcagatcctgacggaagccatccggaactgggagggcgatgacattaaaactctgggcaacgtcacttacatgtcccaggtcctgattcagtgtgccggaagtgaggaaaagaatgaaagatatcttctactcttcccaaatgttttgctaatgttgtctgccagtcctaggatgagtggctttatctatcagggaaagcttccaacgacaggaatgacaatcacaaagcttgaggacagtgaaaatcatagaaatgcatttgaaatatcagggagcatgattgagcggatattagtgtcgtgcaacaaccagcaggatctgcaggaatgggtggagcacctacagaagcaaacgaaggtcacgtctgtgggaaaccccaccataaagcctcattcagtgccatctcataccctcccctcccacccggtcactccgtccagcaagcacgcagacagcaagcccgcgccgctgacgcccgcctaccacacgctgccccacccctcccaccacggcaccccgcacaccaccatcaactggggacccctggagcctccgaaaacacccaagccctggagcctgagctgcctgcggcccgcgcctcccctccggccctcagctgctctctgctacaaggaggatcttagtaagagccctaagaccatgaaaaagctgctgcccaagcgcaaacctgaacggaagccttcagatgaggagttcgcgtcccggaaaagcacagctgctttggaagaagatgctcagattctgaaagtcattgaagcttactgcaccagcgccaaaacaaggcaaacactcaattcaagttcacgcaaagaatctgctccacaagttttgcttccagaagaagagaaaattatagtggaagaaactaaaagtaatggtcagacagtgatagaagaaaagagtcttgtggataccgtatatgcattaaaggatgaagttcaagaattaagacaggacaacaaaaagatgaagaaatctctagaggaagaacagagagcccgcaaagacctggagaagctggtgaggaaagtcctgaagaacatgaatgatcctgcctgggatgagaccaatctataagggatgtcctcagttctttctgttgaagaccagttctgaggtgaagctgggcacccctgacccaagtcggggtgcactcaggaccacagggcagggctgggtggggcgccaccttgctctctgtatatagaaaagctggagcttattctgcgaatggagacgatcaaaccatgactgatgaatccagacaggagggattgactctgaggacctgagctacatcaatccactctgtgaacatctcagttacctcattctgcaataagttcagtgactgactaaaagtcttgtttttccagactttgaattgaatatataaatattatatatacatgtttcttgtaaatatcccattttgaatgcatacctgtggtggttctgtccgggctaatccccatgctagaatgtcctttccagctacgtgaataagaagtcccatgcccgcatccaccggaagcagaagcctggtggatgcctggttcgttccgcagcaccagggcctccaccgtgctgtggcagcaccccccatgtcggtatttctaaataaccttatttatacctgcagagatacacttcagtcccattcagaagtcttctcttaaagcagcattacagtcccagacctgcgggtttctgagggcaacttgctggctgacagactcagtcttgacctcaaggaaggcccatacggcactgccgcatccacctagaggtgtttgctcttgtccgctgtctgagtactgtgattctcagatgagtttgctgcgttttgggaggacacagacggttctgtataggctagttcagtaacaacaaaatacactgttttgtcttccctcaaagagagatcttactagaacctgtaaatagaatgtattatttattataagtcactgcagctgatgaaaacagatggaggccatgctgcaggctgatactgatgggtggagttttgtcatcaggccagcctcatcccgaggtctcctccaccattggccgtagccagcaggcttcagtgctcaccgaaagtaaaatcccctccttcagcaagaataaagcaatatacaccttaggttccactaagtaacataggcataagcagggaacgtttcccccactgtgttccagtgcagaggagacgaagcctgtcctcaccgcggctcgctgggcccaggctggctctggaaagcctgtgcggtcctgggcaggaagcccggcccgtggagcaggttttcgttctgcttcagcaataaataagggtgaccacagggactttgcttttggtttcctttcctgtgaaaaggttggttttaaagtgagatacacttttccgtagaacaagtgttctatctttaaaaacccaaattgcagcaccgtggattactggtctcagaacaactcattgcgcatcagatttgactctctgattttctgtctattggccaaattgccctttaactgcacctgaatcctttgtgtactgatgcctttgagctgggcaccttgggagagtgttgtgttgctgtttacggttcttccttgcccttgctaattacagtctctggtgcccagcaagcccctttggcttccttccgtgactggtcacgttgtctgcctgggctcagcgtggacctgccccatgctgcagaacctggcctcacctggacttttcactagaattgccagcttcctcaacttagcagatcattcactcatgcgggcacaagcaaagatcaacactttcttttttggtaagcttgagttttacaagttattttttggtgatgcgtaagacattgcagtgggaaaccattcaacttgagtttattggagtttgctgttgtagcaggttttaactcaggaacaactcttgtctgatctctccgcccctctgccgggaggcgacattaactgtcctctcggagccggtagcgttgctgtccgagtccccaggacggatctcctgcagacctgccttaatgctcagatcgaagtatttcacaagaatacttgtgtttttaacagcccttcccctggacggtgcggccatgagggcctcatgttacggcattgccttttctttctgtggatccagtatcttcctcggctttttagggagcaggaaaaatgcgtctgagagcaactctttttaaaaacctgccctgttgtatataactgtgtctgtttcaccgtgtgacctcccaagggggtgggaacttgatataaacgtttaaaggggccacgatttgcccgagggttactcctttgctctcaccttgtatggatgaggagatgaagccatttcttatcctgtagatgtgaagcactttcagttttcagcgatgttggaatgtagcatcagaagctcgttccttcacactcagtggcgtctgtgcttgtccacatgcgctgggcgtctgggaccttgaatgcctgccctggttgtgtggactccttaatgccaatcatttcttcacttctctgggacacccagggcgcctgttgacaagtgtggagaaactcctaatttaaatgtcacagacaatgtcctagtgttgactactacaatgttgatgctacactgttgtaattattaaactgattatttttcttatgtcacaaaaaaaaaaa

SEQ ID NO: 262 - DNA, 6099 bp, Homo sapiens
cgtagctatttcaaggcgcgcgcctcgtggtggactcaccgctagcccgcagcgctcggcttcctggtaattcttcacctcttttctcagctccctgcagcatgggtgctgggccctccttgctgctcgccgccctcctgctgcttctctccggcgacggcgccgtgcgctgcgacacacctgccaactgcacctatcttgacctgctgggcacctgggtcttccaggtgggctccagcggttcccagcgcgatgtcaactgctcggttatgggaccacaagaaaaaaaagtagtggtgtaccttcagaagctggatacagcatatgatgaccttggcaattctggccatttcaccatcatttacaaccaaggctttgagattgtgttgaatgactacaagtggtttgccttttttaaggatgtcactgattttatcagtcatttgttcatgcagctgggaactgtggggatatatgatttgccacatctgaggaacaaactggccatgaacagacgttggggctaagagacagagcagcctgcgacagtgtggacctacctgtagcagctagcaaaggcctctagcagctacagtcccttctggagtctttatttgcatgcaaaatgcaaaggagtcctggtgacctacctccaaggcagctgccctcctgaacactcccttggaaaacagtaaacatcattttggaatgtgaacaaccagagactacacaggagaaaggaaaaaaaaattctgaagatgcaaaatcttgggtggcttcaccgttcagttttttaataaaaggaacaatatacaacacgttgttctttttctcttttgaaatcccttctattacagtgatttttttctaagattgtcaggatttgaagtgtatgttttgttttattcacagcgtaaattttattcacagtttaactgtctgcctgagtgtctttcctttctctaattaccttgaggaacccaagagcctgttgtaaggagaaaataaggcccttggatctcttgagattcacagatataagttattgaagggaagatggtcctatggaggacatatttaaagaagggaaaaaagaggctttctcagatatgtcagactgctatagtatacttctacagattatagacctccagtacctctggccagaaagatggtatcgtaaacaccctattttttttcttttcttttttcattaggtacaagctttgtgctaagaagttgacatactataagctacaaaagttctgtaaagtagatataactagtttcattttatagatagagaaaattaatctcttacagtgctaagctcacagagtttctaactgtaaaatgctagaacttgtctttcaagcctaaagacttccttggggctaaatagtgaaaaaagccatttcacaaataagtaaatggtatttagaggcatatttggatttcctggtaaattccagtctgtgagcatcatgaatattagtttaatgttgcatgggctcatgttgaagttttaagagaagaactgccttgaagcttaggtttccttagctattaggctactgactttcttgcctaaaccagggttttttcattgaagaccaaaacttaccttctccttcagtttgtagtttggaaattggtagaagagctttgtaaacttcaaattaagtacaaactaagtgtcatagtcaaatttactaatcttaattacagtattgttcaactgattgctatcttctagctctttcctgccgaataatggtcttgtttcctgctctgttggtttagagctgacttctttcagctttggtaagcctgaaattatggggttatgtttaattcatattgtctgggtggactttcctctcttgcatttctgcttgaatagaagaatttttctctagagagtagtttgtcatccttactctgttgattcagatgactctttgtatgatctgagaggtatactgttctgctattctgagaagaagtatttcagaaagatgaattaagagtacagtggactgctcccacctggaaacttttatctatctcacctctggacctgataaattctttatcactcaggaccttgatgacgctgctctctgaaaccctccccagctctctctattaccgtgagaaacatcagaactttggttcccattgcatatcgcaggtacctctgctttcatgccatgctgtaatggagtgattgggtagcatgttttcatctctttccagattgaaaatctgtatttctccctgtatatcttcaacacctaatgcacatagaactttgtaggtacctggaaaatgcaccacagttttcttttctttttgcagacttttcacaagtattaccaacttacaaagaattaattttgtaggattctagaaagacaaatcaggaatggtgccatatacatcttttttgattccctgctctaaagaatattatcaggttaccttcctgcagagttttaaaagaattgcatatttcaagctgactttcaggatgtaaatataaccaaagcaactgatatgtaaaaaatatattcaatggcattcctagattttcttctagggtgttttattgttttgggttttacatttaagtctttaatccatcttgagttaatttttgtataggtataagaaaggggtccagttttaattttctgcgtatggctagccagttctcccagcaccatttattaaatagggaatcctttccctattgtttgtttttgtacggtttgtcaaagattagatggttgtagatgtgtggtcttatttctgagatcttcattctcttccactggtctatgtgtctgtttttgtaccatgcttttttggttactgtagccttgtagtatagtatgaaagatagcatgatgcctccaggtttgttctttttgcttaggattgtcttggctatacgagcttttttttggttctatatgaattttaaaatagtttcttctaattgtgtgaagaatgttaatggtagtttaatgggaatagcattgaatctgtgaattgctttgggcagtatggccattttcatgatattgattcttcctatccatgagcatgtaacgtttttcccttcgtttgtgtcctctctcatttccttgagtagtggtttgtagttctccttgaagagatccttcacttcttctgtattcctagatattttattctctctgtagctattgggaatgggagttcattcatgattttgctctctgcttgccttttgttggtgtatagggatcctggtgacttctgcacattgattttgtatcctgagactttaccgaagttgcttatcagcttaagaagcttttgggctgagatgatggggttttctagatataggatcatgttatcttcaaacaaagacaatttgacttcctctcttcctatttgagtacgctttatttctttctcttgcctgattgccctggccagaactcccaatactatattgaataagaatggtgagagagggcatccttgtcttgtgccagttttcacggggaatgcttccagcttttgcccattcagtatgatattatctgtgggtttctcataaaaagctcttattatttgagatacgttccttcaatacctagtttattgagagtttttaacatgaagcgatgttgaattgtatcgaaggccttttctgtgtctattgagataatcatgtggtttttgtctttagttctgtttatgtgatgaatgacgtttattgatttgcatatgttgaaccggccttgcatcctggggatgaagccaacttgactgtggtagataagcttttggatgtgctgctggatttggtttatcagtatttcattgagattttttgcgtcgaagttcatcagggatattggactgaagttttctttttgttgtcgtatctctgccaggttttggtatcaggatgatgctggcctcataaaatgagttagggaggagtccctccttttcaattgtttggaatagtttcagaagaaagggtatcagctcctctttgtacctctggtagaattcaactgtaaatccatctggtcctggactttttttcattagtaggctatttattactgcctcactttcataacttgttattgatctattcagggatccaacttcttcctgattcagtcttgggagtgtgtatgcatccaggaatttatccatttcttctagattttctagtttctttgcatagaggtgtttgtagtatttgctgttggttgtttgtacttctgtgagatcagtggtggtatcctgtttatcattttttattgtgtctgtttgattcttctcttatttttgacaaagctgacaaaaagaagcaatagggaaaggactctctattcaattaatcctactgtatatctggctagccatatgcagaaaattgaaactgttcctgtttcttaatccatatacgaaaatcaacttacgatggattaaagacttaaatgtaaaacccaaaattataaaaccctggaatagaatataggcaatatcattctggacataggaatgggcaaagattttatgagaaagacaccaaaagcaattacaacaaaagcaaaaattggcaaatgagatctaattaaactaaagagctctgcacagcaaaagaaactactgtcagagtgaacaggcaaccaacagaatgggagaaaattttttcaatctatccatatgacaaaggtctaacatccagaatctacaaggaacttaacaaatttacaagaaaaaaggagccccattaaaaagttggcaaagaacatgaacagacacttcccagaagatattcatgtggccaataaacatgaagaaaagctcaacatcactgaccattagagacgtgcatatcaaaatcacaatgagataccatctcatgtcacaatggtgattattaaaaagtcaaacaacatgctagtgaggttgtagagaaataagaacgcttttacactgttggtgggaatgtcaactaattcaaccactgtggaagacagtgtggtgattcctcaaggatttagaaccagaaatatcattactgcatatagacccaaaggaatagaaatcattctattacaaagatacatgcacatgtatgtttattacagcactattcacaatagcaaagacatggaatcaacccaaatgctcatcagtgatagactggaaaaagagaatgtggaacataaacaccatggaatactatgcagcaataaaaaggaatgagatcctgtccttttcagggacatggatggagttggaagctgttatcctcagcaaactaatgcaggaacagaaaaccaaccaccacatgttctcacttataagtgggagctgaacaatagaacacatgggcacagggaggggaataacacacactggggccagtcagggggtggggggtcaagctgagggagagcattagaaaaaatagctaatgcattctgggcttaacccatttatgcctagtgttccatttctggaatgctaagcatgtggaagttctttatatcctgctcaaggtcattgccaaggtctgatttttcacattcaacaaattgcaacctctggcataaatgggttaatacctaggtgatgagttgataggtgcaggaaaccaccatggcacatgtttatctatgtaagaaacctgcacatcctacacatgtaccctggaacttaaaaaatttaaaatatatatgtatatatatttaatatggaattttaaaaattactaatgagttcttttatctgagtaattttgcatcaacatgcttttattatggaagagaagattcagtgagtacaaaattgcagatacatgtgtcagaagatccctgaatataataaggcttagtattctgtgtcataattgcctgtttgtattcctctctggtctttaaacttcattagggcaaggatcaactccatcttactaaccatttgattccctatgtattacacgatatatgaccaataataagccttcaataaatacttgtaaaataaagaatgttatgtaataaaaaaaaa

SEQ ID NO: 263 - DNA, 7741 bp, Homo sapiens
gcggccgcggcgggagcggcggcgcactcggggggaagcaggccccactagacgggccgcgccgacgggctccgcgcactcgcagcccggggcgcccccacccccagcgcccgccgccgcgggcagggccggcccggagcgcggggggcggccggggagcgcgagccgggggcgcccgccgaagctcgctgctccgggtcggggtccgggcccggggccggccgcgcgccgcctttgacgcatcggagcgcggctcctgcaggatggagggctccgcgccgccagcggagttgtttgtgcgcaggcggctcgcggggctgggagcgctcaaggtctgaacttccctccggagccgcagctggaggaggcgagcgcgcgaggaggagaagccgcgcggcgcggaggccaccctcggggcgagaggcgcggaaggcgagcgagcaaagcggtcccggagccacggcggccacgcggcggggacccccgggcgttctaggtactggtgaccccggccggggcaggccccgggactcgacaacatggcttccccaccccaccagcagctgctgcatcaccacagcaccgaggtgagctgcgactccagcggggacagcaacagcgtgcgcgtcaagatcaaccccaagcagctgtcctccaacagccaccccaagcactgcaaatacagcatctcctctagctgcagcagctctggggactccgggggcgtcccccggcgagtgggcggcggaggccggctgcgcaggcagaagaagctgccccagctgttcgagagggcctccagccgctggtgggaccccaagttcgactcggtgaacctggaggaggcctgcctggagcgctgcttcccgcagacccagcgccggttccggtatgcgctcttctacatcggcttcgcctgccttctgtggagcatctattttgcggtccacatgagatccagactgatcgtcatggtcgcccccgcgctgtgcttcctcctggtgtgtgtgggcttctttctgtttaccttcaccaagctgtacgcccggcattacgcgtggacctcgctggctctcaccctgctggtgttcgccctgaccctggctgcgcagttccaggtcttgacgcctgtctcaggacgcggcgacagctccaaccttacggccacagcccggcccacagatacttgcttatctcaagtggggagcttctccatgtgcatcgaagtgctctttttgctctataccgtcatgcacttacctttgtacctgagtttgtgtctgggggtggcctactctgtccttttcgagacctttggctaccatttccgggatgaagcctgcttcccctcgcccggagccggggccctgcactgggagctgctgagcagggggctgctccacggctgcatccacgccatcggggtccacctgttcgtcatgtcccaggtgaggtccaggagcaccttcctcaaggtggggcaatccattatgcacgggaaggacctggaagtggaaaaagccctcaaagagaggatgattcattccgtgatgccaagaatcatagccgatgacttaatgaagcagggagatgaggagagtgagaattctgtcaagaggcatgccacctcgagccccaagaacaggaagaaaaagtcttccatccaaaaagctcctatagccttccgcccttttaagatgcagcagatcgaagaagtcagtattttatttgcagatatcgtgggcttcaccaagatgagtgccaacaagtctgcccacgccctggtgggtctcctgaacgatctgttcggtcgcttcgaccgcctgtgtgaggagaccaagtgtgagaaaatcagcaccctgggagactgttactactgcgtggcgggctgtcccgagccccgggccgaccatgcctactgctgcatcgagatgggcctgggcatgatcaaggccatcgagcagttctgccaggagaagaaggagatggtgaacatgagagtcggggtgcacacgggcaccgtcctttgcggcatcctgggcatgaggaggtttaaatttgacgtgtggtccaacgatgtgaacctggccaatctcatggagcagctgggagtggccggcaaagttcacatttctgaggccaccgcaaaatacttagatgaccggtacgaaatggaagatgggaaagttattgaacggctgggccagagcgtggttgctgaccagttgaaaggtttgaagacatacctgatatcgggtcagagagccaaggagtctcgctgcagctgtgcagaggccttgctttctggctttgaggtcattgacggctcacaggtgtcctcaggccctaggggacaggggacagcgtcatcagggaatgtcagtgacttggcgcagactgtcaaaacctttgataaccttaagacctgcccttcgtgcggaatcacatttgctcccaaatctgaagccggcgccgagggaggagcacctcaaaacggctgccaagacgagcataaaaacagcaccaaggcttctggaggacctaatcccaaaactcagaacgggctcctcagccctccccaagaggagaagctcaccaacagtcagacttctctgtgtgagatcttgcaggagaagggaaggtgggcaggggtgagcctggaccagtcggctctccttccgctgaggttcaagaacatccgggagaaaacggacgcccactttgtggacgttatcaaagaagacagcctgatgaaagattacttttttaagccgcccattaatcagttcagcctgaacttcctggatcaggagctggagcgatcctacaggaccagctatcaggaagaggtcataaagaactcccccgtgaagacgtttgctagtcccaccttcagctccctcctggatgtgtttctgtcgaccacagtgtttctgacgctgtccaccacctgcttcctgaagtacgaggcggccaccgtgcctcccccgcccgccgccctggcggtcttcagtgcagccctgctgctggaggtgctgtccctcgcggtgtccatcaggatggtgttcttcctggaggacgtcatggcctgcaccaagcgcctgctggagtggatcgccggctggctaccacgtcactgcatcggggccatcctggtgtcgcttcccgcactggccgtctactcccatgtcacctccgaatatgagaccaacatacacttcccagtgttcacaggctcggccgcgctgattgccgtcgtgcactactgtaacttctgccagctcagctcctggatgaggtcctccctcgccaccgtcgtgggggccgggccgctgctcctgctctacgtctccctgtgcccagacagttctgtattaacttcgccccttgacgcagtacagaatttcagttccgagaggaacccgtgcaatagttcggtgccgcgtgacctccggcggcccgccagcctcatcggccaggaggtggttctcgtcttctttctcctgctcttgttggtctggttcctgaatcgcgaatttgaagtcagctaccgcctccactaccacggagacgtggaagcggatcttcaccgcaccaagatccagagcatgcgggaccaggcagactggctgctgaggaacatcatcccctaccacgtggctgagcagctgaaggtgtcccagacctactccaagaaccatgacagcggaggggtgatcttcgccagcatcgtcaacttcagcgagttctacgaggagaactacgagggcggcaaggagtgctaccgggtcctcaacgagctcatcggggactttgacgagctcctaagcaagccggactacagcagcatcgagaagatcaagaccatcggagccacgtacatggcggcgtcagggctgaacaccgcgcaggcccaggacggcagccacccgcaggagcacctgcagatcctgttcgagttcgccaaggagatgatgcgcgtggtggacgacttcaacaacaacatgctgtggttcaacttcaagctccgcgtcggcttcaaccatgggcccctcacggccggggtcatcggcaccaccaagctgctgtacgacatctggggagacaccgtcaacatcgccagcaggatggacaccaccggcgtggagtgccgcatccaggtgagcgaagagagctaccgcgtcttgagcaagatgggctatgacttcgactacagagggaccgtgaatgtcaaggggaaaggccagatgaagacctacctgtacccaaagtgcacggatcacagggtcatcccacagcaccagctgtccatctccccagacatccgcgtccaggtggatggcagcatcggacggtctcccacagacgagattgccaacctggtgccttctgtccagtatgtggacaagacatctctgggttctgacagcagcacgcaggccaaggatgcccacctgtcccccaagagaccgtggaaggagcccgtcaaagccgaagaaaggggtcgatttggcaaagccatagagaaagacgactgtgacgaaacaggaatagaagaagccaacgaactcaccaagctcaacgtttcaaagagtgtgtgaggcggcgcccacccgctgcccgaggtgctctgtttgtcgaaacacagtaatatttgtatttggctgttgtgctttccaagcgccacagttgccctccccggacgtggtgttatgtggtcatttcagccctaacttctgtgtggatcacagttattcagggttcattttcatccattcttccctttcgctcccttccctggaaaccccgctgcctctgggtcatccgttcagcacgtggtggagaacaagtgccttcagggctggcctcggcctcgagtctcgggacagaggccgccagtggagatcatggctttgggtattatttgacttttagaacaaaagctgtggttaagatctcatttttattgctttttcccacgtcccacgagacactattttcggttctctggctaataccctgtttttgagtttattttgtttctgtctatgtcacagtgttcctctacgacccgacctctctatgtaagcacacatgcgcacacacacttgcattcatgaatctgatataaagtgccagtaatccgccaagagggggtgcgaagggggcatgtcacgacagctccgccaccccccattgcccacccgcactttcccgagcaccgcgccccgtgggctgtgggtgagccgcgctccctgcactgagcgggtttaggggctcgcccacatgcatgcaggccaagacagcaaatgccagccgggcacgacgcccgtgtgcccaggcctcgggggtctcagagccgcctctcacccccgaccctccacccaggggtctccccatcgggagtggaggtgttggtcctggaagctgactcatcggagagggaaataccaaataaacatccgaggttgcatttatttatttatttatttacccggaagcatgtgcgctcccgggaggggtgctgggtcctcagggtggggggtcatagccacaggggagggcagttcccaggaaggtaaccagatgtctcttttgtgttttggccacctggggccgcccccaacctccccaccccaagaggggtctgagtgggacctcaaagcatggccagtgcaattctgaggctaggggaataggagaagcccaccagctgcccctgccacccacgggggctcctccctgccggggtccagctcagaaccacgggggtctgtgccggcagcaccggtgccatcttggcttccacaaattccagaagtttcttggctgcctcccgctctcagatggcacagggcctatcagtggcaggatttaatctggggagcaaattccagctctgaaatggagttctcacaccgtatctagggacagaggcatctggatgcaaacgcggggtttgttaggggcggaatcccgagggtggtgtgggggagctccgtccgggcagttggctgctggtcctgtctgattatgttttgccatattgagtctgaagtttgtgtggaagtgagctcgcccgagttgtccggtcggagttgtagccagtctttcaggggaccccgggacgctgatgaggcccagggtgcactccttgtcagtcttgcccgttgtccctgtgcattttgctttccgctgtcaaatctcactgtctcgttttcacaccgcatcagtccccatcatcactactcctccccagagacatacagattgccctccccggcatgaagaagtcacaattctgacccgccacctctccaggggcggtgcctgggatggccacccatcaggacagccagagccagggtcccggcgtcctgagagtccagggcacctccccccattagctgtaaggtttcctgtcaggtgtgactgtcagtttgctggtcttccaataccgaagaaagggtggttgtgacaatacctcttgcttctaaagaatgtattataaaacaccgcagatttttttttttccttaaaaaacactacctgatgctttccttgttcgtggggattgtggtcacatgaagctctttctgcatcagtattaaggtgtatatttgaatgtcctcccctcccctttcccctccaggctgtgtagctttgaggggctgggcgtttgctcacgaccttgctgtctcgctcagaacatgctccgcaaagttctccgcacacacttcttccccatcaagcccatttccttccccaaccacaaaggtgtttgtgattcctcaccccgggaaaccaaggagctgcaaagtggagtctggttcagccccgtgcagactcacccagagcttaacgttgtctttcaaacaccctgagccttcctaaacagccagtgcagacgttctctctgggccacgaagcccctcgggtcctccccgtcccctgctccgatgcatacctcagtgcagaaccacagaatctctgcagcggaaacgccgtgcatctcttgtctgttggcagcgagcacatcgtgctggagacacgagtttctaagcagctggcacgagggctgctgacggcatgggtcgtgcttcagggtggcaatacctcttaggaacttagggcaggaagcaatacttcagcattgaatgtgtgtaaatagttgctttgagttgcaattgctattttcttctcagtcccagctcagatcgaattatatatccatatatatatatatatatatatatatatatatatatatatatatatggtaaacaagcacacacaattttatccaatgcaaacaaatgtagagcatcagttacaaaaccctcgaatagcttgagagccccacaggctctgccacacccgtgacttcatccacactgacgtcacccgcgggggctccccctgcacatttgcacacgatccggagagccgaaggccgcgtgcttcctgtcacatgggctgtaatcatttgtagtttccaaagacacgtctgcatttgaatttctagattttcgaggtaaggagttttttttaattggttgtttggaaaatcacatcatgcctagaatctgaaattgaattagcaagaaccgactgtttgcattttccatatatccttttatctgctctttttaaattgttaattctaataatttcaaaatgcattcactgaagaaatggacattaaaatattctaaaatttaaatataaaaaaaaaaaaaaa

SEQ ID NO: 264 - DNA, 5363 bp, Homo sapiens
acggtctctgggcggagcaatccacactgctgagcctggggtggtttggaattcttcggcgaagtggagcgggctgagagtgggtttcccgtccccgagccctccctcatctcggagatgccgcacttgtgagcgacagggcttcatttgaattttcgcacctcgcgagttgcggagcctgcatctctgaagctgcctcggtgaagagccacagcattattttttttctctttgggagagtagctgtctgggatttgagatcctatcttccctgcaaattaccaggttgcatcttcactgataggaatacatttcttcaccaaaggacatggatgaaaatgaaagcaaccagtctctgatgacaagcagccaatatcctaaagaagcagtaagaaaacgtcaaaattcagcacggaattccggagcaagtgattcttctaggttttctaggaaaagcttcaaactggattatagactagaagaagatgtaactaaatccaagaaaggaaaagatgggagatttgtgaatccgtggccaacatggaaaaacccctctattccaaatgttctcagatggctgataatggagaaagatcacagcagtgttccaagttctaaagaggaactagacaaagaactcccagtgcttaagccatattttatcactaaccctgaagaagctggagtgagggaagctggcttaagagtcacatggctgggacatgccacggtaatggtggaaatggatgagctcatatttctcacggatcccatctttagctctcgtgcttcaccatcgcagtacatgggtccaaagcgatttcgtcgttccccgtgcacaataagtgaactccctccaatagatgcggtccttatcagtcacaaccactatgaccatctggactacaattctgtcattgctttgaatgagcgatttggtaatgagttgagatggtttgtgcctttgggtctccttgactggatgcaaaaatgtggctgtgagaatgtgattgagttggactggtgggaggagaattgtgtccccggacatgataaggtcacttttgtctttacaccttcccagcactggtgtaaaaggactctaatggatgacaacaaggtgctatggggcagctggtctgtcttggggccttggaatcgattttttttcgcaggagatactggttattgccctgcttttgaagagataggaaaaagatttggaccttttgaccttgcagctattcccatcggagcttatgaaccgaggtggtttatgaaataccagcatgtagacccagaagaagctgtaaggattcacactgatgtccaaacaaagaaatctatggcaattcactggggaacttttgccttagcaaatgagcattacttagagcctccagtgaagctgaatgaagctctagagagatacggacttaacgctgaagatttttttgtcttgaagcatggagaatcaagatacctaaataatgatgatgaaaacttttaataaatgtgagcacaggcacttttaatgaaaaaggcatcatctaagtttaaaaacaaatgaaaagacttagaaattcatgaatattgtgattattttacatttggaaacaacttctgcaagtttatgttttatgttttgtgtaataacttgcttcctagtatgatcagctcatgtacactatgagagggttcaggggtgggtcatttaaataatgaattggctaatgtggattttaaatttcatatcatgatataagcactgcaatggaaatgtttttactaaaacattatatttttgtggtactagaatttcctgaggtgaaaaaccgatattgaagattcatttttcttttttccattcttcaggaccttcggcaaggtgagtcaaggctctctacctacctagatgtttttcagaggcctacaaatacaagtatctttcttatatgcacattctaataaatgatgaaattcagtccaacatgcttattataaacatagcaattcttgctctatcaaattagcttatatgccaaatattaaatatggtttatttaggtaagcataaaaacataggggctatcatttttaaagacttgattttctctattgtggtaaaatatataaatacatatttgccattttaaacatttaccattttaaccatttttaagtgtacagttctttcgcattaatgcacccatgaccaccattcacttaaatttttaaaagaacagtatattctttttttcctagagccttcagatgagagggaacagtatattctattgcacgtctacaattcccaaaagacctcttactttgggaggccaaggtgggtgggtcacttgaacccaggagtttgacatcaacctgggcaacatggtgacctcccgtctctctcggaaaaaaaaaaagaaaaaagaaaaagccgggtgaggtggtgtgtacctgtagtcacaggtacttgggaggctgaggtgggaggatcacttgagcccaggagatagaggctgcagtgagctgtgatcgtaccactgcactccagcctgggcgacaaaatgagaccctgtctcaaaagaaagccctctccttagctgagcagaggaagggaaggagtgtggctatgagaatatgatttatgccattttctgtttttaaatctagaagatcttctaagcacaaatacagctacaatgaaatattttacagacaaaatgttaatagaccatattctttgaattaaatttgtttttaattttctctacacattttttttttcctggagtctcttagctctaaatatatcaatcagatttataattttttttacctgattcagatgtcttacatttttatattaaatgaaccttaagcatgattcttttggtaagccagtatgaatgccagtggttggggggcggggggggagtcagttgacataagatttagtcctaataaggactctgtattcacttgattattctgacccttcctaagggagggaggtggattagataccactggaggcccattctgtattcctaatccagtctcagcactttattcatacaaaataatcaaaataggttttctacaccaaatgctacccaggcagtgctctataatttatttgcacacctgtatgtgtggtgccacgttagccactaaatctgaacttttaccctgctttcatcatggatttttttgtgtaacctgaaacaagtcaccagtgctcactgtgcctgtttcctcatttgcaacaagaggataattccgacctacctctgaaaaatgtgtagattaaatgagtttttaaagcactttagaaaatataagggagaaaatgatttcttaagatatcactgcctaatatagacaggtatatttgaaagctaaatacaggttaatgcttttgataatgtattgttcctgttgcaaatttaagcattatatattaggagactaaacattgaaaactttcactgatttttaaattggagtaatagcctaaataagtgtaaataatctttatcaaaatttagtgtttatctacaaagatgcgaatcagtcaaggggaaatgtgtatgcaatgtgtgtgtatatgatgtatgcgaacatatgtgattttggggtactaaagcacaaaaaaatcccccataaaataaaccttcctgaaaagactgatcataaactttttcactccaagcagatgtgaatcaagatgttaggtttatggtgagttagctttgaggtgtgttgccctaatactagccagcgttgttgtagccatattccctgctgctgcacgccgaattgaaaatccatctcttacctcttctctatgaagcaagccaggtatgtcttgcttaagtatttcttctccatgaatggccttaacattattttgtattcacgtgtactgtttaactgagggtctcaaagcactttaaactgttgtgttctatttccactcgtctggcctgcctcatttttctaggcccttttgtaagctgtaattttttattaccactcatgttctttctacactgacactattcattaagaacatcaagcttcatctctgcttacagaatctcaccttattgagtgggttccactttatttttcatttgttatctacattttgaagggtttatgtgcaaagtgaaaacaaattttgaaaaataagacaaatccattctcttcttcaattcagtctaatatgcattgtagtgtcttttaatcagtcttatcctctaagtcaacttcattttcctcttcgtgaatacccatagcaatatgtaagattttattgaagtttcctgtgataactgaggaatactttgctatgcctcactgcccaatagggtgggtcatcaattaggagaaatcccaaattataaaagccaacatatgccgtgacctacgtaggaaaagatgtatttgtgcatcttctttctgggtagttaaaaattactccctcttttctctagcattttgacatttcagactcaatgctctgatctctagggagtgtgattattcaaactaatgagaggacaagaagacacagttttagaatctactgctgctaaagcacattaaaaacaaatcctggtttttaatgtatgcatagtttcatatttaatgaatatgctttcattaaatagggaggtagatttgaaaaaaccgttataaagaaatgtgccttttggggaatgaatacttttgttcatgtctagcccactgggaattttgttttcaccttatactgagtcctttttctaatgtaaaaatatttcttccaagtttgatttctgtatcagggtaacattgagaacacacatatttctgtttgaggatttgtgacttcctatggaaacagtcttgcatctatgtatttacaaatgaaatttaaagtattcttaaagctttgccttaaatactgcttgcatactgatttacttaatgctaagcatggcaggggttataaatttaaatactataagacctggctgaatcccagatgtatcaataaattgttatagtagcttatggaaaatgctattaaagataaattttcatacattgtatttttagtcaagtaaaatatggatgaaaattaataaagtactgtcaagggaaaaaatatgtataaccttgtaagtgatttttctcccctttattaaaaaaagattatacaatttgggctcatattaaaaaattcaaacagtagaacagtgtgtacgtagaaggcattccccactcccactccaggagtttgggtatcattctagaagtgttctgtcaatacataagcatttttcattcaaacacacacacacacacac

SEQ ID NO: 265 - DNA, 8229 bp, Homo sapiens
ccgttttcgaagccctccacgctgcggccgctatcccctccggaccatggccgacgacgacgtgctgttcgaggatgtgtacgagctgtgcgaggtgatcggaaagggtcccttcagtgttgtacgacgatgtatcaacagagaaactgggcaacaatttgctgtaaaaattgttgatgtagccaagttcacatcaagtccagggttaagtacagaagatctaaagcgggaagccagtatctgtcatatgctgaaacatccacacattgtagagttattggagacatatagctcagatggaatgctttacatggttttcgaatttatggatggagcagatctgtgttttgaaatcgtaaagcgagctgacgctggttttgtgtacagtgaagctgtagccagccattatatgagacagatactggaagctctacgctactgccatgataataacataattcacagggatgtgaagccccactgtgttctccttgcctcaaaagaaaactcggcacctgttaaacttggaggctttggggtagctattcaattaggggagtctggacttgtagctggaggacgtgttggaacacctcattttatggcaccagaagtggtcaaaagagagccttacggaaagcctgtagacgtctgggggtgcggtgtgatcctttttatcctgctcagtggttgtttgcctttttacggaaccaaggaaagattgtttgaaggcattattaaaggaaaatataagatgaatccaaggcagtggagccatatctctgaaagtgccaaagacctagtacgtcgcatgctgatgctggatccagctgaaaggatcactgtttatgaagcactgaatcacccatggcttaaggagcgggatcgttacgcctacaagattcatcttccagaaacagtagagcagctgaggaaattcaatgcaaggaggaaactaaagggtgcagtactagccgctgtgtcaagtcacaaattcaactcattctatggggatccccctgaagagttaccagatttctccgaagaccctacctcctcaggacttctagcagcagaaagagcagtctcacaggtgctggacagcctggaagagattcatgcgcttacagactgcagtgaaaaggacctagattttctacacagtgttttccaggatcagcatcttcacacactactagatctgtatgacaaaattaacacaaagtcttcaccacaaatcaggaatcctccaagcgatgcagtacagagagccaaagaggtattggaagaaatttcatgttaccctgagaataacgacgcaaaggaactaaagcgtattttaacacaacctcatttcatggccttacttcagactcacgacgtagtggcacatgaagtttacagtgatgaagcattgagggtcacacctcctcccacctctccctatttaaacggcgattctccagaaagtgctaacggagacatggatatggagaatgtgaccagagttcggctggtacagtttcaaaagaacacagatgaaccaatgggaatcactttaaaaatgaatgaactaaatcattgtattgttgcaagaattatgcatgggggcatgattcacaggcaaggtacacttcatgttggtgatgaaattcgagaaatcaatggcatcagtgtggctaaccaaacagtggaacaactgcaaaaaatgcttagggaaatgcgggggagtattaccttcaagattgtgccaagttaccgcactcagtcttcgtcctgtgaggacttgccatcaactacccaaccaaaaggacgacagatctatgtaagagcacaatttgaatatgatccagccaaggatgacctcatcccctgtaaagaagctggcattcgattcagagttggtgacatcatccagattattagtaaggatgatcataattggtggcagggtaaactggaaaactccaaaaatggaactgcaggtctcattccttctcctgaacttcaggaatggcgagtagcttgcattgccatggagaagaccaaacaggagcagcaggccagctgtacttggtttggcaagaaaaagaagcagtacaaagataaatatttggcaaagcacaatgcagatcttgtcacatatgaagaagtagtaaaactgccagcattcaagaggaaaacactagtcttattaggcgcacatggtgttgggagaagacacataaaaaacactctcatcacaaagcacccagaccggtttgcgtaccctattccacatacaaccagacctccaaagaaagacgaagaaaatggaaagaattattactttgtatctcatgaccaaatgatgcaagacatctctaataacgagtacttggagtacggcagccacgaggatgcgatgtatgggacaaaactggagaccatccggaagatccacgagcaggggctgattgcaatactggacgtggagcctcaggcactgaaggtcctgagaactgcagagtttgctccttttgttgttttcattgctgcaccaactattactccaggtttaaatgaggatgaatctcttcagcgtctgcagaaggagtctgacatcttacagagaacatatgcacactacttcgatctcacaattatcaacaatgaaattgatgagacaatcagacatctggaggaagctgttgagctcgtgtgcacagccccacagtgggtccctgtctcctgggtctattaggcctctccccagatatctgagcataactgggagcacctcatttgtggaaaagcctctttgttatcggccttgtgtcagcaggtcatggtccctagagactacctagttgtagtgtgacctacatttataattattgtcatgtccgaatagataggaggagaaaaacaattacacactaatttaaagagacagtatcttttttaatcagttctcctaaactttaataaaatgtatctttaaatgtatgtattattcaatcctttggaatgttatatttttggaaatcatagctttttatttccaaggcccctaaaaactgcacaaaatagatgctgctttctataatctattttaataataataaacaatgattctgttaccttgactgggggtggaacactacattctttttagagtctgattttatggattggaatattgggatatctttctttcctttatttatttgaaataattagtgtagtgattacaaaacagtcataaatttttaaaggccttttttctctctttttttttttttagaatagtatttttttttaagtcctttatgtaacatccagataatgtgatactgtctctttgaagcaccctgtaaaccttttagagatttgaagttgggtcttgactcttaatgcatgtggacagtcgcgagcgtttatgctgtcggtgtgtctgtgttggacaaaacaatctgtaatctacagcaaagtacattctacattccgttcatggggcacacccaggggaataagaataaaatgctattatgactaagttgtaaacctatgcacatcccttgcattttgggcaactttataaaaaaaaagaaactgatttttattaataataatcatgtagtgaaatgtgtttgtaattttgtctcaatttaatttgttgtaaggtggggtggggggaattgctggtttcaccatttcagatctgtgttgtctaagagtattaacgttttaattaagcaaagaaatgatttttaatctgtatgtaattgttttaaagcacccattttaagagaaaatactgtgcaatgaagaaaccagtttaggcatttgctataaactgaaatattccaaaagaatcatctataacagccctgtaaattcctttaaaatgataactaacaggacagtttgaccaattttttttaaatatacttccttttatgtgttcaataattaaatgcctttgggtccttcatttcattatagatttgttcaggcttccaagctgataatctttacaattgtataatttgttagatgctcattgaacctttgaaggcccaggagtgagtatcagttggcagggtgacaaagtagcctgccagagcacagctggaccacgtctgactcgcacagagccatgcgcccaagggccacgggtgtactggaggccacctgtggtctctccttcctcttgctgtatcccttggcacaggggaatcatctgtccttgttgctttagagacattaaccatctcataactcttccatgaagtcacattcttccaatacaggagattcgggctggggttctcagactctttgccagaggtcagtagaatgtttttcattagcatgtgagggtgtgaagtgcttatattaacctgtgatccttgaaaacataccatcattttttgcttcttgtaggttagatggccttgtcactttgtgccttggcaggatgtgcagggtgtgttctgagctgaacagctcctcttaaaggaccaaacagagaaggcattagtatacttcttttacattgtcaacaccatacccgcctccgccccccaccgcctattattaaatggtggcgatttttttttttctgatgttgttctttgccagtgaccagatgagtctgcaacttactaacaaggtattgagtgaactacttctgtatgggccccacagtggggtgaccaagccaccaaaccagagataagctcaacagtggtctcacactagatagagagagaaaccttcaaagagttgggtagggctgtgttagaactgattcgaatctgatagatgccaaggccagacagtcgttcctggtatggtactgaccacaatttcgggctcttagtgtgaaggtgcgcactctacctcttttctggtgaagcacaaagacaactacaactaacacatgggaaacagaaacttccctccctctagtggaaacccccacgcccccacttgccctttgagcccacatctccagagatgctgatgatgcctgtcttaagccatctgccatatttataaaggtggattaagcagaggaggagaaaagcaatgccaacttaaatgtctgtggccccacaattcacaagcactgtagcactcatcctcagtggctttatacgtcctctgagaagcacacaggcaggcatcattcttgccatcattccgatggtgaaatccctgcatgcagaactcattgacttctcaaagatgttacctgttccattccactaatacatgtcttctctaaagcagtgtctttatgacctagctgcatatacttacatttctgaattcagagtaatttcagtacattgctgctgctgctgctgctgctgctgctgctgctgctgctgctgctgctgctactgctacattacaattgtccactaagcaatcagagaaaattgctaaaagcttctttactgcttccattccatcagcagaacctttttttttctttctttcttttaaagaccagaatgaatgtttagagtactaaatcttattagtggtcaattgaagtattggagagccacattttgaaggttctctcccccacccaactccattccccacagcaagaaagggagtgtttttatatgttgaattctttgttaaaaagatgaaatgtcctgattttccagtcacaagacagtaattactttgcacatacagcatatcccattttaatgctaaaaagggaaatgtcactcaatttaattcatctggaagtttcccagtgtcaagataacattgtagcctttttaaatgcaattaaatgtatctcttgtcaggtgagatgatttaaaatctttgctcagagaggaaaacaaatggttgacctacttcttgctatttgcattcagaaggcatcgtcccagcccatcctattggtggcagaatatctaaagatgtcgcaaagtcccccactgcagtagaaatgcaggaggtgttcctgttccccgtccaattccttcttaggctgctagagacagccagtgggccaagccttcccctgtgctccaggcaggcctgggctgcagctactgttacctttttacagcctttgatctgatcgctgcagagttcttttgtttttaaatcacttgtatttgtctcttcattaaggcttcaagtttatttcttgaaaaagtttagtcaattgaaccaccctccaggaagattcccagcgtggaaactgcccctgaaaaacaaggcagcccaaagccagctctcttttgtcccccactgatgtcatgtcctttttttttttcatttcaggccagtttcttaacttggggcaaagagaatgtgttgctaaagctaccaagaaaactgcttgattaacaaattcttaatagaaatgcctcccacactgtctctttgaaaagagaaggcaccttggaatcggcattccaaaaccaagctccttgtcatcctcatccctcctccttcttgcttcctattatcaaactcgtgtgtgtttcttgttttctcagaactgaacacagcctcctaattccatcctcttgactagggcttacaatactgagagcgattacaggctgtaataagttaaaggtccctgagcgtggctttcttgttctgcgcctctaattaattcttctattaaaagatgctttccttctcactgcagcttacagaaaggctacaagctttaatcacagatcatttcatttgccagagcctttccttttctaactcctttagaaataagatttccctctctgtttggaatctctggatacaggactctcctccaagctcatggcttgattggctttgcctgtgcacacacacatcagtttgccttaaacttggagctatggggagtcccagattttccagcttagtgggtgaagtttagctgtcacctacatccaggaagtgggggaaaagggaaaaaaagaggatattcaccaccatgttcccatccggtctttcccctgccttgctttgtgcagcaggtgggcagacagagcccacagaaacagaagtagaaagagggccgcaccatctctggggccagcactcctaagtcttagctctttgtgggaatagaaaatcctgagctcccaccacctctcgtctgaccctccatcaactccctcgaacctgtgcaaatggactgagcaaaagaaaatggaaagagatgtttgtcaccacacaggagacctcctttctggccccaagcacaactccatctctgcgtatgctcagaaactcagaatttagctgctacttatgtgttagctccattctctctggtgtgtgactgagagaacacgccagtgttcttactgacagaggcttaggggtgaccctctctggacccagaggaagtacaacctctgtagcgagaattgtccttgggaacagaaacaggcattcctccacagtgagtggctccccctattttttttttatttggaagagaccaagaattgggggaattgatttccagtcttagctgtttcccggaatgtcatctgtgcaggcaggtaggcggctgccgggtgcagcaggcagcgtgactgatgtgaaggccgcccaatcctcacgtgctaagacccgagtatcgtgtttaattgcagtgtaggcacgtcgccattcaaactcagttctggggtggttttgcataaagttttgccaacgtgttcttttttctgtatgtattattgcctttttataaaaggtgttgaagtattgtctcagtgataaaaagagagagatgttaatggttgttgtatatttcaccgtatccaattgtaagtatttgcagggtacagcagagccttagcttgcaagagcgtttgtgcaggaggtgtccctcaacacccaggagctgaagggattggaaaggtttggattctttgtaaatgtcctgcttttctttctctctgtgtgtatctatttacatgccttagcacacgccctcccatcctgatccctttgccctgtcgccggaacaaccagaatgctggtgcgctgccggcacagtacaagttgatgaaaccctaatcagttatcttgtgtgacaggggaagaagagaaactccatagtattccttgtagaatatacatacctgtaggatgctgtgtaatgggaaaccatagaattgggcttttgtcatttcaaagttggagaaatgtatgaataaaatgtataaaacatgaaaa

SEQ ID NO: 266 - DNA, 4096 bp, Homo sapiens
atttgcatctctccctccaacttgccattggcggcgcgaagtgtgggagagccctgcgcctcgcccgcccggaccagcctgccccggcgccgaggtcgctcctgtggttggtccagcccagaatgcagccttgagcctggcttaggccaccacctactccagctctctccaccccctattttactgcagctcagggggtaggctctaggctccaaagtacctgggtattgtcccttcatcaagaaagccccacagctctggagggctctgataatcccgttgtcagctctctgaaaagacagcatggctattaccctacagcccagtgacctgatctttgagttcgcaagcaacgggatggatgatgatatccaccagctggaagacccctctgtgttcccagctgtgatcgtggagcaggtaccctaccctgatttactgcatctgtactcgggactggagttggacgacgttcacaatggcatcataacagacgggaccttgtgcatgacgcaggatcagatcctggaaggcagttttttgctgacagatgacaatgaggccacctcgcacaccatgtcaaccgcggaagtcttactcaatatggagtctcccagcgatatcctggatgagaagcagatcttcagtacctccgaaatgcttccagactcggaccctgcaccagctgtcactctgcccaactacctgtttcctgcctctgagcccgatgccctgaacagggcgggtgacactagtgaccaggaggggcattctctggaggagaaggcctccagagaggaaagtgccaagaagactgggaaatcaaagaagagaatccggaagaccaagggcaaccgaagtacctcacctgtcactgaccccagcatccccattaggaagaaatcaaaggatggcaaaggcagcaccatctatctgtgggagttcctcctggctcttctgcaagacagaaacacctgtcccaagtacatcaagtggacccagcgagagaaaggcatcttcaaactggtggactccaaagctgtgtccaagctgtgggggaagcagaaaaacaagcctgacatgaactatgagacaatggggcgggcactaagatactactaccaaagaggcatactggccaaagtggaagggcagaggctggtgtaccagtttaaggagatgcccaaggacctggtggtcattgaagatgaggatgagagcagcgaagccacagcagccccacctcaggcctccacggcctctgtggcctctgccagtaccacccggcgaaccagctccagggtctcatccagatctgccccccagggcaagggcagctcttcttgggagaagccaaaaattcagcatgtcggtctccagccatctgcgagtctggaattgggaccgtcgctagacgaggagatccccactacctccaccatgctcgtctctccagcagagggccaggtcaagctcaccaaagctgtgagtgcatcttcagtgcccagcaacatccacctaggagtggcccccgtggggtcgggctcggccctgaccctgcagacgatcccactgaccacggtgctgaccaatgggcctcctgccagtactactgctcccactcagctcgttctccagagtgttccagcggcctctactttcaaggacaccttcactttgcaggcctctttccccctgaacgccagtttccaagacagccaggtggcagccccaggggctccactgattctcagtggcctcccccaacttctggctggggccaaccgtccgaccaacccggcgccacccacggtcacaggggctggaccagcagggcccagctctcagccccctgggactgtcattgctgccttcatcaggacttctggcactacagcagcccctagggtcaaggaggggccactgaggtcctcctcctatgttcagggtatggtgacgggggcccccatggaggggctgctggttcctgaagagaccctgagggagctcctgagagatcaggctcatcttcagccacttccaacccaggtggtttccaggggttcccacaatccgagccttctgggcaaccagactttgtctcctcccagccgccccactgttgggctgaccccagtggctgaacttgagctctcctcaggctcagggtccctgctgatggctgagcctagtgtgaccacatctgggagccttctgacaagatcccccaccccagcccctttctccccattcaaccctacttccctcattaagatggagccccatgacatataagcaaaggggtcagggcaagtgtgacccaccaggcaaaattgagcagcattttcatagggaccgacttcagtagcacacctgcccctgcatttcagtgggatgtcaatacacttgaccccaagtcccccggccctgcctggtgtcactgtggccaaacagtgcccagcttaagcatccctggcatcagactatggccttcaagagcactagggcatatgcttttggcagcataacgggctgacttggtgatggagggaaaaagccttgagccaggcagaagtttgtggccagggtttgtgcagcagctttgtgagaagagcccttctacctggctctatctcactggctgcattccctacacagggaatttactaccctatatgtgaatatccctgtatgtacttgtgtgtacttgttggtctgtatcttagtttctttggggaggacagggctgtagctgtgaggtcttgtctccaagggtgtgtgtatgtctccgtggatcagccacagggatagggattttgtttttaagggaaagcattctctaattccctttgttcatgccgagattcagttgctctgagactatggggtacaagtttgatcctccgaatctggagatgttgtagagctggaacgagtgcagagtaggaacgctttgatgcgcatgcacattggggaagatgcgctcctcagggacacaaaggccgagtggggtaaaaccacgaagggagggaagggaagtcagctctgggagcagccctcactggctggaccaaggtactcttcctggagtttgccgtgttagcaaccacagtcaccttgcagtcaggctggaatcttgggccaccccaaagtgctttgctgaaggatttagacggggatgaagtgccctccagcctcagagctagccacaaagcccccagagctgaattcattgagtatttgtgcctagggcttgggctgtttgtgtgataccggccccccgccagacaatagcctttgctgacaccccagcctacttccccgatcctgggctccctcttgattactttttgacattttccagctgtcaggcatcactgcggctagtccggcagcgacctagatggggtccacccccattcctgctcaagcatgggcacctaccacatggtttctgctgctcagcctgcctgcaactcacctcgaaggcggaccagcctgcctctgtgatgactgcagcagacctccttgggtgtaccaatgcccctcatctcccactttcacacctaaccctgactccttcaccaagaagacgggagtcggcagccaggagttcccgtggcacctctctctcttcgtggctccctgcttcccccttccctctttccgaggaagggtcaacctattctctctcaaagccaacccctaggccaattgcctggatctcctcccctctcccttctttaaacgagcttgcctccctcctgccaagtttgagggcaaggctaagaaatgtcagccacggaaacaactctattatctggtgactttgggtaatgtgaatcagtgcctgaggacctttgctgtgtccttggtacagaaccatccacttgacctaactacctcccctggccgcgctctcgctcttctcttctttgttaagccaacaactatcaccctctcctactcttcttctccctgccccctggagggcactgtgtttggttgtgcaaatgtatttactatgcgtgtttccagcagttggcattaaagtgcctttttctaataaaatcagtttattatgacagtttcctga

SEQ ID NO: 267 - DNA, 9796 bp, Homo sapiens
ggcagtggcagcggcgagagcttgggcggccgccgccgcctcctcgcgagcgccgcgcgcccgggtcccgctcgcatgcaagtcacgtccgccccctcggcgcggccgccccgagacgccggccccgctgagtgatgagaacagacgtcaaactgccttatgaatattgatgcggaggctaggctgctttcgtagagaagcagaaggaagcaagatggctgccctttaggatttgttagaaaggagacccgactgcaactgctggattgctgcaaggctgagggacgagaacgaggctggcaaacattcagcagcacaccctctcaagattgtttacttgcctttgctcctgttgagttacaacgcttggaagcaggagatgggctcagcagcagccaataggacatgatccaggaagagcagtaagggactgagctgctgaattcaactagagggcagccttgtggatggccccgaagcaagcctgatggaacaggatagaaccaaccatgttgagggcaacagactaagtccattcctgataccatcacctcccatttgccagacagaacctctggctacaaagctccagaatggaagcccactgcctgagagagctcatccagaagtaaatggagacaccaagtggcactctttcaaaagttattatggaataccctgtatgaagggaagccagaatagtcgtgtgagtcctgactttacacaagaaagtagagggtattccaagtgtttgcaaaatggaggaataaaacgcacagttagtgaaccttctctctctgggctccttcagatcaagaaattgaaacaagaccaaaaggctaatggagaaagacgtaacttcggggtaagccaagaaagaaatccaggtgaaagcagtcaaccaaatgtctccgatttgagtgataagaaagaatctgtgagttctgtagcccaagaaaatgcagttaaagatttcaccagtttttcaacacataactgcagtgggcctgaaaatccagagcttcagattctgaatgagcaggaggggaaaagtgctaattaccatgacaagaacattgtattacttaaaaacaaggcagtgctaatgcctaatggtgctacagtttctgcctcttccgtggaacacacacatggtgaactcctggaaaaaacactgtctcaatattatccagattgtgtttccattgcggtgcagaaaaccacatctcacataaatgccattaacagtcaggctactaatgagttgtcctgtgagatcactcacccatcgcatacctcagggcagatcaattccgcacagacctctaactctgagctgcctccaaagccagctgcagtggtgagtgaggcctgtgatgctgatgatgctgataatgccagtaaactagctgcaatgctaaatacctgttcctttcagaaaccagaacaactacaacaacaaaaatcagtttttgagatatgcccatctcctgcagaaaataacatccagggaaccacaaagctagcgtctggtgaagaattctgttcaggttccagcagcaatttgcaagctcctggtggcagctctgaacggtatttaaaacaaaatgaaatgaatggtgcttacttcaagcaaagctcagtgttcactaaggattccttttctgccactaccacaccaccaccaccatcacaattgcttctttctccccctcctcctcttccacaggttcctcagcttccttcagaaggaaaaagcactctgaatggtggagttttagaagaacaccaccactaccccaaccaaagtaacacaacacttttaagggaagtgaaaatagagggtaaacctgaggcaccaccttcccagagtcctaatccatctacacatgtatgcagcccttctccgatgctttctgaaaggcctcagaataattgtgtgaacaggaatgacatacagactgcagggacaatgactgttccattgtgttctgagaaaacaagaccaatgtcagaacacctcaagcataacccaccaatttttggtagcagtggagagctacaggacaactgccagcagttgatgagaaacaaagagcaagagattctgaagggtcgagacaaggagcaaacacgagatcttgtgcccccaacacagcactatctgaaaccaggatggattgaattgaaggcccctcgttttcaccaagcggaatcccatctaaaacgtaatgaggcatcactgccatcaattcttcagtatcaacccaatctctccaatcaaatgacctccaaacaatacactggaaattccaacatgcctggggggctcccaaggcaagcttacacccagaaaacaacacagctggagcacaagtcacaaatgtaccaagttgaaatgaatcaagggcagtcccaaggtacagtggaccaacatctccagttccaaaaaccctcacaccaggtgcacttctccaaaacagaccatttaccaaaagctcatgtgcagtcactgtgtggcactagatttcattttcaacaaagagcagattcccaaactgaaaaacttatgtccccagtgttgaaacagcacttgaatcaacaggcttcagagactgagccattttcaaactcacaccttttgcaacataagcctcataaacaggcagcacaaacacaaccatcccagagttcacatctccctcaaaaccagcaacagcagcaaaaattacaaataaagaataaagaggaaatactccagacttttcctcacccccaaagcaacaatgatcagcaaagagaaggatcattctttggccagactaaagtggaagaatgttttcatggtgaaaatcagtattcaaaatcaagcgagttcgagactcataatgtccaaatgggactggaggaagtacagaatataaatcgtagaaattccccttatagtcagaccatgaaatcaagtgcatgcaaaatacaggtttcttgttcaaacaatacacacctagtttcagagaataaagaacagactacacatcctgaactttttgcaggaaacaagacccaaaacttgcatcacatgcaatattttccaaataatgtgatcccaaagcaagatcttcttcacaggtgctttcaagaacaggagcagaagtcacaacaagcttcagttctacagggatataaaaatagaaaccaagatatgtctggtcaacaagctgcgcaacttgctcagcaaaggtacttgatacataaccatgcaaatgtttttcctgtgcctgaccagggaggaagtcacactcagacccctccccagaaggacactcaaaagcatgctgctctaaggtggcatctcttacagaagcaagaacagcagcaaacacagcaaccccaaactgagtcttgccatagtcagatgcacaggccaattaaggtggaacctggatgcaagccacatgcctgtatgcacacagcaccaccagaaaacaaaacatggaaaaaggtaactaagcaagagaatccacctgcaagctgtgataatgtgcagcaaaagagcatcattgagaccatggagcagcatctgaagcagtttcacgccaagtcgttatttgaccataaggctcttactctcaaatcacagaagcaagtaaaagttgaaatgtcagggccagtcacagttttgactagacaaaccactgctgcagaacttgatagccacaccccagctttagagcagcaaacaacttcttcagaaaagacaccaaccaaaagaacagctgcttctgttctcaataattttatagagtcaccttccaaattactagatactcctataaaaaatttattggatacacctgtcaagactcaatatgatttcccatcttgcagatgtgtagagcaaattattgaaaaagatgaaggtcctttttatacccatctaggagcaggtcctaatgtggcagctattagagaaatcatggaagaaaggtttggacagaagggtaaagctattaggattgaaagagtcatctatactggtaaagaaggcaaaagttctcagggatgtcctattgctaagtgggtggttcgcagaagcagcagtgaagagaagctactgtgtttggtgcgggagcgagctggccacacctgtgaggctgcagtgattgtgattctcatcctggtgtgggaaggaatcccgctgtctctggctgacaaactctactcggagcttaccgagacgctgaggaaatacggcacgctcaccaatcgccggtgtgccttgaatgaagagagaacttgcgcctgtcaggggctggatccagaaacctgtggtgcctccttctcttttggttgttcatggagcatgtactacaatggatgtaagtttgccagaagcaagatcccaaggaagtttaagctgcttggggatgacccaaaagaggaagagaaactggagtctcatttgcaaaacctgtccactcttatggcaccaacatataagaaacttgcacctgatgcatataataatcagattgaatatgaacacagagcaccagagtgccgtctgggtctgaaggaaggccgtccattctcaggggtcactgcatgtttggacttctgtgctcatgcccacagagacttgcacaacatgcagaatggcagcacattggtatgcactctcactagagaagacaatcgagaatttggaggaaaacctgaggatgagcagcttcacgttctgcctttatacaaagtctctgacgtggatgagtttgggagtgtggaagctcaggaggagaaaaaacggagtggtgccattcaggtactgagttcttttcggcgaaaagtcaggatgttagcagagccagtcaagacttgccgacaaaggaaactagaagccaagaaagctgcagctgaaaagctttcctccctggagaacagctcaaataaaaatgaaaaggaaaagtcagccccatcacgtacaaaacaaactgaaaacgcaagccaggctaaacagttggcagaacttttgcgactttcaggaccagtcatgcagcagtcccagcagccccagcctctacagaagcagccaccacagccccagcagcagcagagaccccagcagcagcagccacatcaccctcagacagagtctgtcaactcttattctgcttctggatccaccaatccatacatgagacggcccaatccagttagtccttatccaaactcttcacacacttcagatatctatggaagcaccagccctatgaacttctattccacctcatctcaagctgcaggttcatatttgaattcttctaatcccatgaacccttaccctgggcttttgaatcagaatacccaatatccatcatatcaatgcaatggaaacctatcagtggacaactgctccccatatctgggttcctattctccccagtctcagccgatggatctgtataggtatccaagccaagaccctctgtctaagctcagtctaccacccatccatacactttaccagccaaggtttggaaatagccagagttttacatctaaatacttaggttatggaaaccaaaatatgcagggagatggtttcagcagttgtaccattagaccaaatgtacatcatgtagggaaattgcctccttatcccactcatgagatggatggccacttcatgggagccacctctagattaccacccaatctgagcaatccaaacatggactataaaaatggtgaacatcattcaccttctcacataatccataactacagtgcagctccgggcatgttcaacagctctcttcatgccctgcatctccaaaacaaggagaatgacatgctttcccacacagctaatgggttatcaaagatgcttccagctcttaaccatgatagaactgcttgtgtccaaggaggcttacacaaattaagtgatgctaatggtcaggaaaagcagccattggcactagtccagggtgtggcttctggtgcagaggacaacgatgaggtctggtcagacagcgagcagagctttctggatcctgacattgggggagtggccgtggctccaactcatgggtcaattctcattgagtgtgcaaagcgtgagctgcatgccacaacccctttaaagaatcccaataggaatcaccccaccaggatctccctcgtcttttaccagcataagagcatgaatgagccaaaacatggcttggctctttgggaagccaaaatggctgaaaaagcccgtgagaaagaggaagagtgtgaaaagtatggcccagactatgtgcctcagaaatcccatggcaaaaaagtgaaacgggagcctgctgagccacatgaaacttcagagcccacttacctgcgtttcatcaagtctcttgccgaaaggaccatgtccgtgaccacagactccacagtaactacatctccatatgccttcactcgggtcacagggccttacaacagatatatatgatatcacccccttttgttggttacctcacttgaaaagaccacaaccaacctgtcagtagtatagttctcatgacgtgggcagtggggaaaggtcacagtattcatgacaaatgtggtgggaaaaacctcagctcaccagcaacaaaagaggttatcttaccatagcacttaattttcactggctcccaagtggtcacagatggcatctaggaaaagaccaaagcattctatgcaaaaagaaggtggggaagaaagtgttccgcaatttacatttttaaacactggttctattattggacgagatgatatgtaaatgtgatcccccccccccgcttacaactctacacatctgtgaccacttttaataatatcaagtttgcatagtcatggaacacaaatcaaacaagtactgtagtattacagtgacaggaatcttaaaataccatctggtgctgaatatatgatgtactgaaatactggaattatggctttttgaaatgcagtttttactgtaatcttaacttttatttatcaaaatagctacaggaaacatgaatagcaggaaaacactgaatttgtttggatgttctaagaaatggtgctaagaaaatggtgtctttaatagctaaaaatttaatgcctttatatcatcaagatgctatcagtgtactccagtgcccttgaataataggggtaccttttcattcaagtttttatcataattacctattcttacacaagcttagtttttaaaatgtggacattttaaaggcctctggattttgctcatccagtgaagtccttgtaggacaataaacgtatatatgtacatatatacacaaacatgtatatgtgcacacacatgtatatgtataaatattttaaatggtgttttagaagcactttgtctacctaagctttgacaacttgaacaatgctaaggtactgagatgtttaaaaaacaagtttactttcattttagaatgcaaagttgatttttttaaggaaacaaagaaagcttttaaaatatttttgcttttagccatgcatctgctgatgagcaattgtgtccatttttaacacagccagttaaatccaccatggggcttactggattcaagggaatacgttagtccacaaaacatgttttctggtgctcatctcacatgctatactgtaaaacagttttatacaaaattgtatgacaagttcattgctcaaaaatgtacagttttaagaattttctattaactgcaggtaataattagctgcatgctgcagactcaacaaagctagttcactgaagcctatgctattttatggatcataggctcttcagagaactgaatggcagtctgcctttgtgttgataattatgtacattgtgacgttgtcatttcttagcttaagtgtcctctttaacaagaggattgagcagactgatgcctgcataagatgaataaacagggttagttccatgtgaatctgtcagttaaaaagaaacaaaaacaggcagctggtttgctgtggtggttttaaatcattaatttgtataaagaagtgaaagagttgtatagtaaattaaattgtaaacaaaacttttttaatgcaatgctttagtattttagtactgtaaaaaaattaaatatatacatatatatatatatatatatatatatatatatgagtttgaagcagaattcacatcatgatggtgctactcagcctgctacaaatatatcataatgtgagctaagaattcattaaatgtttgagtgatgttcctacttgtcatatacctcaacactagtttggcaataggatattgaactgagagtgaaagcattgtgtaccatcatttttttccaagtccttttttttattgttaaaaaaaaaagcataccttttttcaatacttgatttcttagcaagtataacttgaacttcaacctttttgttctaaaaattcagggatatttcagctcatgctctccctatgccaacatgtcacctgtgtttatgtaaaattgttgtaggttaataaatatattctttgtcagggatttaacccttttattttgaatcccttctattttacttgtacatgtgctgatgtaactaaaactaattttgtaaatctgttggctctttttattgtaaagaaaagcattttaaaagtttgaggaatcttttgactgtttcaagcaggaaaaaaaaattacatgaaaatagaatgcactgagttgataaagggaaaaattgtaaggcaggagtttggcaagtggctgttggccagagacttacttgtaactctctaaatgaagtttttttgatcctgtaatcactgaaggtacatactccatgtggacttcccttaaacaggcaaacacctacaggtatggtgtgcaacagattgtacaattacattttggcctaaatacatttttgcttactagtatttaaaataaattcttaatcagaggaggcctttgggttttattggtcaaatctttgtaagctggcttttgtctttttaaaaaatttcttgaatttgtggttgtgtccaatttgcaaacatttccaaaaatgtttgctttgcttacaaaccacatgattttaatgttttttgtataccataatatctagccccaaacatttgattactacatgtgcattggtgattttgatcatccattcttaatatttgatttctgtgtcacctactgtcatttgttaaactgctggccaacaagaacaggaagtatagtttggggggttggggagagtttacataaggaagagaagaaattgagtggcatattgtaaatatcagatctataattgtaaatataaaacctgcctcagttagaatgaatggaaagcagatctacaatttgctaatataggaatatcaggttgactatatagccatacttgaaaatgcttctgagtggtgtcaactttacttgaatgaatttttcatcttgattgacgcacagtgatgtacagttcacttctgaagctagtggttaacttgtgtaggaaacttttgcagtttgacactaagataacttctgtgtgcatttttctatgcttttttaaaaactagtttcatttcattttcatgagatgtttggtttataagatctgaggatggttataaatactgtaagtattgtaatgttatgaatgcaggttatttgaaagctgtttattattatatcattcctgataatgctatgtgagtgtttttaataaaatttatatttatttaatgcactctaaaaaaaaaaaaaaaaaa

SEQ ID NO: 268 - DNA, 11525 bp, Homo sapiens
cagcccgccaagacccagacctgggaggggaggcccctcctgttagcccagagggaaagaaagaactggggcgatccgggacctggtggccttagtctttcaggtggaacggtgtgcgacatgggaaagaaaaccaagcggacagctgacagttcttcttcagaggatgaggaggagtatgttgtggagaaggtgctagacaggcgcgtggttaagggacaagtggaatatctactgaagtggaaaggcttttctgaggagcacaatacttgggaacctgagaaaaacttggattgccctgagctaatttctgaatttatgaaaaagtataagaagatgaaggagggtgaaaataataaacccagggagaagtcagaaagtaacaagaggaaatccaatttctcaaacagtgccgatgacatcaaatctaaaaaaaagagagagcagagcaatgatatcgctcggggctttgagagaggactggaaccagaaaagatcattggggcaacagattcctgtggtgatttaatgttcctaatgaaatggaaagacacagatgaagctgacctggttcttgcaaaagaagctaatgtgaaatgtccacaaattgtgatagcattttatgaagagagactgacatggcatgcatatcctgaggatgcggaaaacaaagagaaagaaacagcaaagagctaaaggaggggatggtctctgtcatttctctttgtacataatacattcacctccctgcctcctctcctttctacccacccctttctatcctaaacacatccataaaaaatgtgcttatcactgtgctccacaggagaaatgttggtattggttctcttgtaacataactgatggtctgattaatgataagtgtctctctgtgaagaccaggcatttacatactgagtgtaatacccacaatttttttttcctttgccctgatctcttccttctgcttccctgtgacctcaagatgagtttcaactttttaatcaccttagagtcttgatcttttcagggttggtcgctttttaggttgggggattttgttacaatgatgttgaattttggtttcttgctttggttcttagaacatgttgctgactagctggcctttgttctgacatgttgagatggaaaggatgttgcccatctgttaaaaagccaatagcaactgcctacctgttggggctttcccaaccttgttcagctctacccaggagaatacagggtttctggtgtggtcttctgggccaccctctgttgttcatcctcactcatcctcccagaattactccatcctttggaagatttgaaattttacactgaaatctgtcaagacactctttttagccccaggactttcggtattgcttttagcactccccacttctgcttctgtaaagtgatatcaatttgtgataaaatgacaagattattaactgtgcagatttgtagctatagtacatgaggatgatggggtagggtacaattgtctttattatcatatatggtatgtatgtatgatttctttccattcctcatatttagactgtatatttatgtaggtgtgagtgattgcctggtgcttgcttgtgccaaggtgctaggcaccctccaaccctgccaacttttgtggcctcccaaagcattcctgttaccaaagaggcttcaaacctgaccctcacttctcagtggacccgagtttcccttccatgccattattttcagtggggaagttttagaggtgagctgttggccacaatatcaattttaagtgttcatagcagttatgtctcctgcattcttggctcctggatttaccaccaagagtccccaaaatattaatgctcttccctttttctaccctcaaacttatagttgtatcttattttttaaaatgaattttcatggccaggcacagtggctaccgcctgtaatcccagcactttgggaggctgaggcaggagaattgcttgaagccagaagtttgagaccagcctgggcaatgtagtgagaccccctgtctctaaaaaatataaataaaaataaaggcatgttcctgaaagactgtcaccttggaaagtgacaggccctggcattagcatgttgacacacccttttcttcttactcagcaaaatacttcgttttggtttcttcttgtgttgctattgagaaatttgtctgatcatatccttctgcctttgtcccccaagaaatgccctactttatccttttctttttgtagttgaggagggctagagaatcacaattaaaagtaaggaaatagcagggttttgaggatccttgtcccagccccaaagctgaggaaataagaataaatgcttaatatagccttaattctagagcgcaccagccatgaggctgcttttcttgttgtttttgatttttaaaacatacagctgtctggccaggagcatctaccatttctagattattcagagtaatgaggggaatggatggattgctccagtccacagatgagccacataatatgcaaatcatatacccattcatagcatttgttaacattgcttccctgctcagctgctgattgaattctgtgtgcttatataaattatgtcaaaaattatactgcataattgaggtgacagctgttgctgcagtgacatgacagactggaacaatgaagcttttggtttaagtcagccaggaaaatccttctgaatggtaatgtgattgggcaagagctcataaaccatacctcaagtgggtgggagttttatctctatattccttctctctctgaaggaattaaaggcctagatcaagtgctggataattgacaattgcttgtacttaatctgatcggtatctaaaagaaggaaaggatggtcaggaaacatttatcataaatgtagccaaggatatcaattagggtagacaagaataggacaaaaataggccagagctcctgaggaggtgatatgggtctcttgatttgcagaaaatgacagcctatccaagtggcccagtgtatgcctcccagtagcagtgggcatgtaaactgcagcgaccttatttttaaaaccaaaaacctagtatgtggacaaagaacatgacaatatttggtactgagattggttctgagaaacctggggcatgtggctgctgtggttataggtaatatttaagacattcataaaaatctgatattcttttaccgaaataaccccagtatcatctactacttaccatctgttaatagactttactctgtcttttttgtcttcggtttattgtactgagtgccgccaaaacaacttttgttctcttcctgcctacctgcagctggttctataggaatgtagggagccagaggccagtattgatttcagcccttagcacaaaggaaatcagatgcctgcttccagcatttgttagtgttgagtagatgttcttgccctagaagaattacagcctcaaacagaaacctgtttcatggagctttctcccctcagaagagttaatagttaagagctaagcactcttaaacacctaagtctcaaatgctaaaaatttatttttcttgtgtttagtcctctttcaagacatctttctaagcctttcagtaatcaacattaaaagatctccctttcttcagagttatagcacagctttgcccagtagaggctaccaaggacagcttagcagccctttgattgctgggctgggcagatggccttcaagttaagatcaaatgccgggaaaatcagcctacatgggagcacccattttaaacctggagagaaccatgatgttttcttcttcaaataacaatctagttttttttcccccagtactaaaattgtattgtctttcagacaatataatttttatttaaaattggaacatactatcttcatgctttctaagctaaatcttcatttagatttcactcctcagtagatcccagagaagaagctatataggatccagattcaaatttaacagtgtcttctacttttttagttatgttttctatcaactcctgctgccttttcaaatacggatatttttcaggagactcttctacttgtccactgactgtattttttcctttttgatccgtagccctggttaaatggctgacatccttccgtggatgattcttggaggtagtctcagaattccaaagtgattgtctgtcttcttcttgtcttgatcctaatgcagacattcacctctattatttatttattttttttagacagagtctcgctctgtcaccaggctggagtgcagtggcacaatcttggcttactgtaccctccacctcctgggttcaagcgattctcctgcctcagcctctcgagtagctgggactacaggtgtgtgccaccatgcccagctaatttttgtatttttggtagagatggggttttaccatgtttgccaggatggtctcgatttcctgaccttgtgatctgcccaccttggcctcccaaagtgctggaattacaggcatgagccaccgtgcctggccacctctattaaatttttgtggacaaaaataaaattgtcattatttgtttgctctcatggagcactttcagtaatacaattttttttaaattccagttgccctctttgttgctctgtcctctgtaatacctgactttgctaaagacttgaggggtggtttcagaggagggtcaggtgatgggaaggcaggatgagaaaagccctggacttgcatgtttgagaaggcttccaaccacatcttcactcagactcttggaattcctgtccccaaaacaagcttctgttttttgctcacaatgctatatttctaaatttttcctgaattactgagaagcagtcattagctttgttaagtttggtttggggacattgttggtatcaaaaatcgaagtcttattcatttgatgtaggccatgaatcatcaataactggttgctggaaagcttgactaccatccactggggtgctattttgagaaggatttttgggtatctttatagtctgcaattagttgatgattgctttctagtttatcaactgcatttatatttgcttttctgttcatggaaaatcctttatttgctggggttttttgtttgtttgtttgtttttcccacttacagcaagtaaaagtggtctgaggttatccttgtttttcttcgcggtttgccatgtgtgaaagtagatttcctgctattgatatattctcattatagacagaatagtggagaacagtgttgccatggacaaaatccagttttggtccactctggggagcatttggacctgtggtgcttctaacaattaaaagtctagatggtccttgactgtcccccagccatactgcatactactttgtgcattctactttgtgtcattaatgaaagattggttctgtccctgtaacttaggcatttattattcttaactcttcattcctgttctgtagccacccagcagtccattttccctatgttcaggccaaaccacagggcattggggaaggtttttgggattttcttattgagattttgttgaatctgtagtttaccccagctttcctaaggtacagtgaggggttggagggatctgtgtttggcccggggagcaattgtctctaccttaaggttcagttttgagggcataaaatactactttgcaatgtcatgagaacaccgttagatctgaaatgtggaaatggtttctcacaatttaaaggaaaaacccactttgcacccatgatcccatcattttggttgagattttagaataaaaaatatagtgttgagatccgtacttttgtaatcagaccaccaagcatgcctgtggcaaggcagagaggaaaggtctggagccagtgtattgcagtttcatgctacctttacctgctaatcataaaaattatgttttcaaaagtagatgatactagccttacacccaaaaacatgttctgaattagatgccccctcacccaatttttattaagctttctaaattccagccacattgctgtacatcaacattggtttcattcaacagacatttttttggcctgaagatacaaggttcagaaagaggccatccctgccctcaaataactttcatactggtgtatgatgaactgaccattaatagtttaagtgcttacaagctatgtttctgttcaaaaaaaaaatagtttggtataataaatgctataaaccaatacacatttctgacttgggggcagagacagactggctgatgttgtatagtttgtagccctggagtaagaagttgacattaatttcggcctatatgtggaaaagacctataacattgggtgaactgagccagctggccatagaacacaagaacatattccaggaaataaatatagctggagggttggaaatgctgttattactgagagagaaaacaggtgagttgggattgagaactcctgattttcatccctggtttagattcttggccaaagtagtggtagagttaatctttgcttgtggaaagcattaactatgttgcagattcagttgtgttacattattgtgggttctataacaacatattcctcatggacactttaccagagttgctcacacctttttcaatttctcatcccttttggaggaatgaacatgagacttaactgcctttaagcctaaaacggacatgctttccaatgacaagagattttctaaagagaagtcttggagcacatctgttaatacctgagcatctactctgagcagtgcagttttattcaatactggagagagggtgatttctttttttttgagacggagtcttgctctgtctcccaggctggagtgcagtggcgcaatctcggctcactgcaagctccacctcccgggttcacgccattctcctgcctcagcctcccgaggagctgggactacaggcgccggccaccacgcccggctaattttttgtatttttagtagagacggggtttcaccttgttagccaggatggtctcaatctcctgacctcatgatccacccacctcggcctcccagagtgctgggattacaggcgtgagccaccgccgggccgagagggtgatttctaagcagagaattgtatcagttatgtggaaacctttgccagaaatacatataccttgtatattaaatctgagtctcagatttaatcatcgaagcgtagctgggttaagaaacagtctgatcgtaaggatgttgtcgattctgacccatggatgaccacaagaaaaagatatttatttctgcctggataattgagagttgactaactttggaagtcagaattcccaggaattagagtaactgctctggaaagttaaagtgtgaagttttttagatagtttcataaaaacaattctggtttctttttgcttgtgctgactttcttggattttaatctacctcatcttgtctttttagagttacttcaacttgtcactttaacattgtgcttgactttggttgttttctaagatggaatttttcctgttcattgacagcttgttctcttgccttttcattctgatcctcatttcatctaacatcatctcatattgctcctctgtcaagagaaatgttttaaaatagtttaaagtcttgttttatgggaagaaagtgatcctccaatgctatttgtttctgaggtcagtaagagaaggagttaaaacaaggcagtggggaagggaatgaatcctgcactggaggcaaaagctgacaaggaaagagccattaattaagacaatttcaaagtcaactgattgtgatcattaatgtcacaatagatcaaaacctaattatcacagcctaggtaagagccatcagtattaatcggaaaatctaataggaaactattatcaagaaattaggccaaattgaatgcagtgaactttttatcttggcattctctatttttttgtgatgtcccctggcattggcaggtgtgaccctaacagtcgattcaaggccaagtggtcagtttgtcagccttttttaagggatttctttttatttttaggaattccaaacagagttaacctaaactgtcattgccaaaagatcagtcttaaactttcttagcacctgtacctgtttaatgtgatcagctatcagtgaggaaaaaaaaaaaaatctatttaggtcttggaatggttcctgtacctagagtatccatattgaaccttttttttttttttttttttttttttttgagatggaaacttgctcttttgcccaggctggagtgcagtggcgtgatcttggctcactgcaacctccgcctcccgggttcaagcagttctctgcctcagcctcctgagcagctgggattataggcgcctgccaccatgcccggctaatttttgtatttttagtagagacagggttcaccatcttggccgtgctggtcttgaactcctgaccttgtgatccgcctgcctcggccactcaaagtgctgggattgcaggcgtgagccagcacccggccacagtatctttattacagctcactgcagcctcaatctcctgggctcaaatgatcctcctgcctcagcctcccaagcagctgggactacaggcgcacaccacggtgtctggctaattttattatttaaaaaatgttttgtagagacagtctccctgtgttgcccaggctggtctccaactcgtgagctcaagtgatccacgtgcctcagcctcccaaagtgctgggattacaagcataagccaccgcacccggcccctagtgaacattttactgtatgtgttgataaatcatcttttgagtttctgttgtatgtggggacttcctacactggctgctgtgaagaggtatggaagaaaggagaggctttctgcctagaaattctttgagaacacctgaaaagacagtttaatcatgtcacaacactcttaaggctcaagtcagtgttctggtttccggtagctttaggattggattctaaacgagggctggtggtgagtttggtgtttgtctcgtgtcaccctcacccctcacctcctcagtttaggataagagacataatgatttctaccagaatccaaagtaaatccaaagggggagaaaagacataactgttttttcttctaccttttttttgttaaagagttacatctctcacaggaggaaagaattcaagagtctatatgattagttacagagaatattttcatcccctctccctgaatagaaaagcaggggtcaccatttgtatccttacccttgaggtgtttttgaagatgctgtaactcttgaagttgagctgaggcagaaaggttggaaaaatgcagccctctgggtattgtggggagggatgtgatgtagtaagagggtgttttgtggtgctaggattcccacgccaccaacttgcagctttataagagcgctaccaagaaccaccactggggaaaaggttcttattcattgtttctgttggaatgtgatcttgctttctggattttaggaattcaggttactcagtataaaactctgagaaatcagtgtgacttagtccttcacctcctaagataaagtgaatatttctttacaaaataattcatgtccttaatgttaaagatgtaattttattttcaaaacatctataacatgactttcagaagcagttcatttttccaagattcctcacattatactagataaataataggccctcagttaatacccttcagttattgaattaatctagtttgtggaatgaggtgtatcctgccaacttccctctgctcccaagtacactctgagaggtaaaatgctctgggaaatggaacaagaatcgagtggatgctgactctgtgtgcccacctcctcaactgattgataatggttgaccttgggcaagtcacttctttcaatgcctcagttccccatctgtcaaatggggttaataatactgacctacctcacaggggtgttgttgtgaggcattgtaaatcaaagttaatagaatacttcagggtcctctgtggaggatgtcttgagccagagtttaagcctgacacacaggctttggtcctcactgagctgtctccaagactggaactacttagtgactcggcaaattttctgccccccacccctcatcaaagctgctagttcagatgttgacagtgttttcatgaatgttggaatcttactagtccagacttacttaggatgttgttggggaaggcacttgggattttctgtgtcttgcattcacagagggaggccatttcagattcaagagcattggattagggaatcgtgaggcagggatgctactgcgtatttctctctgcaggttggggattaaagttcctttccccatgggtttgaagcagactcagactgtctcaggatcaaagcaaccctcaatggttttgatttatgtcattgcttaccactccccaaccaatcccaggacagctgggtcactgtacccctttgtggtatctgtacctgggcctctccttcctcatagggaccagctgattgaataaatgtgaccaccttatttccaccccccacccccaaaagctacattggaattatttttcctagaaatgtgtataacactcagaattgggcattgatccttaaagcttcatcccattcaccgtattcaacatctgtcatctcttagtgtctgcagtctgaacctaaccttgaccttttttccctctggtttgagaaaactttggacactatttctacttggccaggtgtgggctcaagagccttactctttccatctcagtttaggggcgcagccagctcctcttcccaatagggctctttctgctttccctctccttggccctagatttgtaatccatgaaaaagcacaaggtcctggctccttgcggtcacattctggttctctgtgttttgtggactctgctctcactgttcacccagcactagcagtaccagatggttctgtggagtcctggggaatggagagagcacagtctgactccctgccaagtagccaggagttgacttgcccatggtccgctggctttcccaccacttcctacaggatgggatctaagagactcaagagctgggtttctttcagcactctgtactgtcccaaatagcaaacaaatcactttgtagccagatttctgaatggaaatgagaaattgaattctccatggacttttaggtttatgggggagttttagctgtgtttcttggttttatttcagccaaacatgtctgcttttgattttttttttaaagtataagtggtctatatatatgttcaccttttaaatgtaaatgtttaaaaagtaagcatttatgtgtttccataactgacatctgatgcagacctcattctctccccctcttctaccctcctcttttcccccttttcatactcttgtattggttctaataaatggttgcttttcaaaaaaaaaaaaaaaaaaaaaaa

SEQ ID NO: 269 - DNA, 4082 bp, Homo sapiens
agcttcttctagaagcaggccctgaacaggacgtgggtaagagatccgctgtcccttgagacttggcctactcccggcactccgcggacagccccagcctgcggacagccccagcctgcgtcacttgtccgcatgccagctccacccgggcggacccacacatggttcctacttcagtctctggaagatttggacacaagtttaaggaaactgaactcccgcctgtttgtagtccggggacagccagccgacgtgttcccaaggctgttcaaggaatggggagtgacccgcttgacctttgaatatgactctgaaccctttgggaaagaacgggatgcagccatcatgaagatggccaaggaggctggtgtggaagtagtgacggagaattctcataccctctatgacctggacaggatcattgagctgaatgggcagaagccaccccttacatacaagcgctttcaggccatcatcagccgcatggagctgcccaagaagccagtgggcttggtgaccagccagcagatggagagctgcagggccgagatccaggagaaccacgacgagacctacggcgtgccctccctggaggagctggggttccccactgaaggacttggtccagctgtctggcagggaggagagacagaagctctggcccgcctggataagcacttggaacggaaggcctgggttgccaactatgagagaccccgaatgaacgccaactccctcctggccagccccacaggcctcagcccctacctgcgctttggttgtctctcctgccgcctcttctactaccgcctgtgggacctgtataaaaaggtgaagcggaacagcacacctcccctctccctatttgggcaactcctatggcgagagttcttctacacggcagctaccaacaaccccaggtttgaccgcatggaggggaaccccatctgcatccagatcccctgggaccgcaatcctgaggccctggccaagtgggctgagggcaagacaggcttcccttggattgatgccatcatgacccaactgaggcaggagggctggatccaccacctggcccggcatgccgtggcctgcttcctgacccgcggggacctctgggtcagctgggagagcggggtccgggtatttgatgagctgctcctggatgcagatttcagcgtgaacgcaggcagctggatgtggctgtcctgcagtgctttcttccagcagttcttccactgctactgccctgtgggctttggccgtcgcacggaccccagtggggactacatcaggcgatacctgcccaaattgaaagcgttcccctctcgatacatctatgagccctggaatgccccagagtcaattcagaaggcagccaagtgcatcattggtgtggactacccacggcccatcgtcaaccatgccgagaccagccggcttaacattgaacgaatgaagcagatttaccagcagctttcgcgctaccggggactctgtctactggcatctgtcccttcctgtgtggaagacctcagtcaccctgtggcagagcccagctcgagccaggctggcagcatgagcagtgcaggcccaagaccactacccagtggcccagcatcccccaaacgcaagctggaagcagccgaggaaccacctggtgaagaactcagcaaacgggcccgggtggcagagttgccaaccccagagctgccgagcaaggatgcctgagactgcagagcccttgctccgtgagcaaagcctgggtgcccaagcagccaccgcagcagcagagtacaacctgcagagaagctgatcaccgggcagagatagagcgagcatgtgtgtgtgtgtgcgcgtgtgcagaggagggagtggtgtgcctgtttgtgtgtgcatgcatctgttgacactcatgattctgaatgttgcctgggctgggggagtacctgtagcacgccagtgctgtttcccggcctccagacacaaggctcgaggttatggcagtgactttcagctgagacctgttcctgcaagccagctgccttgtctgaacagaacgtagtggtaggaccctagctgggattctggcatctgcctccctagacctccttccctccctcctcacgtcaggctgtggagcaggagcacagcagttctggctgttgtccaaagcatgggattctggaggcagccagagccctgctgagttcctgctttctgacctggaggctgagcaggccggagtggatggatgctgtccagacgtagccacctggcctctgtttcttattttaaaattctctgctactgggctcagtcccaggcccttccttgggcttctgggactgagcatgaggccatagacagatctaaaaagtttccaccaccctacagaagtacacacagatacctgactggtgtggggtatgcctggtactgtaataggagcctaagacagcacacctaccttttcaggatttagaacctaaaattagaaagagaatcccagctgtcattgttccttccccagaagctaagagccagcctcagagcctacccaggagctgtgaaggggcaagggtcaaactgactcactctaccaggaggagaccaggttgcagtggcgtaaggccccctggtttctctggccacactccaaggcaccacagtgctgccagtgaggacagctgacacccagccagggaaaccattctagtctttattctgttggcttccagggcctgtcctggacttgtcagcatccagactgccatgtcagctatcccagtagctgagctccaaggactcaggcagagggactcagggatggggactgccaggggcagttggcaaaagtccaagtagagattacacccagcacaccattccttccaggagcagtaggtgggaggtttgacccagagaagccaatccttgcattccaggagtggcctgtgcctcccacctcttccttcccactgccaaaggcctgtgttgagaaagatgtcatgcaaaaggacgacggtggccaactaaagcaagtcttccttccaccctgtggcctgcacttgagccacaaagtgtgtgtgtgtgtgtgcgtgtgtggtacgtgtgtgtgtgtgtggctatgaggctgattcctgtttggatttttgtcctcacgtgtatcattaagctggcctttgggccttttcctttctacctcccctgtgacctttcctagcctcagatctgttaattcttttggccccagccctgtccctcactgtcctctgtccttggaccagaaccctggggtcagacccatctcctgtagctgtccatcacactgacaggcttcttcctgagatatcctcaggttttctcagccagagagctgcctttagagtccaactgttgtacgtatgtcaccttcactagaaatgtcccatcatcgtgggaggggagcagggcacaggggatggtgtgcattcagagcattgggttgggggcttccctgttccctcagccccagtcgagaggaaagagaatcgggccactgccagaaagagagtcaagcaaacctggaagggcaaatctgagagtgggaaggccaaaggccgaggcccagatttagtattcactagcagcgccttcgggtagcaggatgattccttttcctgcctgtctgctgctggctctcttccctaaggtacaggttggcaggaccacctccgcctacttctccaccatccctagcatgccagcccgttcccagatcaacctgccagtggagtcaggcagtgcactcctggagccaagagggaagggcagggtagagagggtatgtccagtagcctggagctccatggtggcttcatgcctcccttctcccagctcaggtggccctgagggctccctcggaacagtgcctcaaatcctgacccaagggccagcatggggaagagatggttgcaggcaaaatgcactttatagagattttctattgctgggaaggtgtgtttctcccacaatttgtttgtgaatattcacttgttttataaatgtctgacctgtcttgaggaaaaaaaaaaaaaaaa

SEQ ID NO: 270 - DNA, 9352 bp, Homo sapiens
gtcgcagtatttcctgttcggattatcttttgcttccccccagctgcctccttaccctcacactcccactcctccgtttccgcggtcgaagctgccttcggccccgggtggtctcccccgcccggggaccccctgtgcctcccctcccgggctgcgggggagcccctccgagaccatgaggaaattcaacatcaggaaggtgctggacggcctgaccgccggctcgtcctcggcgtcgcagcagcaacagcagcagcatccgcctgggaaccgggagccggagatccaggaaacgctccagtccgagcactttcagctctgcaagactgttcgccatggatttccctatcaaccctcagccctggcctttgatcctgtacagaagatcctggcagtgggaactcagactggtgctttaaggctctttggtcgtccaggagtagaatgttattgccagcatgacagtggagctgcagtaatccagctccagttcctgattaatgagggagcgcttgtgagtgccttggctgatgacaccttacacttatggaatttacgtcagaagaggcctgccatactacattcgcttaaattttgcagagaaagggttacattttgccatctgcctttccagagtaagtggctctatgtgggcactgaacgaggtaatatacatattgtcaatgtggagtccttcacactctcaggctacgtcattatgtggaataaagccattgaactgtcatctaaatctcacccaggacctgtggtccatataagtgataatccaatggacgagggaaagcttttgattggctttgaatctggaacagtagttttatgggacctcaaatcaaagaaagccgactacagatacacatatgatgaggctatccactctgttgcttggcatcatgaaggaaaacaatttatttgcagtcattcagatggcaccttgactatatggaatgtaaggtcccctgctaaaccagtacagacaatcactccacatggaaaacagttaaaggatgggaagaagccagaaccatgcaaacctatcctcaaggtggaattcaaaacgactagatctggggagccttttattattttatcaggaggtttgtcatatgatactgtaggaagaagaccttgcttaacagtgatgcatgggaaaagcactgctgtgctagaaatggactattcaattgttgattttctaacgctgtgtgaaacaccatacccaaatgattttcaagaaccatatgctgtggttgttcttctagaaaaggatttagtacttatagaccttgcacaaaatggatatcctatatttgaaaatccctaccctttgagtatacatgagtcccctgttacatgttgcgaatattttgcggattgtcctgtggaccttattcctgcactttattctgttggagctagacagaaacgtcaaggttacagcaaaaaggaatggcccatcaacggaggtaattggggcttgggtgctcaaagttacccagaaataattattacagggcatgctgatgggtcagttaagttctgggatgcttctgcaataactctacaagtattatataagctaaagacatctaaagtatttgaaaagtcaagaaataaagatgacaggccaaacacagacattgtagatgaagatccatatgccattcagatcatctcctggtgtccagaaagtagaatgctgtgcatcgctggagtttcagctcatgtcattatttatagattcagcaagcaggaagtaatcacagaagtcattccgatgcttgaagttcgattattatatgagataaatgatgtggaaactccggagggtgagcagccaccacctttgccaacacccgtgggagggtccaaccctcagcccatccctcctcagtctcatccatctaccagtagcagttcatctgatgggcttcgtgataatgtaccttgtttaaaagttaaaaactcaccacttaaacagtctccaggttatcaaacagaactagttattcagttggtttgggtgggtggagaaccaccacaacaaataaccagcctggcagtcaattcttcctatggactggtggtttttggcaattgcaatggcattgctatggttgactacctccagaaagcagtgctgctcaacctgggcactattgaattatatggctctaatgatccttatcggagagaaccccgatctcctcgtaaatctcgacagccttcaggagccggtctgtgtgatattagtgaagggactgttgttccagaggatcgctgcaaatctccaacctctggttcttcatcaccacacaattcagatgatgaacaaaaaatgaataattttatagaaaaggtgaagaccaaaagcagaaagttttccaagatggtagccaatgatatagcaaagatgtcaaggaagttaagcttacctactgacctaaagcctgatttagatgtaaaggataactcctttagccgatcacggagttcaagtgtaacaagcattgacaaagaatcccgagaagcgatctccgctcttcatttctgtgaaacgtttactcgaaagacggactcgtccccttccccttgtctatgggttggaacaacgctaggaacagtgcttgtcattgcactgaaccttcccccagggggagagcaaagacttcttcagccagtaattgtgtctccaagtggtactatattgaggttaaaaggtgcaatcttgagaatggcatttctggataccacaggctgcttaataccacctgcgtatgaaccctggagagagcacaatgttcctgaagaaaaagacgaaaaggagaaattgaaaaaacggcggcctgtctcagtatccccctcctcttctcaggaaattagtgaaaaccagtatgcagtgatatgttctgaaaagcaagcaaaagtaatctcactgccaacccagaactgtgcttataagcaaaatattacagagacctcgtttgtgcttcgtggagatattgtagcattgagtaacagtatctgccttgcctgtttctgtgccaatggacatataatgacttttagtttgccaagtttaagacctctgttggatgtgtattacttgccccttaccaatatgcggatagccagaacgttctgctttaccaacaatggacaagcattataccttgtttcacctacagaaatccagagacttacttatagtcaagagacctgtgaaaatcttcaggaaatgttgggtgaactcttcactcctgtagaaacacctgaagcaccaaacaggggattctttaaaggcttatttggaggtggtgcacaatctcttgacagagaagaactatttggagaatcgtcctcaggaaaggcttcaaggagccttgcacagcatattcctggccctggtggcattgaaggcgtaaaaggggcagcatctggagttgttggtgaattagcacgagccaggctggcactagatgaaagagggcagaaacttggcgatctggaagaaagaactgcggccatgttatcaagtgcagagtcattttctaaacatgctcatgagattatgttgaaatacaaagataagaagtggtaccagttctgacaaccagaatccaataagtccaacttcagccagaaggaaaaaagttttccatttttattacattctttaggaaagttaacgttaaagggatgttcgtcactgaatactgttctttcctagcacagtcatgcactgttttacctcagtcatgtggctttaactgaggagtgttcacacgcactcgaaatggagtatatggtgtgtgccagttatgagttgaccatttgggaattaaacaggtcacacgtgacagatgaagaaaccaagggggctgctgaggagacctggtgcagggactaatcctggatcattcctgtattaaactttcatatgccaaaagggtttgtgccgttttatctgccatcagtgtttgacctgtttagggcagaggcaataagtcagaagtcttgaagttgaaatagttatatgtgtgtcattggactggattataaacagctgtcttggactttccctctcttaacactgactggtcatcagtatcattagtgaaaaagaaacaaattgtttgttatcatctctttagacagataagctgaatggtgggctttaaataataaaaacatacacatagttgacttgtgtatgagctactcttggattcttgttattatagacttgtatttagttcatattttgtcaaaagcaaaacaagaagatacatcacttttcattgaaaagaaaagtgtagagcatgactgaattgctcatcattctgggagtttccatgtagtggctatgcagtgtggaaagtgagaaaaacctccattgtggtgaggagaatacttcaatgtcccttgtccttgttctcattaattcagctaaaggtggatttgaccaaaataatgctggttaaatttgtagaaatgttgaaattggctgtgttttaaattttgcttgaatttttataaaatgtttaaccaaatgtacctttgcattctttaattaaaattgcttaaaaaaaaactttcattatttcagtaaaatgctcagctcccttttcaaaatgccctttatttgctaactgttccaatacactcaggtgatgagccaattaaatgttagtgcacatgctatcgcatggaaaattacaagcatctgttgtcaataattatataagagtttagtctgatgacctacaaaatattttgtgtagaaatatactataaatctgtacatatcctttcaaggttttaaaaaaccaaaaagaaaggaaaatatgtacactgtgataactaaattatttctgtattggaatataatacaatttgagaccagcaatggacaatgaatgattgtttcatagaatagcattacgggcaggaaagaaaccacctagtagatctagaagtaagcaatctcagaatacagactaatctgagattattattgattgttgttaaagcaacccagcaaaagcaaaatggaagcattaaaattaatgttaatgaaatttaaatattgtcttctataaaaaattcctttaaatgattttgttttttcattaagagataatcagagcacaaattgatagtaaacaggatggttgtttttctattctatatgatcattaaaggaatatgtaggacatcttaactttttcatacagtctgttatgcatattttcctctacttttcattaataaagcttttatgtttacattttataacatgcactactagatgcaaaagtttacatcaaagtttactttaaatatcatttggtagggactaaatgtgtgtgatagagataattgatcaagccaaaagaaatattttttaaataagcccttttcaaaagtttttgaatttatagaaagcaccaatgaataacatatttctgtttcgttaatgtcagctgcctgaacattcagcagtttataaattgcttaatttgtgttatctattatccagtaaacccatagttccatgatatgtcacaggaattgttaggtcctattttaaaggtacagttttgtgaatgtcatcaataaaatcaacagttatggatttgaagaagttgggaaagcattatgtagattaatatactggttggttccctatctatgtggaaggtcatattagctgcaattatttaatttgctgtgttattttgtgttatataacacaaatatatttgtatattaacttcatttttactgtcatttttcctgttgtatacaaaatgaactaatcttgtaattattttcaaatatagaagtatatacattagatggatttccaagattttgtaagaaaatcttaaatcagtgttttgagttatttaatttttaaattaatctacaaattatgcacaacaaactagagactcagttaggattagaaagcttaaagtatgtttgagtgtaggaaataagcttctcagagttatacttgattctgtctgtagataagagacagtctacagtaataactaacccagggaatttactgtaatttgagaggtaacatctctatttttttctttttaaatacagaaagtaatagtcaccagcaagccacgatttcaggaaaactgactaaaaaaaaaagtcaaaatagaaaatatcagaaaaatgaaagatttttgtgtgccctctccatatcctcattgtttttgttgcatttgtccttgactctaaaatcactgaagtattcatgattagtagtttgtaagtaggaagtggtttttctgtatgtaccatatatccagttcatttcagttttcaaactaaaatccatatgtatttgctgagaaagttatttgaaatcttatattctgacaaattctgtacattacatccatttgaagttttgcatcatcttaacacttttgctttgcatttcaattgtacaaagtgtttccaaaaaaatggttatagattcgactgagctattactaacttctccatttgattttttatggatgtgaaaaatgctgctacttgtctatgttattatgtgtaagtatattacaatttaattaagtacaatagtttaaagaacgaagcaatttttttttttttggcttagaacttcttaattgtaggttcctctgaagcgatttcatgtagatatgtgagtgttttaaacaagtctgaaagtgttacatacttttaggttacaggggtgctggggagacagctgaggaaaggaagaatatgtggaagacaccacggagttcaaagttttaccctgagttctatcttccatgtatgttttgcttaaggcatttctcatgtgacattagaaaagctatatccaaaggtaaattttttgtggcaaagatttattttacactttaacttttgggattttatttgtttcagcaaaataaagagcactgaactttaaacttgaattttttctgcacttttttaggtaatgaaaactttttattatcatttaatccacattgctcagtttaaaccaagtgatacatgtgtataaaacataccaaaatcatgaatatgctgctagctgtaccttaaataaactgatcagttttaaaacctttaatagggttttatatagatttaaaaaatagtaaaataatctgctgtatgtttcagtgttcttggtcttaaattattgcaacactttcagatttgttttaagatcatacagtaacatgttatatttatacatactgctagaaaatatacttttagttttaaaatggaatttttataaatgtactttaattttaaaatggtgaacttgttaagtttaagtcaaagtacttaaaaagtatgtatattatccatacaaaaagttatgttttacgcttataataagaaatactggtatctcatatcgagatacaattaattttaaaaaatcatacatcatttaaaaatcttcacacatgaacaggaaagatatcatttctatgctttaaaaaaccctctattgagcattttcaaatattaattttattttgggggaaaatgcccacaacaataattgcaagatctttctcaatagcttcagtttgctgttggatgcctaccttaactattgttttaaaatatagatatatatatatatatttaaaatagttttccaggtattttcttctaccttttttaaaaataaatttccaaaaatgaaaacagagtttatgtatttttgtcaatgaaggtttttattttgtagtttatagaatttgttccttatcagtttgatacttgatcaacattcttagactttttaatctgtatttactttggggggaaaaaagcactcctatatcttaaatgtccttcttttttcttttcccttttagggtatttgttctcttggattgaaatttatgcccacagatttttcttttcatttgaaaatgaatgtgaagatactgtttacagcttttgttaattgcacttttcatcactctgatcaatttcttgtaaagtgctatgggaattatttttcctgtgaatattaatgattttactactgcctccgaagttttaaaaaaggttctgtagacagaaaacagttgttgcaaccaaaaacaaccaaaaaaagaaaaaaagggaaaactggcttacctttctcagatgaattaaatgattttaataacttcccaattaccagggttataacattgctttcttcagttattaatacagtcaaattaattttaacaatataggcacaattcatttacaaattcagtacagtagtccagggctacatgtaagtggtctctttattttattctttacatcagaaaaatcatgaatgtcagttttgccagtattttacaatgaggcttatcgtttaaaattttatagtgtatgacatgtaaataaaccagtatttattgtaggttgtttgattcaggcatttcaaatggatataggttaatggcaatggaatcctatttatttggtagttggttttgtttgtttttgtttatttacttttgctatttgttttgtattgtctaaactttgcttcaactgaagacagtgtaaggagttgaaaatacaatcaacatagcaatggaaagcaatgcaaagagggtaaatcttgttttaatttttttaactttttttttttgtaaataaatagtactgtgatactttaggtgtgacctctattccacatgatagttagaaccagaaaaacacttttgctttctagttatactattggttcattgtaaatgcattaccaaaagacaatatgaaaaagagcaagattaagtttttctaacattgtccacttcaggggcaagcatgcttggtatagagctctagcttgtgtataccttaaactgtaacttgcaggtgtttttcagttgctgcactttttatttaatcttgctcagtcccagtaactatctcaaaggtaattgctggaatatgcattttgaaatacggtttaaaaaaaatctgtgtattgtttcatctaaaaagaaaagcactattggaaacactaaaaacgtgttaaactttgtagttattttgcattcctgtactttacaaactgtcatcacagcaaaaagtttaaaattaggtaatgaaatatttttgtaaataaataccgttaagctggtattttaaaaaatgtattataaattaattaatgtttctggaaaatgttcatatatatgtatatgaatgtctctttatgctgaagggctctgattgggcaaaataaaatactctaatctctcctgaaactaaacaa

SEQ ID NO: 271 - DNA, 5548 bp, Homo sapiens
aggttacttgactgggagttctcagacctccagtttcagccctgccctcagcctccaatccgtaagagacacccagccccagcaattggattgggcagcccgtcttgacacaccactgtgctgagtgcttgaggacgtgtttcaacagatggttggggttagtgtgtgtcatcacattcgagtggggattaagagaaggaaggctgccttgctggagctgtgtggtcttctccaagtgagagtcgcaggcaatagaactactttgcttttggaggaaaaggaggaattcattttcagcagacacaagaaaagcagtttttttttcaggtgctgacggccacccaccatcatctaaagaagataaacttggcaaatgacatgcaggttcttcaaggcagaataattgcagaaaatcttcaaaggaccctatctgcagatgttctgaatacctctgagaatagagattgattattcaaccaggatacctaattcaagaactccagaaatcaggagacggagacattttgtcagttttgcaacattggaccaaatacaatgaagtattcttgctgtgctctggttttggctgtcctgggcacagaattgctgggaagcctctgttcgactgtcagatccccgaggttcagaggacggatacagcaggaacgaaaaaacatccgacccaacattattcttgtgcttaccgatgatcaagatgtggagctggggtccctgcaagtcatgaacaaaacgagaaagattatggaacatgggggggccaccttcatcaatgcctttgtgactacacccatgtgctgcccgtcacggtcctccatgctcaccgggaagtatgtgcacaatcacaatgtctacaccaacaacgagaactgctcttccccctcgtggcaggccatgcatgagcctcggacttttgctgtatatcttaacaacactggctacagaacagccttttttggaaaatacctcaatgaatataatggcagctacatcccccctgggtggcgagaatggcttggattaatcaagaattctcgcttctataattacactgtttgtcgcaatggcatcaaagaaaagcatggatttgattatgcaaaggactacttcacagacttaatcactaacgagagcattaattacttcaaaatgtctaagagaatgtatccccataggcccgttatgatggtgatcagccacgctgcgccccacggccccgaggactcagccccacagttttctaaactgtaccccaatgcttcccaacacataactcctagttataactatgcaccaaatatggataaacactggattatgcagtacacaggaccaatgctgcccatccacatggaatttacaaacattctacagcgcaaaaggctccagactttgatgtcagtggatgattctgtggagaggctgtataacatgctcgtggagacgggggagctggagaatacttacatcatttacaccgccgaccatggttaccatattgggcagtttggactggtcaaggggaaatccatgccatatgactttgatattcgtgtgcctttttttattcgtggtccaagtgtagaaccaggatcaatagtcccacagatcgttctcaacattgacttggcccccacgatcctggatattgctgggctcgacacacctcctgatgtggacggcaagtctgtcctcaaacttctggacccagaaaagccaggtaacaggtttcgaacaaacaagaaggccaaaatttggcgtgatacattcctagtggaaagaggcaaatttctacgtaagaaggaagaatccagcaagaatatccaacagtcaaatcacttgcccaaatatgaacgggtcaaagaactatgccagcaggccaggtaccagacagcctgtgaacaaccggggcagaagtggcaatgcattgaggatacatctggcaagcttcgaattcacaagtgtaaaggacccagtgacctgctcacagtccggcagagcacgcggaacctctacgctcgcggcttccatgacaaagacaaagagtgcagttgtagggagtctggttaccgtgccagcagaagccaaagaaagagtcaacggcaattcttgagaaaccaggggactccaaagtacaagcccagatttgtccatactcggcagacacgttccttgtccgtcgaatttgaaggtgaaatatatgacataaatctggaagaagaagaagaattgcaagtgttgcaaccaagaaacattgctaagcgtcatgatgaaggccacaaggggccaagagatctccaggcttccagtggtggcaacaggggcaggatgctggcagatagcagcaacgccgtgggcccacctaccactgtccgagtgacacacaagtgttttattcttcccaatgactctatccattgtgagagagaactgtaccaatcggccagagcgtggaaggaccataaggcatacattgacaaagagattgaagctctgcaagataaaattaagaatttaagagaagtgagaggacatctgaagagaaggaagcctgaggaatgtagctgcagtaaacaaagctattacaataaagagaaaggtgtaaaaaagcaagagaaattaaagagccatcttcacccattcaaggaggctgctcaggaagtagatagcaaactgcaacttttcaaggagaacaaccgtaggaggaagaaggagaggaaggagaagagacggcagaggaagggggaagagtgcagcctgcctggcctcacttgcttcacgcatgacaacaaccactggcagacagccccgttctggaacctgggatctttctgtgcttgcacgagttctaacaataacacctactggtgtttgcgtacagttaatgagacgcataattttcttttctgtgagtttgctactggctttttggagtattttgatatgaatacagatccttatcagctcacaaatacagtgcacacggtagaacgaggcattttgaatcagctacacgtacaactaatggagctcagaagctgtcaaggatataagcagtgcaacccaagacctaagaatcttgatgttggaaataaagatggaggaagctatgacctacacagaggacagttatgggatggatgggaaggttaatcagccccgtctcactgcagacatcaactggcaaggcctagaggagctacacagtgtgaatgaaaacatctatgagtacagacaaaactacagacttagtctggtggactggactaattacttgaaggatttagatagagtatttgcactgctgaagagtcactatgagcaaaataaaacaaataagactcaaactgctcaaagtgacgggttcttggttgtctctgctgagcacgctgtgtcaatggagatggcctctgctgactcagatgaagacccaaggcataaggttgggaaaacacctcatttgaccttgccagctgaccttcaaaccctgcatttgaaccgaccaacattaagtccagagagtaaacttgaatggaataacgacattccagaagttaatcatttgaattctgaacactggagaaaaaccgaaaaatggacggggcatgaagagactaatcatctggaaaccgatttcagtggcgatggcatgacagagctagagctcgggcccagccccaggctgcagcccattcgcaggcacccgaaagaacttccccagtatggtggtcctggaaaggacatttttgaagatcaactatatcttcctgtgcattccgatggaatttcagttcatcagatgttcaccatggccaccgcagaacaccgaagtaattccagcatagcggggaagatgttgaccaaggtggagaagaatcacgaaaaggagaagtcacagcacctagaaggcagcgcctcctcttcactctcctctgattagatgaaactgttaccttaccctaaacacagtatttctttttaacttttttatttgtaaactaataaaggtaatcacagccaccaacattccaagctaccctgggtacctttgtgcagtagaagctagtgagcatgtgagcaagcggtgtgcacacggagactcatcgttataatttactatctgccaagagtagaaagaaaggctggggatatttgggttggcttggttttgattttttgcttgtttgtttgttttgtactaaaacagtattatcttttgaatatcgtagggacataagtatatacatgttatccaatcaagatggctagaatggtgcctttctgagtgtctaaaacttgacacccctggtaaatctttcaacacacttccactgcctgcgtaatgaagttttgattcatttttaaccactggaatttttcaatgccgtcattttcagttagatgattttgcactttgagattaaaatgccatgtctatttgattagtcttatttttttatttttacaggcttatcagtctcactgttggctgtcattgtgacaaagtcaaataaacccccaaggacgacacacagtatggatcacatattgtttgacattaagcttttgccagaaaatgttgcatgtgttttacctcgacttgctaaaatcgattagcagaaaggcatggctaataatgttggtggtgaaaataaataaataagtaaacaaaatgaagattgcctgctctctctgtgcctagcctcaaagcgttcatcatacatcatacctttaagattgctatattttgggttattttcttgacaggagaaaaagatctaaagatcttttattttcatcttttttggttttcttggcatgactaagaagcttaaatgttgataaaatatgactagttttgaatttacaccaagaacttctcaataaaagaaaatcatgaatgctccacaatttcaacataccacaagagaagttaatttcttaacattgtgttctatgattatttgtaagaccttcaccaagttctgatatcttttaaagacatagttcaaaattgcttttgaaaatctgtattcttgaaaatatccttgttgtgtattaggtttttaaataccagctaaaggattacctcactgagtcatcagtaccctcctattcagctccccaagatgatgtgtttttgcttaccctaagagaggttttcttcttatttttagataattcaagtgcttagataaattatgttttctttaagtgtttatggtaaactcttttaaagaaaatttaatatgttatagctgaatctttttggtaactttaaatctttatcatagactctgtacatatgttcaaattagctgcttgcctgatgtgtgtatcatcggtgggatgacagaacaaacatatttatgatcatgaataatgtgctttgtaaaaagatttcaagttattaggaagcatactctgttttttaatcatgtataatattccatgatacttttatagaacaattctggcttcaggaaagtctagaagcaatatttcttcaaataaaaggtgtttaaacttt

SEQ ID NO: 272 - DNA, 5134 bp, Homo sapiens
ctctcagctgggatcgcgccgcgtcaacttccgggcggatgcccgccagcacggcctccgccgctccccttctttggcccctttgtgtccccgcagtgtcgaggcgcgggccctggcaggtcctttctcgaggcagggggcacggtagcacagggagcttctctttgtgggcgggcgcgaggcccgctagggggttatactggggaacgtgcctgcgcgtgcttggatagttcatttaaagcccccatccctgcaaggtggtgctttctaccaatatgaatcttttcaacctggaccgttttcgctttgagaaaaggaataagattgaggaagcgcccgaagcaacccctcaaccttcccagcctggcccttcttcaccaatttctcttagtgctgaagaggagaatgctgaaggggaagttagcagggcaaacactcctgattcagatataactgaaaaaacagaagattctagtgttccagaaactccagataatgaaagaaaagcaagtatatcatatttcaaaaatcaaagaggaatacagtatattgatttgtcttctgatagtgaagatgtcgtttccccaaattgctccaatacagttcaagagaaaacattcaacaaagatacagtgattatagtttctgagccatctgaagatgaagagtcccaaggccttcctaccatggcacgtagaaatgatgatatttcagaactggaagacctttcggaattggaagaccttaaagatgctaaacttcagactttgaaggaactttttccacaaagaagtgacaatgatttacttaagttgattgaatcaacaagcactatggatggagcaattgctgctgccttgctgatgtttggtgatgcaggtggtgggcccaggaaaagaaaattatcttcttcttcagagccatatgaggaagatgaatttaatgatgatcaatctataaaaaagacaagactggatcatggagaggaatcaaatgagtctgcagaatctagcagtaattgggaaaagcaggaaagtattgtactgaaattgcaaaaggaatttcccaattttgataaacaggaacttagagaagtactcaaggaacatgaatggatgtacacagaagctttagaatctctaaaagtgtttgcagaagaccaagatatgcaatatgtatcacaaagtgaggttccaaatggaaaagaagtttcttcaagaagtcaaaattaccctaaaaatgcaactaaaacaaaactaaaacagaaattttcaatgaaagcacaaaatggctttaacaagaaacgtaaaaaaaatgtttttaatccaaagagagttgttgaagactctgaatatgattcaggttctgatgtcggtagttcactagatgaggactatagtagtggtgaagaagtgatggaggatggctataaaggtaaaattcttcacttccttcaagatgcttcaattggtgaacttactttgattcctcagtgttctcagaaaaaggctcagaagataacagaactccggccctttaatagttgggaggctctgttcacaaagatgtccaaaactaatggcttatcagaagatttgatatggcactgtaaaacactgatccaagaaagagatgtagttataaggcttatgaacaaatgtgaagacatttcaaataaattgaccaaacaagttaccatgcttactggaaatggaggtggatggaacatagaacaaccttccattctaaaccaaagtttgtcactcaagccctatcagaaggttggtttgaattggctggcattggtacataaacatggacttaatggcattttggcagatgaaatgggcctaggaaaaactattcaagccattgcatttctggcatacctctatcaggagggtaataatggtcctcatttgatcgttgttccagcttcaactatagataactggttaagggaagttaatttatggtgccctactttgaaggtcctctgttactatggttctcaagaagaacgtaaacaaattagatttaacattcatagtagatatgaagattacaatgtaattgtgaccacatataactgtgcgatcagcagttctgatgaccgtagtctgtttcgacggctgaaacttaattacgcaatttttgatgagggccatatgctgaagaatatgggctccattcgctaccagcaccttatgacaattaatgcaaataaccgtttgctgctcacaggcacacctgtacagaacaatctgttagaactcatgtcgctgttgaattttgttatgccacacatgtttagtagtagcaccagtgaaatacgaagaatgttttcctctaagacaaaatcagcagatgagcaaagcatatatgaaaaggagagaatagcacatgcaaaacaaattataaagccatttattctcagaagagtaaaagaagaggttctcaagcagttaccccccaagaaagatcgaattgagttgtgtgcaatgtcggagaagcaggagcaactctatttgggtcttttcaacagattgaaaaaatctatcaataacttggtcacagaaaaaaacacagaaatgtgcaatgtcatgatgcagttgaggaaaatggccaatcatcctttattacatcgccaatattacacagctgaaaaactcaaggaaatgtctcagcttatgctaaaggaacctacacattgtgaggctaaccctgacctgatctttgaagatatggaagttatgacagacttcgaactacatgtactttgtaaacagtaccgacacattaataactttcagttagacatggacttgattttagattctggaaaatttcgagttttaggatgcatcttgtctgaattgaaacagaagggtgatagagttgtgttatttagccaatttaccatgatgctggatatcttagaggttctattaaaacatcatcagcataggtacctcagattagatggaaagactcagatttctgaaaggattcatctaattgatgagtttaataccgatatggatatctttgtgtttctgctatcaacaaaagctggtggattaggaataaatctgacttcagcaaatgttgttatacttcacgatattgactgtaatccttataatgacaaacaagcagaagatagatgccatagagtaggccagactaaagaagtactagttataaaactaataagccaagggacgattgaagaatccatgctaaaaattaaccaacagaaattgaaactagaacaggatatgactacagtagatgaaggtgatgaagggagtatgccagcagatatagccacattactaaaaacatcaatgggcctgtgaaataagaactgtgaactctcaattgatgaggaaatatcaacttggtgcactcaaggacatttacattatgatgaccatggggtttatgaacatttataactttttataatttccatattacatttctcatagtatggacaactttttgccactaactgaattctccaaatactcacacgtgaaatttcaaaaaagaagccacaaatatgtagttctgaagatgttgaataatcattttacaaagcagttttctgaatggggattagttggtgattgtttgtaacaaatatgctaatgctttagaaatgtcagtatttttgtaattatttctacctccaaatatatatatattgtctttcactggataatgtgtgtagatttttacatgtgccttatttgacaatgcttatgtcttgtttttgcttgtctcatttgaagttcttttttattatgttaaagaatgcagctgtatagattatatagctttcattttattgctatttgaagcagatgttcaccaatgtcagcaagaactcaacctgaatttaaaggtggcattccatatactaacatcccccaggtcctctcaagtacttctgctgaaacaaatttatttggctaggcactaagttgttttccagtgaatagtaactaaagaagcccctaccttgctccatggattaattccttctgttcattttccaactgcactaattgtgcatattactctgcctaatcttgtgcatgttttcattgatttccctctcccggcttttgcttctcttgaaactgttgcccagtcacttctgctccaattctcttcctctctaaatagtagtttattactgccacatctccatgcatcagcaaaatgttggtgacatttttctagcctggcagaacagattacttaaagctatttcatttcaaagcagactgaatgtgacttcatctaaaggcagcattaggtactgcatggaaataggtcattaacttgaaactcttatcaaaatatattttaccagtttccagaatttccagtacaggaccgcctgaagagagagccattgttcaattccaattcagtgtgagtgacaaagtgaaatttagaagtgaagttgtctatttgatatttaactctttattaaatctttctttaaatttctgcctgtcagtctatattgctgtttttattatacatcagtttctttgtataacttgtgagttccatgtgttttgtttttattatgtaaatatcattataaataaacttatttataaatcaaagatttgttaatttttggaaatcatgcttttcaaagcatcctaacttgctaagatgctaggtagtacgaccctctggatttggaaggcaaataaaactcttacagtgattatttagatattaaagactgagaactcacggcttaaccccagtcttgatggtatattgaacagactgaatatattttaccattacagggctaaaaggagtcttcatgtgttaatactacctccttgtacatcactatacccaaatcagttattcaaattgttaggaattttaccttttaaaatctcataatggatatctcatgttttctgtattaatgtattttcaatgataggctgtttctttttttgttgttattgttgttgttgttatatccatacttttatctctaatgaaatgtagttgggttcttcctgtaatgcgctattatgtcttgggcttaataaaaatatttgtgatcataaaaaaaaaaaaaaaa

SEQ ID NO: 273 - DNA, 4943 bp, Homo sapiens
acaaagtttgtgcctgcggtgcacctcggtcgggctcgccgggctcgagggctggcgggcgccggggctacgaggcccgggggggagagagccggcaggcggcggcggtggtggcgggggcgatgcgccgcgcccggccgcgctaggtgagccggcaccgggagcgcgggccgcggccatgggcaccctgggcaaggcgagagaggctccgcggaaaccttcccatggctgcagagctgcctctaaagcaagactagaggcaaagccagccaacagccccttcccctcccatcccagcttggcccacatcacccagttccgaatgatggtgtctctgggacatttagccaaaggagccagcctggacgatctcattgacagctgcattcaatcttttgatgcagatggaaacctgtgtcgaagtaaccaactgttgcaagtcatgctgaccatgcaccgaattgtcatctcctctgcagaactgctccaaaaagttatcaccctctataaggatgctttggcaaagaattcaccaggactttgcctgaagatctgttattttgtaaggtattggataacagaattctgggtcatgtttaaaatggacgccagcttgacagacactatggaggagtttcaggaactggtgaaagctaagggtgaggagttacattgccgcctgattgacacaactcaaatcaatgcccgtgactggtccaggaaacttactcaaaggataaaatcaaataccagcaagaaacggaaagtctccctgctctttgaccatctggaaccagaagagctatccgagcacctcacctaccttgagttcaagtctttccggaggatatcgttctctgattatcagaattaccttgtaaatagctgtgtgaaggaaaaccccaccatggagcgatctattgctctgtgcaacggcatctcccagtgggtacaactgatggttctcagccgccccacgccgcagctccgagcagaagtcttcatcaagttcatccaggtggctcagaagctccaccaactacagaacttcaatacactgatggctgtgataggtgggctgtgtcacagctcaatctcgaggctcaaggagacaagttcgcatgtcccacatgaaatcaataaggttctcggtgagatgactgagctgctgtcctcctccagaaactacgacaattaccggcgagcctatggagagtgcaccgacttcaagatccccattctgggtgtgcatctcaaggacctcatctccctgtatgaagccatgcctgactatctggaggacgggaaagtgaacgtccataagctactggccctatacaatcatatcagtgaattggtccagctgcaagaggtggccccacccttggaggctaacaaggacttggtacacttgctgacgttatccctggatctttactacactgaggatgaaatctatgagctttcctatgcccgggaaccaaggaaccacagagctccatctgtcttcaagaactatgatcacgaccaggatggatacatttctcaggaagaatttgaaaagattgctgcgagttttccattttccttctgtgtgatggacaaagacagggaaggcctcatcagcagggatgagatcacagcctacttcatgagagccagctcaatctattccaagctgggcctgggctttcctcacaacttccaagagaccacctacctgaagcccactttttgtgacaactgtgctggatttctctggggagtgatcaaacaaggatatcgatgtaaagactgcgggatgaactgtcacaaacaatgcaaagatctggttgtgtttgagtgtaagaagcgagccaagaacccagtagctcccacagagaacaacacttctgtggggccagtgtccaacctttgctcattgggagccaaagatctgctccatgcacctgaggaaggaccttttacattccctaatggggaggctgtggaacatggtgaggagagtaaggatcggaccatcatgctgatgggagtgtcctcacagaagatttctcttcggctgaagagggctgttgcccacaaggccacccagactgaatcacagccttggattggcagtgagggcccttcaggtccctttgtgctgtcttccccaaggaagacagcccaggatactctatatgtgcttcccagtcccacctctccatgtcctagcccagtcttggtcagaaagcgggcttttgtcaagtgggagaataaagactccctcataaaatcaaaggaggagctccgtcacctcagactgcctacctaccaagaactggaacaggaaataaatactctgaaagcagataatgatgccctaaagatccaactgaaatatgcacagaagaaaatagaatccctccagcttgaaaaaagcaatcatgtcttagctcaaatggagcagggtgactgttcttagcccagaaactaagtagcacaatctgtagatgagtatagtgatctcatttcctaaactgtaatgcacagacctgaggaactttacactgaccagctttaaaacagtactttaaaaggaaaagcctgttactgtttatttacctaaaagattcctaatgtgcagcactgttttctctttcagttagttgactcaaagggggaaaactaaagaatgcaaaacttttgctattcataccactgatgttcatcaaaagtatgcgatctaaaacatgactatcatttcctgacaatggggcatctcggtggcctgcctggctgattcttccttaaaactaaaatctctggaaaatggatttgcttcttaccctgtgttttctgcaaactgacttactttgttccagccaaagcttgctaataatagaaaactacccatattccaaaagtagatttcctctgtatcccagcatactttgtgaacctggctccttcttcactacctcagatctaatcaattagtccatgtaccctccttcctcactacagtcataacacatgagcatatctacctagaagccaatttctactgatgtagccacaactttttagaggcctattaaacatgacgttatccaattgcaggtcaacttatagttgtagccttacaacttacaggcatcagaaaataagtaatcaaattaggtacctggaaacatagctattaccatctcatattactgtctaattaaaataaacataacgcaaacatgtttgtccttatatattctacagtggatagaattaggaattgatggcttaaaaaaaaaagtctatgaagagtctgtttaactcttcatgttccatctttctcttctgaagtaaactattttgaaagttctctttttgaaatgaatttgtgcttaactgtcttcactattaatactatttagaaataagctaattggatcagtggcttaaataatagctgactgtgtgtacatatgtatataatatgtatatacaatatcaggcatgcatgtggcttggaattttgtttcctccataaaatgtggaagtgaattaaacaagttttagtcatttatacaaagtcacaaatataaagttcagtttgtcacaagattaaattgctcacaaggtaaaattgtattgtttggcaaaatcacaagtaacaatcctgtgagttttctattatgaaggttaataataaatgggctcatttagttgcctgggcacctattcacaaattcatttgtcagcctctttttagttctcttaaaaaaaaaaaaatcatatgatcattttcctttttgggggtacttagcttccatgcctataaagtctggtaccagactgacttgaaattcataaacaagttgtccaattgccaagaatatgttaacaattaaaagttccaaactaaagccaatagcaccaagtcttcataagaatacaaagtatacatacagtattgcttacctggaggattcagatcatttaggaattctctttgatgaaagatcagttcccatttgagttcctccttgcactgagttttagtgatatagaactagcttgtagttagtgtttcattacattataaagaatagttttacacacgtatttaccgttttccaaatttaaactcagaaatacccaaagcaggcctgcttaagcccactacctggcatataaacttatagtaacactttgttactttctttttaataggacaagcatgagttaggacaaactctaaaaattcatattcttcactattcttgttttcctttgattgatatagaccaaagatggtgtactctaattttttaaaacagtaatggaacacaatttttttcattcttcctcctctccattcgaagtaaagatccccagttagtttttatataaataatctatagggattcaaaaggtgtcacagtccacttaattagtcaaattagcaatggctaaacagtatcaagtactgcagaatttatcactgaaatggataagaggaaatagtttagtcacaggtttttacagtccagcaagggccaaagaggtatagtatacaagttaatagtatttgtgttgagcaacatggggctagtgggatcacagaaatctggaaaaaaaaaaaaaaggctttggcttatcaagcctagtgtaaatttctgcatctcacacgactttagtttggccaggtatttatctgccaaaacaaggacaaatcttgttgtattaacagcagggtcacttctcattttctttgctgacttacctttttactgaccgttgtgaatttctgtctcaaaatgtataatatagaaatgcaagaaaaaaacaaatgtacagattgtaaagttttttgatacctaatgtaagttttctttgtgtaatatttatatgataaaagacattaggatccctacaacaaaaaaaaaaaaaaaaaaaaaaaa

SEQ ID NO: 274 - DNA, 3484 bp, Homo sapiens
tgccctcccgcggctgcagccggagccgaaggtggtggctgcacagtagacgccccctcacggcttcccccacacgctcccgccccctcgctcgcccatcgcgcttccctcacaggctctgcagtcctcccccacagacgccttcccccttggactctcattcccttttccacggagccccgcgctttcgtgagccccctcgaggaacctggtctccgcatccagttaccacctcctgcctcagaggccatctgagcccttcgcacctcgcccctcagtccccccttccccccccgcccgcgtcgcctcgctccctcccgcccccccatcatcccttccctcgcagttcccctgtcctgaggggagccccgccacgggcagcgcggcggcggcggcaggagggagaaagtgaagcggtagctcgcgcacactcgcgccctcactcccggctaggcggcacccaccgccgggaggaggaggaggagccgagaggagctgagcgagcgcggaagtagctgctgctggtggtgacaatgtcaaataacggcctagacattcaagacaaacccccagcccctccgatgagaaataccagcactatgattggagccggcagcaaagatgctggaaccctaaaccatggttctaaacctctgcctccaaacccagaggagaagaaaaagaaggaccgattttaccgatccattttacctggagataaaacaaataaaaagaaagagaaagagcggccagagatttctctcccttcagattttgaacacacaattcatgtcggttttgatgctgtcacaggggagtttacgggaatgccagagcagtgggcccgcttgcttcagacatcaaatatcactaagtcggagcagaagaaaaacccgcaggctgttctggatgtgttggagttttacaactcgaagaagacatccaacagccagaaatacatgagctttacagataagtcagctgaggattacaattcttctaatgccttgaatgtgaaggctgtgtctgagactcctgcagtgccaccagtttcagaagatgaggatgatgatgatgatgatgctaccccaccaccagtgattgctccacgcccagagcacacaaaatctgtatacacacggtctgtgattgaaccacttcctgtcactccaactcgggacgtggctacatctcccatttcacctactgaaaataacaccactccaccagatgctttgacccggaatactgagaagcagaagaagaagcctaaaatgtctgatgaggagatcttggagaaattacgaagcatagtgagtgtgggcgatcctaagaagaaatatacacggtttgagaagattggacaaggtgcttcaggcaccgtgtacacagcaatggatgtggccacaggacaggaggtggccattaagcagatgaatcttcagcagcagcccaagaaagagctgattattaatgagatcctggtcatgagggaaaacaagaacccaaacattgtgaattacttggacagttacctcgtgggagatgagctgtgggttgttatggaatacttggctggaggctccttgacagatgtggtgacagaaacttgcatggatgaaggccaaattgcagctgtgtgccgtgagtgtctgcaggctctggagttcttgcattcgaaccaggtcattcacagagacatcaagagtgacaatattctgttgggaatggatggctctgtcaagctaactgactttggattctgtgcacagataaccccagagcagagcaaacggagcaccatggtaggaaccccatactggatggcaccagaggttgtgacacgaaaggcctatgggcccaaggttgacatctggtccctgggcatcatggccatcgaaatgattgaaggggagcctccatacctcaatgaaaaccctctgagagccttgtacctcattgccaccaatgggaccccagaacttcagaacccagagaagctgtcagctatcttccgggactttctgaaccgctgtctcgagatggatgtggagaagagaggttcagctaaagagctgctacaggtgagaaaactgaggtttcaagtgtttagtaacttttccatgatagctgcatcaattcctgaagattgccaagcccctctccagcctcactccactgattgctgcagctaaggaggcaacaaagaacaatcactaaaaccacactcaccccagcctcattgtgccaagccttctgtgagataaatgcacatttcagaaattccaactcctgatgccctcttctccttgccttgcttctcccatttcctgatctagcactcctcaagactttgatccttggaaaccgtgtgtccagcattgaagagaactgcaactgaatgactaatcagatgatggccatttctaaataaggaatttcctcccaattcatggatatgagggtggtttatgattaagggtttatataaataaatgtttctagtcttccgtgtgtcaaaatcctcacctccttcataaccatctcccacaattaattcttgactatataaatttatggtttgataatattatcaatttgtaatcaattgagatttctttagtgcttgcttttctgtgactcaactgcccagacacctcattgtacttgaaaactggaacagcttgggaatgccatggggtttgataatctgccagggacatgaagaggctcagcttcctggaccatgactttggctcagctgatcctgacatgggagaacaaccacatttttctttgtgtgtgcttctagcagctgttcgggaggaccttgacccaatagtgttcccatgctgtttcttgtgaaatgctctcggctatgtagcagcttttgattccctgcataccctaggctgctgcccctatcctgtcccttgtttataacattgagaggttttctagggcacatactgagtgagagcagtgttgagaagtcggggaaaatggtgactacttttagagcaaggctgggcatcagcacctgtccagctctacttgtgtgatgtttcaggaactcagcccctttttctgcctaggataaggagctgaaagattaacttggatcttctaatggtccaaatcttttggtcacaataaagagtctccaaattagagactgcatgttagttctggatggatttggtggcctgacatgataccctgccagctgtgaggggaccccgtttttaagatgcatggccaagctctctgcaaatggaaatgcttacactgggtgttggggatgtttgctacctcctgctatttttgtggttttggttctcccactatggtaggacccctggccagcattgtggcttgtcatgtcagccccattgactaccttctcatgctctgaggtactactgcctctgcagcacaaatttctatttctgtcaataaaaggagatgaaaatattctaaaaaa

SEQ ID NO: 275 - DNA, 5444 bp, Homo sapiens
gacgccggcacacggcgcgactgccgagcgcagcgcccacccgcgggatggctcaggcggctggcccggcgggcggcggggagccgcggactgaggcagtgggcggcgaggggccgcgggagcccggggcagccggcggcgcggccgggggctcccgggacgcgctgagcctggaggagatcctgcggctgtacaaccagcccatcaacgaggagcaggcgtgggccgtgtgctaccagtgctgcggttccctgcgcgccgccgcccgccgccgccagccccgccaccgtgtgcgctcggccgcgcagatccgcgtctggagggacggcgccgtcaccctggcgcccgcggccgacgacgcgggagagccgcccccagttgcgggtaaattgggatattcacaatgtatggaaacagaggtcattgaatctttgggaattattatttataaagcactggactatggtttgaaggagaatgaagaaagggaattaagccctcccctagagcagcttatcgatcacatggccaacacggtggaagctgacggtagcaatgatgagggctatgaggctgcagaagaaggcctgggagatgaagatgaaaagagaaaaatctcagctattcggtcatatagagatgtcatgaagttgtgtgctgctcatctccctactgaatcagatgcaccaaatcattatcaggcagtatgtcgtgcactgtttgcagaaacaatggagctccatacatttctgaccaaaattaagagtgcgaaagagaatcttaagaagattcaagaaatggaaaagagcgatgaatctagcacagacttggaagagctgaaaaacgctgactgggcacgattctgggtacaggtgatgagggatttgaggaatggggtaaaacttaagaaggtccaagagcggcagtacaaccctttgcccattgaatatcagctcaccccttatgagatgttaatggatgacattcgctgcaaaagatacaccttgcgaaaagtgatggtgaatggtgatattccccctcggttaaaaaagagtgctcatgaaatcatcctcgacttcatcagatccagacctcctttaaatccagtctcagccagaaaactgaaaccaactccaccacggccacggagcctccatgaaagaatattagaagaaattaaagcagaaagaaagctgcggcctgtatcaccagaggagattagacgtagcagattagcaatgcggccacttagcatgtcttacagttttgacttgtcagatgtgactacccctgaatctacaaagaatcttgtggagtcatctatggtgaatggaggtttgacatcacaaacaaaagaaaacgggttaagtacctcacagcaggtgcctgcacagcggaagaagctcctcagagccccaactctggccgaactggacagctctgagtctgaggaagaaacgctgcacaagtcgaccagcagcagcagcgtgtctccctctttccctgaagagccagtcctggaggccgtgtccacaaggaagaagcctccaaaattcctgcccatatcatcaacaccccagccagagagacggcagccaccccagagacgacattccattgaaaaggaaacgcctactaacgtgaggcagttcctgccgccttccaggcagagttcccgctctcttgaggaattctgctacccagtggaatgcctcgctcttactgtggaagaagtgatgcatattcgccaggtcctggtgaaggcagagctggaaaaataccaacagtataaagacatctacaccgccttgaaaaaaggaaagctctgcttttgttgccgaaccaggaggttttccttcttcacttggtcttatacctgtcagttctgtaagaggccggtgtgctcacagtgttgcaaaaagatgcggctgccctccaaaccatactccactcttcctatcttttcattgggaccttctgctctgcaaagaggggaaagtagtatgaggtcagaaaaaccctccactgcccatcatcggccacttcggagcattgccaggttctcctcaaaatctaagtctatggacaaatcagatgaagaactccagtttcccaaagagttgatggaggactggagcaccatggaggtgtgtgtggactgcaagaagttcatttcggaaatcatcagttcaagccggcgcagtctggtgttggccaacaaaagggcccgattgaaaaggaaaacgcagtctttctacatgtcctcgccaggcccctcggagtactgcccttcagagaggacgatcagtgagatctgagcctcgtgcctttcagctgcttttgtgctacgagtcagcgtccgtgcgcgaggacactgagccgggctggctctcctttctgtggttttatttaatgggcttgaatttgcattagatcagatttttgccgcatcacattgttccacagactgaatgctgtgttcgtatcgattgatgaaacgtgacaggtccgccaattgctcgtttgcactgagagaggacaacagtttgaaacttacttttgtgtgtgtgtggctttggaagccagtagctacttccttagttcagttctttactgttcctcgaataatctcctgactaaggcaaaaaaaaaaagcttctcctacgagaatcagtctaacagagatgccgatgtcagcacagccctaagcagtaagtcatattggcatttccacgtgactgtgtttctatcccgtgtacagagagatccagagccctacactccacgacctgggggctcacagcacagaacctagaagcacctgctgacactcttcaactgatttttaaatgttgttgcttggagataaaaattacataagggactttttgcctgcattctagtgcaaaacatctgaagagctgtacacccacaagggtgactatttcccctgagtggccgtgttgtcccagtgccctggttcagtgtctcctgagtggatgacaggtcttcattctctatcttgaatgtattatggttactaatagttttataatggaggtctaagaattaaagttgtgtgggagtttcaggacaaaggaaggctaaaagtttgtcaagacgttgagcgtattttggttacctatgagaagggttgtgacagtgtacagtggcagctgttggccacgctgcagaaatgagctggagctcatgggttttcagctacatttttcataactttgtagtacatccatcttgagtaaattaagccacaatttggtacctagggtctcaaactaaaatttatttttataaatgaattttaaaagaaaaaatatctacttcttttaaagttagaagaaaattaacctgctgacaggcaacatttttggggtgctttctgcactagttttccttgtaaatgatttgagtgagtaggtttggtttctgacgaaagtagactggagggtagcattgtatgcctcaaatgtctcagtgtgtttggctcatacgtgggctatactgtattattttggtatgcttacaaatgactaaccaatcaaattgtcattaatgtttggaaaatctgttaatgcacatgcacaataatttcctgaaagccataggacatgtctgtagtcagcaccacgatagcaccgtttcatgaaaggcatggcggctgcatttcataccacatcaaaatacagtaacatttctatactaaattaacagtaatacctcaaaactgctccggtagtagtttttaatggattgaaatttacagtttagtaaaaggcttaaaattacttatacttatgaaataaactttaccagttgactaaaataatgcatgttaacagttggtctgtatttgcatgtaaaagtgggccaccagagaacccttattgattacttaagtgtttacattattttaaagactcctgtttaagagctttcagaattgtactgggtgaatctcatttataaaacttcctaagagactatctgaactctatactccagacagttaggtgggagtataaatctaccccttttgatgaccccaggcttgagtttttaaaatgactacccagaagggcacaagggggaaggaaatggtatttgtatatgtatataaatatgcacctaggagaatgtgctttttaaaataatgactactgtttttattaaaacataagaaactacacccccaaaataagactttcattcacattcacaaagcaaacatctagtacatgtctttcacttcactttatgatagtgtattggatgatttgggcattacgatcacctcttaccacagcacagaacatacattcttcaacagcattaacggagtttgccaagtgcattaaagaggtcacgtggagggtacgttcatatgaaacaatctgcagaaagtggggtaagaaagggcacatggcacagttaaagttgtagaaatcaaattactatcattttttgttgccaaaacaaagtcttacatttaacccccctttctaccacccccctccacacttcacgtcagctacatagtttccacagggtaattcactaagagcttgtggagcttggttttaaaatccttagcctggtctgactttaggcatagcttccagttcttccttccgtgtcctggtttcttgttcagttttacttctaatccaacaacaaaagaaatgtctggctggtctcagctagagtctgatgtgtcttagagcatgtgtgcgtatctgaaccatcatccctgctctcatctcagctccctccaggcctgagcaccggttccttttgtcccatacgtcatgaagtcacactattgggaaacctgtgcttccctctccatggcttaactccctgtcagtgtcggagtgtataagaatgcttgtaaatactgtaatatatttattaatatttgaaaggcattcattcagtggacagtgggaattaactctcccaaggcaagtgaaaatgaatgattgacgtacgttgatttaacaatcttactagattttaattcttaaggatttcaaatgaaaccagaaggtggttatgtaagaggcttaaaatgatcttatgtttaaagagattctgttattagcaccatgaactcgtactatgaaatttttaagccttttatttttctaactatattactgtaggactggatattaggtgtcatataggaaacacaaaagtttattgctgtttgctaaagcaaaatagcagaaaattttgtatatgcaaaactgttgaaggaccatagagaaatgtgtactactgacggggcttttactaggcttcctgcgtgtgtaaaagtcgaggtattgctggcattcagggtgacatgatggtactaaatgttttccattaaagtcttctattttaaaatttagagaaaaataaaatggctttccatcaga

SEQ ID NO: 276 - DNA, 5366 bp, Homo sapiens
gattggtcgggaggccgccggcgaggcggatgagggcggggtgcggacccgcttccggttgggcggtgcttgcgcgcgtgagctgagccggtgggtgagcggcggccacggcatcctgtgctgtgggggctacgaggaaagatctaattatcatggacctgcgacagtttcttatgtgcctgtccctgtgcacagcctttgccttgagcaaacccacagaaaagaaggaccgtgtacatcatgagcctcagctcagtgacaaggttcacaatgatgctcagagttttgattatgaccatgatgccttcttgggtgctgaagaagcaaagacctttgatcagctgacaccagaagagagcaaggaaaggcttggaatgattgtagataaaatagacgcggataaagatgggtttgtgacggagggggagctgaaatcctggattaagcacgcccagaagaaatacatatatgacaatgttgaaaaccaatggcaggagtttgatatgaatcaagacggcttaatctcctgggatgagtacagaaacgtgacttatggcacttacctggatgatccagatcctgatgatggatttaactataaacagatgatggttagagatgagcggaggtttaaaatggcagacaaggatggagacctcattgccaccaaggaggagttcacagctttcctgcaccctgaggagtatgactacatgaaagatatagtagtacaggaaacaatggaagatatagataagaatgctgatggtttcattgatctagaagagtatattggtgacatgtacagccatgatgggaatactgatgagccagaatgggtaaagacagagcgagagcagtttgttgagtttcgggataagaaccgtgatgggaagatggacaaggaagagaccaaagactggatccttccctcagactatgatcatgcagaggcagaagccaggcacctggtctatgaatcagaccaaaacaaggatggcaagcttaccaaggaggagatcgttgacaagtatgacttatttgttggcagccaggccacagattttggggaggccttagtacggcatgatgagttctgagctacggaggaaccctcatttcctcaaaagtaatttatttttacagcttctggtttcacatgaaattgtttgcgctactgagactgttactacaaactttttaagacatgaaaaggcgtaatgaaaaccatcccgtccccattcctcctcctctctgagggactggagggaagccgtgcttctgaggaacaactctaattagtacacttgtgtttgtagatttacactttgtattatgtattaacatggcgtgtttatttttgtatttttctctggttgggagtatgatatgaaggatcaagatcctcaactcacacatgtagacaaacattagctctttactctttctcaaccccttttatgattttaataattctcacttaactaattttgtaagcctgagatcaataagaaatgttcaggagagaggaaagaaaaaaaatatatgctccacaatttatatttagagagagaacacttagtcttgcctgtcaaaaagtccaacatttcataggtagtaggggccacatattacattcagttgctataggtccagcaactgaacctgccattacctgggcaaggaaagatccctttgctctaggaaagcttggcccaaattgattttcttctttttccccctgtaggactgactgttggctaattttgtcaagcacagctgtggtgggaagagttagggccagtgtcttgaaaatcaatcaagtagtgaatgtgatctctttgcagagctatagatagaaacagctggaaaactaaaggaaaaatacaagtgttttcggggcatacattttttttctgggtgtgcatctgttgaaatgctcaagacttaattatttgccttttgaaatcactgtaaatgcccccatccggttcctcttcttcccaggtgtgccaaggaattaatcttggtttcactacaattaaaattcactcctttccaatcatgtcattgaaagtgcctttaacgaaagaaatggtcactgaatgggaattctcttaagaaaccctgagattaaaaaaagactatttggataacttataggaaagcctagaacctcccagtagagtggggatttttttcttcttccctttctcttttggacaatagttaaattagcagtattagttatgagtttggttgcagtgttcttatcttgtgggctgatttccaaaaaccacatgctgctgaatttaccagggatcctcatacctcacaatgcaaaccacttactaccaggcctttttctgtgtccactggagagcttgagctcacactcaaagatcagaggacctacagagagggctctttggtttgaggaccatggcttacctttcctgcctttgacccatcacaccccatttcctcctctttccctctccccgctgccaaaaaaaaaaaaaaaggaaacgtttatcatgaatcaacagggtttcagtccttatcaaagagagatgtggaaagagctaaagaaaccaccctttgttcccaactccactttacccatattttatgcaacacaaacactgtccttttgggtccctttcttacagatggacctcttgagaagaattatcgtattccacgtttttagccctcaggttaccaagataaatatatgtatatataacctttattattgctatatctttgtggataatacattcaggtggtgctgggtgatttattataatctgaacctaggtatatcctttggtcttccacagtcatgttgaggtgggctccctggtatggtaaaaagccaggtataatgtaacttcaccccagcctttgtactaagctcttgatagtggatatactcttttaagtttagccccaatatagggtaatggaaatttcctgccctctgggttccccatttttactattaagaagaccagtgataatttaataatgccaccaactctggcttagttaagtgagagtgtgaactgtgtggcaagagagcctcacacctcactaggtgcagagagcccaggccttatgttaaaatcatgcacttgaaaagcaaaccttaatctgcaaagacagcagcaagcattatacggtcatcttgaatgatccctttgaaattttttttttgtttgtttgtttaaatcaagcctgaggctggtgaacagtagctacacacccatattgtgtgttctgtgaatgctagctctcttgaatttggatattggttattttttatagagtgtaaaccaagttttatattctgcaatgcgaacaggtacctatctgtttctaaataaaactgtttacattcattatggggtatgtatgaccttcattttccaagaaatagaactctagcttagaattatggatgctctaaaatgtcagaatgggaactctcctcgaagttctcccaaactcagagacagcactgccttctcctaaatgattattcttttctccctgttttctggtattttctagcatccttctcaccacagccataacccttttttacttccattaggccgtataactggagagacctgctgctcgttatataattatctgataccaaacacaagcgattctgaatgtacacacacgtttatctatagagcataaggtaaaacaattttgtttaacattttggtattgtttacaaatgttattaaaacatgcaaattcattttgagaacctcgagagaattaaactattaactttagtaaacacacagtttaagacaaatataaaggtttagccaaatgcaacggggaggaagcacctggaataatttgtgcttgctcaggggcttgtggacatggctgttcctgccaaagctgtagcagttatccaaaagttctttcaaactcatatttggggccactgagttttttttgtttttttttttgttttgttttgttttttctttatgtctctcccatttctaaagtgttttcttaagtttgttctaattcagcatatatcatctcagaatggatccccagcaggaaaaaaaaaaaaagttactaaaaaggaaagtatccatacactgaaaacttaaagcatattcctttttggttgccttgtatgtagaaatcagttctccaagtgctgtgaatggtgccacttaggagtagaaactgatgattgttgaaatggcctttgggtggtctgaaatagaccagtggaaacagtagctttgtaggcaagaaggcaatagtaagaaaatgaaaaattgactccccaaactgccatcactccttttaccatcttttttgtgtttttagtagtttggtttctgacggagacaatagaaacttacttaaaagtaaaatttaattctagctgttgcaaacaggccaatattgggtcctcagttggggccaacttgggtagacgagacagtagaaacttctgttttctgggagctgcatgtgtcggattcatctgtcatggccttcccacacaccatcttcatgatgcaagcttggaactggagagaaaggtacaattggagataaccttggcagatgaggaagtatgggaaaaaagaccttattctctgtatcaccaaagccttgcacaatgctttgtacccagaatgcccttaggtggttttgaatctatcttccccatcctgaaaactatctagattccagtctagaactactcctgggtctacggtaatcctaaactggtcaagtctgagacctcactgttggtaaattcacaaaccatcctgcttcataaaagcactgtcagcagaggcccctccattactagcaggtgctcccagctggaaaggactgccaattctcttctatccagggaggtttcaaattagttttgagtctacctctgggattgaggaaacaataccatctgaaagtagggtttttgccacttagggtttggtgtttattagctcggatttcagatgggataggaaatcccccagtaccttcagatgataagatattttagagatttttgcatgtggtatgatttctgtgcttcacacatgctcgtgcaggctaaaagttggaagggaaatgattaagaaattattaaatgcaaggactgaaaattgagaggaatctgagtttttatttttatttttttaattttatttaagttccaggatacatgtgcaggatgtgcaggtttgttacataggtaaacgtgtgccatggtggtttgctgcacgagtttttcaataaaatgctttcattcatcctgttctttggagcaacttcaaaaaaaaaaa

SEQ ID NO: 277 - DNA, 4631 bp, Homo sapiens
cggttgtcgggctggttcctgtgctggatcctgggcggcctgagggcccgcgggccagcaccatggaggacgtgaagctggagttcccttcccttccacagtgcaaggaagacgccgaggagtggacctaccctatgagacgagagatgcaggaaattttacctggattgttcttaggcccatattcatctgctatgaaaagcaagctacctgtactacagaaacatggaataacccatataatatgcatacgacaaaatattgaagcaaactttattaaaccaaactttcagcagttatttagatatttagtcctggatattgcagataatccagttgaaaatataatacgttttttccctatgactaaggaatttattgatgggagcttacaaatgggaggaaaagttcttgtgcatggaaatgcagggatctccagaagtgcagcctttgttattgcatacattatggaaacatttggaatgaagtacagagatgcttttgcttatgttcaagaaagaagattttgtattaatcctaatgctggatttgtccatcaacttcaggaatatgaagccatctacctagcaaaattaacaatacagatgatgtcaccactccagatagaaaggtcattatctgttcattctggtaccacaggcagtttgaagagaacacatgaagaagaggatgattttggaaccatgcaagtggcgactgcacagaatggctgacttgaagagcaacatcatagagtgtgaatttctatttgggaaggagaaaatacaagagaaaattataatgtaaaatggtaaaaacataagtagtttttttttcaattacatgttgcttccagacatacttctctgcaacttgttgagcaacattttaagatgttggacttctgcaatagatgacactgatggttttactcctttttttaaaaacacatgcgcgcgcacacacacatgctttacaagttttattataaaccaagaattttggacttgcaaagaggtattattgcaataatgcacttttcatacttgaaatttatttgtatgatataaagttattactttaaacaaaatgcaagtatggggggattgtttataaagtttgggtaatttataacaaaatttgctaaggtttgctaaaaattcatttttctgttctatatattacatttttaacataattttacagttcaattttatgatggagcctcttacagaaacattaacaaaatgcaggaatctgccacatttcttttttagtataacttaatagcttaattaccattttattttttatacttcttccattattaatctttaaatcatgatcctaattagctgtccttactttaacttgatctaattattgcttcctttcttattactttcctaatttttctatattttaaaaactacagtttccatgataaaaggaaaacgttttgatttatagtaccaagtgcttaaacacaaggatagtgttagattttcgagtgactttcctttttgcattttttggcagtaaaagccaaacgttgtatttgttcttttcagagttgtccagcccttttttcctttgtccaaaatgattctaaatagaatctaataaaccaatgtagcattatttttttctaaatgaagccccaaaaaagaaaagtgccttgcatcatttaaaaaaaataattaaatcctcatggcctctaaattagtatgtagaacactgaaaagttcttaacatttttgtgtaatttcctttctttttaaaccataaattagtttaaactgaaagtacgaggctggaagaaatattagtaaattatttggaatatagaatgtttactctttctttttatgttgtcttaatgattctgtgagattgttccggctcaaacagaagcttttctttggggaaggtgatttgtgggagactagtgtattttaaattagcattttaatccattcttgacattcagttagtccagatctgccccataatttgctttagtaaagtcactttatggatttttggctatgttttagtttgtgtgtataaaagttctaagaaaacatttttgctattttaagtatgtaagggaagagaggagtgtttttaactttttatagttgatgactttagggtagcacaaacaaaactcctttgtatctaacttttctcaatcctctcttgaggtgctttactaatgggaatgatttctgtatgttcccttggtaccaagaggtactatgcaaagtaacctattacaccaagttacttgctttgctttcctctctatgatgtgataatacagtaaaagctttcttacccagcatagtgggagagtggagattaattaaaattgttaattaagagttaattcctattgacccaggtgatatttctcttctgatttccctccccttcccttctcttatcttaccactgtgaaaacagcatattgttaatctcgttgtcgtccagtattctgctttgtgattaggtcttttgatgtacagtggtctagtggagtcaagattcgcattgggttttctaaaattccagttgataaaagttccagataacacagctttcctgtatatagatcactattgggcaggtcagcaaagatctcttacagtgtaataataatctatgatgcttcatttagcagaaactctgcttaaaagaatcttcataatagtaagtttaggttttaaaaacttgtttcataaatatacatatatcctctctagtagtctggccaaaagaacagattttgttattgataatttgtagctggtaattttccacattttctatccactgtaatttttatgttgtcactgaagtgcctgcccagtactgtatattacagtctctcacaaacactgggaaaagggactgtcatcatcttgagtactctgtgtgtatatatatatatatagatagatagatttttttttttttttgagacagagtctctaatgtcacccaggctggagtacagtggcacaatcttggctcactgcaacctccacctcctgggttcaagtgattttcctgcctcagcctcccaagtagctggggttagaggcacatgccaccatgcctggctaatttttgtagttttagtagagatggggtttcaccatgttggccaggctggtctcaaactcctgacctcaagtgatccacccacctcggcctcccaaagtgctgggattacaggcgtgagccactgcgcctggctgagtacaatattaatgtagacaaaccatgaagtttattatttcatataagaacattacaggtttgttttttcttgcatgtctgtccacctaatgtttaagtagttctggtagctcttcctattctttattctatttgattccatttctgtgattcttttattaccactgatgttttgtgatagttaactatgataaatttaactgatcatgatttatcttctagagtatttaaataatgtatgagtgaccacccaattccaacattaaaagtgtaatctgggcccataatttatagtgaaattgtatcaaaacatagggaaactgtattactgtccattttgaaaatatgaaacttgagtattgaaaatattcaaacatggaatggcagtattctaatttcagttagttggttcatgttaatttcttacctgttagatgtttaaactgcagtgacctttacttgtatctactctgtggtggaaatgttaaaccatgatagcttttgctaccaactcaaccacttaacttttagagcagttttggggagagtttatgcttcatctgagtttagaagtaatgtcagaaaatgttaagcatgtctgtattaagaaaatataaggtttctaattgtcttattaatatggtaattcaagtgaattagaaatatttaactgcaatcttgaattataaagttgagatatatatatatatgtatcaagatctcaacttgatgtaaagtaaatgagcagttacctggcggatttttttttttttaaataactgatttaatccataatcccataacaaacatagcttcacctcagtattttctttctttctttgttcaacagtgctccgataagggaatgctagaaaatagatgagaagtactgaaagacctttttttttaattgattagaaaagtaagtctctagggtctttgaatgctggaatttttttttttttttttgtctttcccatctgtggcagctaaaacaaaaatcactcaaaatattcaggtttacatgttagctctctctcatagggagctgccatacctcacagttcaaagtgtattctatagatcagtaacattatactgacatgtaattgcaatttactatgcagcaaaaatgattcaagaagaaaaataacctacagtgtctgtatacctttgtatacacaattgcttaagttactctgcttttaacatttgtacttggataaaatgcttatgtctgtataggaatgtcacagtgcaagatgctgctagcccaggcacaaagtattaaaattattttgtgaagattggtggttgtattaaaactgctgtgccattatacctccaaaaaaaaaaaaaaaaaa

SEQ ID NO: 278 - DNA, 8024 bp, Homo sapiens
atgcttttctttagagctcctattgcttctgggtttggggtgtgagaggatgcagagtgggagaccttaaaaccgtctgatctggctgctaaagcgagtgtctgacgaccacccattaacaccagcgagtagcgtttgctcacggctttaggataagaagcctggaatggtcccccctccgccgggagaagaaagccagacggtcatccttccacctggctggcagagctacctgtcgcctcagggccggcggtactatgtcaacacgaccaccaatgagaccacctgggaacgtcccagcagttctcctgggattccagccagccctggctctcacaggagctctctgcctccaacagtgaatggataccacgcatcagggaccccagcgcaccctccagagactgcccacatgagtgtccgaaaatccaccggtgattcccagaacctgggatcctcatcgccaagcaaaaagcagagcaaggaaaacaccatcacaataaactgtgtgacgttccctcacccagacacgatgccggaacagcagctgctgaaaccaaccgagtggagctactgcgactacttctgggctgataagaaggacccccaaggcaacggcaccgtggctgggtttgaactactgctccagaaacagctgaagggcaaacaaatgcagaaggaaatgtcagaattcatccgggaaaggataaagattgaagaagactatgcgaagaacttagctaagctctctcagaactccttggcttcacaggaggaaggctccttgggagaggcgtgggcccaggtgaagaagagcctggcggacgaagcagaagttcacctcaagttctctgccaagcttcacagcgaggtggagaagcccctgatgaacttccgtgagaacttcaagaaagacatgaagaagtgcgaccaccacattgccgaccttcgcaagcagctcgccagccgctatgcctcggtggagaaggcccggaaagccctcacagagcggcagagagacctggagatgaagacccagcagctggagatcaagctgagcaacaagacagaggaggacatcaagaaggcgcggagaaagtccacacaggctggagacgacctcatgcgctgtgtggatctctacaaccaggcccagtccaaatggtttgaagagatggtgaccaccacattggagctagagcggctggaggtggagagggtagagatgatccggcagcacctgtgccagtacacgcagctgcggcatgaaacagacatgttcaaccaaagcacagtcgagcccgtggatcagctgcttcgaaaagtggacccggccaaagacagggagctgtgggtcagagagcacaagacgggcaacatccgccctgtggacatggagatctagatgggcctgtgcagcttcggggggtcctgctggggaggggggctgggctcccaccatggggcccatgccgagtggatgccccccaccctctctcctgggccactgaggagaggggagagagctggtgattccagaagggtgacccggacagcctagctgggggctcccccatattcccaggcccagaagacagacccacagccctgcccttgtctctgaggctgaagaccccctgactcccatgctgtgcttgccgctctgaaacaaacagaggctggaactttgtggtccttgccgagttttgtaggggtcactgtcacatgcttgtgccctggaagccccaaggctcttcctccagctggctcccttgtctccagggctttggaggatcagggtagggagggctctgtctctaagccaggtgtcaggatcagaatcatgggtagaaggtgccattcagctcacagccgcacccagaatcctttgcagccctccttctttatttttttcccattgcattctgggagtccacatctggctttctcagccactgttcatcaccaggggttttaggaggaaggcttggctcctgtcttcccagacccaccatgcctggagaggtcaggatggaactacctcattcggcaaattagccccaaattgagcgctgaatcgtgtcccatgagatcaggcgccatctgtaaagtctcctctggaaatgccaatccatccttcccccagctgcttcctcggggaggcccctgcccccaccctgccagcccttcccagtctcattagaggaagctttccaaagttctcagttatcaagacctcatccagctcgtccaaaggcttcagggatggaaacaaaccagctcgtctcagaggccagcaagctggggcctgtccgccacggtgccctgtgcacctttgggctgccctggcccccactctcccgggccgcccaccacaggctcttaatggggccgggtcagtcctacatgtgagatgggttagggcaagtctttgccatcccccagatggctctgtcttcttgtgtatggcagggctgggactgctgtcccttgtacagttttctgtcactggtgggcactggacaggcatagcagactctcttgtggccacactaggttgtcgcctttcaggcagtgtcccgccacctttgcttcccgctccttctggacattccagagccctgcaccaaacccttacttggtgtctgcacctcctttccctctctccatcttccaatccctggaaaagtctggtctgagtgtgacttgggaagctttcagtgctgctgtttggcccagctcattactttctccctttctctaccacagcaaacacattctccaccatgtcagtctaaagagtctaaaggggccgggagaagcatgagcgaggggcagattctagtcgggagcccatgccctggaaatccatctttcttcatctttcccattgaccactttgggtttgacctgcacatctgcagtgagggcagaattcaacaagcacaactcactggtctttcagtcaacgtgctagaaaccgatgacttattaatctctaattttttggcgcctctttcattgaatgagaattgctttcgtatagttcacattagaaaaatgcctaatatactaaagtaaaccaaacgttgtcacttttctcttgttcttgaaacattgcaaccaaaaaggtcagcacaaaggccttcacctacgtgaagacctcctggtaggatctgtccatgggatggagaaccactctgtccagatctggggttgggtcatgacaccagctaccaattttagaatattatttcttggtttctttatgaaaaatgggtgctagtggtaattgctttgtggcttagtaaactactctgtggatgatttccaaacattcaaagccaatagccttgttattaacaagatattttgagtacaatatggctcattgacttttccattacatctgaggattccagagtcctctgttcatccctgggatagagtgagccctcttgcgtcttccagggtagctcaggttggcccagtttgggccagtccatttttggaggtcactctttcccccctcatcccctcacctccttctctttacccccttcacgtacttcctttctttcttccctctgttattcattcatcaagcaggttaaagccattgtgctaagatctaatctgaggacactataatggccctgtcgtcagggaagcccgtgatcgctcgttttcaggggtcttaccggtcagcaaccttggcattgatacataggcactctacagaatttaagttttcagaggtaagtctgttgttctgattaatctgcattcattcagcgaatgctcaagacaagccaggcatgctgagaagcggcgctctagttgtatgtaagatgggcattcctctgctctcctctattctccatgtcgactgagaagagtataataagaacattgtaccctctccacacttaaccctctgggattctttattataatataaaccaccgtcgtgaggcatttacctgttggatggaaggtagacagcaacaagattttaatcacctggtcaccagaccctcacggcccatatccaattcgaatttcagaaatttctctgtttgctttaaataactctttacaaataagggtcgggcacggtggctcacgcctgtaatcccagctctttgggaggccgaggtgggcagatcacgaggtcaggagatcgagaccatcctggctaacatggtgaaaccccgtctctgctaaaaatacaaaaaattagccagatgtggtggtgcacacctgtagtcccaactattcggcaggctgaggcagtagaatcgcttgaacctgggaggcggagattgcagtgaaccaagatcgggccactgcactccagcttgggtgacagagcaagactccatctcaaaaaaattataaataactctttgcaaataggaaagtgaagctcaagggtaaccagtgaggctatgaaattgccagtgaattaagaccagggctagagtcaacagtccagaacccctatccgtatgaacaggggcccgtttctggttgaaatcaaggttaggatgcaactgagaaaataaaagactgcactttggagaggcaagcacgctatccgggttgttgttttgttttatgtcttggtgcttaggtgaggacttagctgggtttattcaaagtgggcgggtctgggctattcttgagaatgtcccttccatttctgagaacaagtcagccccttctacctgcctccacccaggagactgatgcacaagatctgtttgtgaaagcctgatttaaaaagaaaaaaaaaattccttaagccaaatggtgttccaagttggttgctgtgacaacctccaggaagagccacttgttaccctctattctttctagtgctttcagtcagtggcaacacataggccccttggaccgtggggatggcggccctgagattctgtcagtgggaccaccctgggcctcctttctacctccactcagcaccctgttggccaaggagaatttctgcggtgggaggcagtgctctgctagtcaggattgataaacagctgggcacaccgaaacagtgtaccaacgaattcaccaaccaggggtttctttccctaccctttgtgaaaaccaatcaattactagatgagtggatggatgcagaaaaatctgggctgagccaaagtcccttttggaaatacaagccataacattcgaaggacatcagcgaccttggcttgtttaggtgattttacttccagctgcaggtagtcttgacaaggagtgtttaaacagaaggctcaagatgcattccttgtgtaggtcggagagagcacttctaatgttaagtggggtacagatcagctgcccccccacgtagcctggacatcgtcttatccccataatccttgccatccctacaaggcccatcgccaccaccttttcccaggtttattgaggtatgattgacatccagtaaaattcaccctttggaaatatacagctctgtgaattttgacaaatttagtgtcttgtgaccatcaccaagatcaacctgtttttaaccctccaaaaaattcccttctcctgccctctttccctggcaaccctgattgattatctgatcctataattttgccttttctagaatgtcatataaatggagtcacactgatgtcgccttttgagtctggcatctttccctcagcttaatgcttttgagtcattcatgatgtgtgcgtgtggtttgttccttctccttgccgggaagtatttcattgcatgggcgtactactctgcttctttatttttacactgagcctttcgccctggaagttcttggcccagggtcttcaacttgtttgcacgaccacttccagcttgctgcttccttcagttccccaggctcctcctccaaatgccagctgtgcccacaagctgttcttagggctcacactcgccttttggcgcgtggtgggtttttggtagtgcagaaagaatccagggatgggaggggaagggacggatgggtgctcaattgctgctcacgtctgctgcaacctgaagcttgcatctcagccagcagatctgctcccttctgggacccaggcttcagtgtcacacggtccttggctatgtattgggcgttggaggctttgaaaggcgagcagaagcagcatggacaagaaggctggggctggccctggggctcatcatgatgctttcctggatctgttgcttcatctgcaagctgagggtgtttgttctagatgagtgtctcaggccaccggcaactgcatgtacctcctccctttctcatttccaatgatgtaccctgtacacgtgttcatgctgtgtctggctctcatctgcacaatcgtgcatagaattgcctcaagtcctggtgagagagatgccgtggtacttttccatttagattcaaatggagctaaaattaagagttttatgagctgttaagaatgaggtagtttctcctaggaccccccaaagacagtgcaagtaatgaccgtttggatctcattcgtcgatctttgatagtatgttctggagtctactccccaggagccaggacaggcgtgaagatggagtccttgtcgcagctggagccttgcctagctggtgatcacacagcctggcctgtacctgcaccccactggatggtggtacatggtggcagggacaggaccacacccagttaaggccagaccaggctgagtgtgacccctgaggtaaacactccactaagctgtgtcttgttcatgccccctgctcagtgaaaggtgagtcccgagaccagttgggtacctctctatgcgaaccagagacatttctggatccaggccaggtgaagattagggccaggaagcctgagcccccggggcctcaaggtagggagccgaagaggctgccaggactctgctgggttgaaatttgccggggaggactcttgtctccccctcaggagtatttttgttgaggctttcctggaggtgaagaagcaattcccattgcagcaggttagagcgagaatcagacagagggcaaaaaccaattcgcttctccccacgttctaaatgctggggcatggctgtcaggagggcttcctgggaggtgtctctgggggtggggtgaggttggggcgatggcctttggagattgcgtgtggtgttcaggactgttccttggtgtttgagggaaactttagtgggattgcagtggaatgtaaggtcagggcacgtgggtgctctctcggggtggggtgactgggagacctagagggaaagcctgctatgcagggggagagcacaggactggccctgctctgcggcctcctttgtcccataacctgaagttaagtcacatcccctgtcgggacctccgtgcactcatctgtcaagtgggggcgcttcccttccagcatcacctgcagcagacgggctctcgggagtcgtgggttccaggcagctgtgtggacccagggacagacattcaaagggacgccagccatccttagtgacaggggccccaacttagcatcccttcccttccgttaggaaggagatgaccggaagcaaccccttcacagacacgagcacatcggcaaaccctatgaaagtggaattttctaacaaaataaacttgcttgtttgatctgttttctgtaacttttgctaaatactttatacatttttcatgttaaagagccgtgtctcccgccagcactcctcaccccggtatgaatgtgtttcctccacattgtatatccttccaccctctggctgcctagatcagtaaataaaattgatgtaatataatttataagtaacactgttgaaaccctgatcccagtggaggctgtaacccacctgcccccgcaccacccccctgacccctgttaccgcatttgtgtgtattaatgctgaagaattaaatgtttaaagagtttaaattttgaaggcgtttgctatatacagttgtcctgcattattataaagagttttcaggaagtt

SEQ ID NO: 279 - DNA, 2634 bp, Homo sapiens
gcgcatgcgcactgactgcggaactgggcgaacccgggggttcgtttctgctgactccagtgtcccgagaggcgccgcttcttccgctttctcgtcaggctcctgcgccccaggcatgaaccaaggtttctgaactactgggcgggagccaacgtctcttctttctcccgctctggcggaggctttgtcgctgcgggctgggccccagggtgtcccccatggcggggccgcgggtggaggtcgatggcagcatcatggaagggggcggccagatcctgagagtctctacggccttgagctgtctcctaggcctccccttgcgggtgcagaagatccgagccggccggagcacgccaggcctgagttctggaggctggaagtccaagatcaaggtcctgacaaggcctcaacatttatctggactggaaatgattcgagatttgtgtgatgggcaactggagggggcagaaattggctcaacagaaataacctttacaccagagaagatcaaaggtggaatccacacagcagataccaagacagcagggagtgtgtgcctcttgatgcaggtctcaatgccgtgtgttctctttgctgcttctccatcagaacttcatttgaaaggtggaactaatgctgaaatggcaccacagatcgattatacagtgatggtcttcaagccaattgttgaaaaatttggtttcatatttaattgtgacattaaaacaaggggatattacccaaaagggggtggtgaagtgattgttcgaatgtcaccagttaaacaattgaaccctataaatttaactgagcgtggctgtgtgactaagatatatggaagagctttcgttgctggtgttttgccatttaaagtagcaaaagatatggcagcggcagcagttagatgcatcagaaaggagatccgggatttgtatgttaacatccagcctgttcaagaacctaaagaccaagcatttggcaatggaaatggaataataattattgctgagacctccactggctgtttgtttgctggatcatcgcttggtaaacgaggtgtaaatgcagacaaagttggaattgaagctgccgaaatgctattagcaaatcttagacatggtggtactgtggatgagtatctgcaagaccagctgattgttttcatggcattagccaatggagtttccagaataaaaacaggaccagttacactccatacgcaaaccgcgatacattttgctgaacaaatagcaaaggctaaatttattgtgaagaaatcagaagatgaagaagacgccgctaaagatacttatattattgaatgccaaggaattgggatgacaaatccaaatctatagagtatttgcctcttaaatgatacctcattgatatattgcactatttcataaatactataaaataatgactaggaagtaacttattaaaggctatgacttaaatttgaagatgaagtacagtgttctaggtttgctgagaaggcttcattaaattaatctcactttgaatatctcctgagagatggacaatgaaatatcagttggtggatatgtgtgatagctgatttcaatattgaagtattgaaataaaatattctttacacctgaagtaaatacatttttcttttttatgtaattaattaaatcagggatatagatttgatctgtaatttgggtataattctaatctttgctgaaatcacatctcaagtataatgaggcaactttatgcaaatgtacttgttgtgacaacaataacattttccttttttttttttttttttgagacagtctcgttctgtcacccaggctggggtgctgtggtgtgatcttggctcactgcaacctctgcctcccgggttcaagcaattctactgcctcagcttcctgagtagttggtattacaccaccatgcccagctaatttttgtatttttagtagagacagggtttcaccatattggtcaggctggtttcgaactcctgacctcgtgatctgcccgcctcggcctcccaaagtggtgggattacaggcgtgagccagtgcacccggcaacaataacatttaataggcattgtctcattctaatgatatataccttctacctagtgggcactttgtacatatttattttttattttatttattcattttttttgagacagagtctcactctgtcaccaagttggagtgcagtggcacaatctcagctcactgcaacctccgccttccaggttgaagtgattctccagcctcagcctcccgagtagctgggactccaggcacgtaccaccatacccagataatttttgcatttttagtagagacggggtttcaccatgttggctaggatggtctccatctcctgacctcgtgatccgcccaccttggcctcccaaagtgctgggattacaggcatgagccaccacagctggtcgtaaatattttttgaatttgaatctgttttggaagccaaatatgttttggaagccaaacaattaagagaagtaaaattttaaccctagtaggtttcgcagattcatccccagatatgtttttgtttggcttgtgttattaacaaataaatgagtgtctttcaaatggaaaaaaaaaaaaa

SEQ ID NO: 280 - DNA, 6244 bp, Homo sapiens
ggcgaggcgaggtttgctggggtgaggcagcggcgcggccgggccgggccgggccacaggcggtggcggcgggaccatggaggcggcggtcgctgctccgcgtccccggctgctcctcctcgtgctggcggcggcggcggcggcggcggcggcgctgctcccgggggcgacggcgttacagtgtttctgccacctctgtacaaaagacaattttacttgtgtgacagatgggctctgctttgtctctgtcacagagaccacagacaaagttatacacaacagcatgtgtatagctgaaattgacttaattcctcgagataggccgtttgtatgtgcaccctcttcaaaaactgggtctgtgactacaacatattgctgcaatcaggaccattgcaataaaatagaacttccaactactggtttaccattgcttgttcagagaacaattgcgagaactattgtgttacaagaaagcattggcaaaggtcgatttggagaagtttggagaggaaagtggcggggagaagaagttgctgttaagatattctcctctagagaagaacgttcgtggttccgtgaggcagagatttatcaaactgtaatgttacgtcatgaaaacatcctgggatttatagcagcagacaataaagacaatggtacttggactcagctctggttggtgtcagattatcatgagcatggatccctttttgattacttaaacagatacacagttactgtggaaggaatgataaaacttgctctgtccacggcgagcggtcttgcccatcttcacatggagattgttggtacccaaggaaagccagccattgctcatagagatttgaaatcaaagaatatcttggtaaagaagaatggaacttgctgtattgcagacttaggactggcagtaagacatgattcagccacagataccattgatattgctccaaaccacagagtgggaacaaaaaggtacatggcccctgaagttctcgatgattccataaatatgaaacattttgaatccttcaaacgtgctgacatctatgcaatgggcttagtattctgggaaattgctcgacgatgttccattggtggaattcatgaagattaccaactgccttattatgatcttgtaccttctgacccatcagttgaagaaatgagaaaagttgtttgtgaacagaagttaaggccaaatatcccaaacagatggcagagctgtgaagccttgagagtaatggctaaaattatgagagaatgttggtatgccaatggagcagctaggcttacagcattgcggattaagaaaacattatcgcaactcagtcaacaggaaggcatcaaaatgtaattctacagctttgcctgaactctccttttttcttcagatctgctcctgggttttaatttgggaggtcaattgttctacctcactgagagggaacagaaggatattgcttccttttgcagcagtgtaataaagtcaattaaaaacttcccaggatttctttggacccaggaaacagccatgtgggtcctttctgtgcactatgaacgcttctttcccaggacagaaaatgtgtagtctacctttattttttattaacaaaacttgttttttaaaaagatgattgctggtcttaactttaggtaactctgctgtgctggagatcatctttaagggcaaaggagttggattgctgaattacaatgaaacatgtcttattactaaagaaagtgatttactcctggttagtacattctcagaggattctgaaccactagagtttccttgattcagactttgaatgtactgttctatagtttttcaggatcttaaaactaacacttataaaactcttatcttgagtctaaaaatgacctcatatagtagtgaggaacataattcatgcaattgtattttgtatactattattgttctttcacttattcagaacattacatgccttcaaaatgggattgtactataccagtaagtgccacttctgtgtctttctaatggaaatgagtagaattgctgaaagtctctatgttaaaacctatagtgtttgaattcaaaaagcttatttatctgggtaacccaaactttttctgttttgtttttggaagggtttttgtggtatgtcatttggtattctattctgaaaatgcctttctcctaccaaaatgtgcttaagccactaaagaaatgaagtggcattaattagtaaattattagcatggtcatgtttgaatattctcacatcaagcttttgcattttaattgtgttgtctaagtatacttttaaaaaatcaagtggcactctagatgcttatagtactttaatatttgtagcatacagactaatttttctaaaagggaaagtctgtctagctgcttgtgaaaagttatgtggtattctgtaagccatttttttctttatctgttcaaagacttattttttaagacatgaattacatttaaaattagaatatggttaatattaaataataggcctttttctaggaaggcgaaggtagttaataatttgaatagataacagatgtgcaagaaagtcacatttgttatgtatgtaggagtaaacgttcggtggatcctctgtctttgtaactgaggttagagctagtgtggttttgaggtctcactacactttgaggaaggcagcttttaattcagtgtttccttatgtgtgcgtacattgcaactgcttacatgtaatttatgtaatgcattcagtgcacccttgttacttgggagaggtggtagctaaagaacattctgagtataggtttttctccatttacagatgtctttggtcaaatattgaaagcaaacttgtcatggtcttcttacattaagttgaaactagcttataataactggtttttacttccaatgctatgaagtctctgcagggcttttacagttttcgaagtccttttatcactgtgatcttattctgaggggagaaaaaactatcatagctctgaggcaagacttcgactttatagtgctatcagttccccgatacagggtcagagtaacccatacagtattttggtcaggaagagaaagtggccatttacactgaatgagttgcattctgataatgtcttatctcttatacgtagaataaatttgaaagactatttgatcttaaaaccaaagtaattttagaatgagtgacatattacataggaatttagtgtcaatttcatgtgtttaaaaacatcatgggaaaaatgcttagaggttactattttgactacaaagttgagtttttttctgtagttaccataatttcattgaagcaaatgaatgagtttgagaggtttgtttttatagttgtgttgtattacttgtttaataataatctctaattctgtgatcaggtactttttttgtgggggttttttttttgtttttttttttttgttgttgtttttgggccatttctaagcctaccagatctgctttatgaaatccaggggaccaatgcattttatcactaaaactatttttatataattttaagaatataccaaaagttgtctgatttaaagttgtaatacatgatttctcactttcatgtaaggttatccacttttgctgaagatattttttattgaatcaaagattgagttacaattatacttttcttacctaagtggataaaatgtacttttgatgaatcagggaatttttttaaagttggagtttagttctaaattgactttacgtattactgcagttaattccttttttggctagggatggtttgataaaccacaattggctgatattgaaaatgaaagaaacttaaaaggtgggatggatcatgattactgtcgataactgcagataaatttgattagagtaataattttgtcatttaaaaacacagttgtttatactgcccatcctaggatgctcaccttccaagattcaacgtggctaaaacatcttctggtaaattgtgcgtccatattcattttgtcagtagccaggagaaatggggatgggggaaatacgacttagtgaggcatagacatccctggtccatcctttctgtctccagctgtttcttggaacctgctctcctgcttgctggtccctgacgcagagaccgttgcctcccccacagccgtttgactgaaggctgctctggagacctagagtaaaacggctgatggaagttgtgggacccacttccatttccttcagtcattagaggtggaagggaggggtctccaagtttggagattgagcagatgaggcttgggatgcccctgctttgacttcagccatggatgaggagtgggatggcagcaaggtggctcctgtggcagtggagttgtgccagaaacagtggccagttgtatcgcctataagacagggtaaggtctgaagagctgagcctgtaattctgctgtaataatgatagtgctcaagaagtgccttgagttggtgtacagtgccatggccatcaagaatcccagatttcaggttttattacaaaatgtaagtggtcacttggcgattttgtagtacatgcatgagttaccttttttctctatgtctgagaactgtcagattaaaacaagatggcaaagagatcgttagagtgcacaacaaaatcactatcccattagacacatcatcaaaagcttatttttattcttgcactggaagaatcgtaagtcaactgtttcttgaccatggcagtgttctggctccaaatggtagtgattccaaataatggttctgttaacactttggcagaaaatgccagctcagatattttgagatactaaggattatctttggacatgtactgcagcttcttgtctctgttttggattactggaatacccatgggccctctcaagagtgctggacttctaggacattaagatgattgtcagtacattaaacttttcaatcccattatgcaatcttgtttgtaaatgtaaacttctaaaaatatggttaataacattcaacctgtttattacaacttaaaaggaacttcagtgaatttgtttttattttttaacaagatttgtgaactgaatatcatgaaccatgttttgatacccctttttcacgttgtgccaacggaatagggtgtttgatatttcttcatatgttaaggagatgcttcaaaatgtcaattgctttaaacttaaattacctctcaagagaccaaggtacatttacctcattgtgtatataatgtttaatatttgtcagagcattctccaggtttgcagttttatttctataaagtatgggtattatgttgctcagttactcaaatggtactgtattgtttatatttgtaccccaaataacatcgtctgtactttctgttttctgtattgtatttgtgcaggattctttaggctttatcagtgtaatctctgccttttaagatatgtacagaaaatgtccatataaatttccattgaagtcgaatgatactgagaagcctgtaaagaggagaaaaaaacataagctgtgtttccccataagtttttttaaattgtatattgtatttgtagtaatattccaaaagaatgtaaataggaaatagaagagtgatgcttatgttaagtcctaacactacagtagaagaatggaagcagtgcaaataaattacatttttcccaagtgccagtggcatattttaaaataaagtgtatacgttggaatgagtcatgccatatgtagttgctgtagatggcaactagaacctttgagttacaagagtctttagaagttttctaaccctgcctagtgcaagttacaatattatagcgtgttcggggagtgccctcctgtctgcaggtgtgtctctgtgcctgggggcttttctccacatgcttaggggtgtgggtcttccattggggcatgatggacctgtctacaggtgatctctgttgcctttgggtcagcacatttgttagtctcctgggggtgaaaacttggcttacaagagaactggaaaaatgatgagatgtggtccccaaacccttgattgactctggggaggggctttgtgaataggattgctctcacattaaagatagttacttcaatttgaaggctggatttagggatttttttttttccttataacaaagacatcaccaggatatgaagcttttgttgaaagttggaaaaaaagtgaaattaaagacattcccagacaaa

SEQ ID NO: 281 - DNA, 3454 bp, Homo sapiens
gagcgcgggttggggttggggctgtctggcagccaatgggagcgttactccttcatccttcgaggagggggccggcaggtgtggttgcaagctggactagcagcccagcggggcgagacgggggagtaggaattgcgggggcctggtatttccccagagcctcctcccaggccagggagatgccacagtgcccgactttggaaagccaggaaggggaaaactccgaagagaagggggacagttccaaagaagatccaaaagaaaccgtcgcgctggcttttgtgagagagaacccaggggcacaaaacggacttcagaatgcccagcagcaaggcaagaagaagaggaagaaaaagagattggtgatcaatctatccagctgccggtatgagagtgtgcgcagggctgcccaacagtacggctttagagagggaggggaagacgatgactggactctctattggacagattactcagtgtcactggagcgggtgatggaaatgaaaagttaccagaagatcaatcacttccccgggatgagtgaaatctgccggaaggacttgctggccaggaacatgagccgcatgttaaagatgttccctaaagatttccgctttttccctaggacctggtgtcttcctgctgactggggagatttgcagacctacagcaggtcaagaaaaaataagacatacatttgtaagccggattcgggctgccaagggaaaggtatattcatcacccggacagtgaaagaaatcaaaccaggggaggatatgatctgtcagctgtatatttcaaagccctttatcattgatgggtttaagtttgacctacggatttatgtactggtgacatcctgtgaccctctcaggatttttgtgtacaatgaaggactggcccgctttgcgacgacctcttactcccgcccttgcacagacaacctggatgatatctgcatgcacctgactaattattccattaataagcacagttcaaatttcagtcgagatgcacactctggcagtaagaggaagctctccaccttcagtgcatacttggaggaccacagctacaacgtggagcagatatggagggatattgaggacgtcatcatcaagaccctcatctcggcccaccccatcatcaggcataactaccacacctgcttccccaaccacacactcaacagcgcctgctttgagatcctgggctttgacattttgttggaccacaaactcaaaccctggctgctggaggtcaaccactctccaagcttctccaccgactctcggttggataaagaggtgaaagatggtctgctgtatgacaccttagtcctgatcaacctggaaagctgtgacaagaagaaagtcttggaggaggagagacaacgggggcagttcctgcagcagtgttgttctcgggagatgaggattgaggaagccaagggtttccgggccgtgcagttaaagaaaactgaaacgtatgagaaggaaaactgtggagggttccgactgatttatcccagtctgaattcggagaagtatgagaagtttttccaggacaacaactccctcttccagaatactgttgcttccagggctcgggaggagtatgcccggcaactgatccaggagctgagactaaaacgggagaaaaagcccttccaaatgaagaagaaggtagagatgcagggggaatcggcaggcgagcaagtgagaaagaagggcatgaggggctggcaacagaaacaacagcagaaagacaaggccgccacccaagcctccaaacagtacatccagccattgacattagtatcctacacacctgacttgctcttgagtgtcagaggtgaaaggaaaaatgaaacagacagcagcctcaaccaggaggctcccacggaggaggccagctctgttttccccaagctgacgtctgcgaagcccttcagttctctacccgatctgaggaatatcaatctcagcagctcgaagttggagcccagtaaacccaacttcagcatcaaggaggccaagtctgcctctgcagtgaacgtattcactggcactgtgcacttaacctccgtagaaaccaccccagaatccaccacccaactctcaatctccccaaagtctccgccaaccctggctgtgaccgccagctctgagtacagtggcccagagacggacagggtggtatcctttaaatgcaagaagcagcagacccctccacacttaacccagaagaaaatgttaaaatcttttctgcccacaaaatccaagagcttctgggagagtccgaacacaaactggactttgctaaagagtgacatgaacaagccacatttgatatccgagctactcaccaagcttcaactgagtgggaagctctccttcttcccagctcactacaaccccaagctggggatgaataacctgtcacaaaacccctccctgcctggggagtgccactcccgcagtgacagctctggcgagaagaggcagctggatgtgtcctccctcctcttgcagagtcctcagagctataatgttactctgagggacctgctggtgattgccactccagcccaactggatccaaggccttgtagaagccacgcaagtgctatgagggacccatgtatgcaggatcaagaagcatacagccattgcctgatctctggccaaaaaggatgtgagaggagctagaatcagactggatctctgccacttttcccttcctacctcttaacttgcaggaaacaatgtgtctcttccgacagtgtctccagtgttcacagaatcaactgaagttttgtttgctcatctagatatactggtcttccattagttcctagtagcagcaatggggccaacagccctgcctctgttccctcccagttagcttacagtgctacaggaccatgatttctggggttggattggtgctgccccaggacacactccagttgccgtaccagtggcacttctctgggttcttcacatggcaccatcatccagaatactcccccagataaagcaacttcgggagtagtgtttcagagaaggactcatgatttccaggagtcaaaagccctcagtccaccaacagaactatgccagttggtcttcgtctccaagataaaagatgaggtcagggatgggcatggtgcataactctgagccctgagtgagagaactgaggcagctgcaacttcacaaggtcaaggcccgacctccgcccatccccaccagcccaaagacttgccacctcagtgcccgagcatcctctggtgacctccctcaccagcccaacttaatctcaccagtgaaaacagaggtgaggcgagagtacccagcctgaagatgcttcttctatcagcctgcagaaatgttacactttcccttcaggcatccattaataaaagaaattgccatgcttactgccagga

SEQ ID NO: 282 - DNA, 5632 bp, Homo sapiens
agttgctggggtaaggcacgtgaggaggaggtggcttgaggcaaccatggcgggaggaatgaaagtggcggtctcgccggcagttggtcccgggccctggggctcgggagtcgggggcggtgggacagtgcggctactcttgatcctctccggctgcttggtctacggcacagctgaaactgatgtaaatgtggtcatgcttcaggaatcccaagtttgtgaaaagcgtgccagccaacaattctgttacacaaatgtgcttatcccaaaatggcatgatatatggacacggatacagatccgagtaaatagttccagattggttcgagtcacccaggtggagaatgaggagaaactgaaggagctagagcagtttagtatctggaactttttttcctcctttttaaaagagaaattgaatgacacctatgttaacgtgggtctatacagcacaaaaacctgcctcaaagttgagattatagagaaggacaccaagtacagtgtcattgtgatccggagatttgatcccaaactctttcttgttttccttcttggacttatgctatttttttgtggagacttgctgagcagaagtcaaattttctactactctactgggatgactgtgggaattgtggcctctctgctaatcatcatttttatactatctaagtttatgcctaagaaaagtcccatttacgtcatcctggtgggaggctggtctttttctctgtacctcattcaactagtttttaaaaatttacaagagatctggaggtgttactggcagtatcttttaagttatgtcctcacagttggattcatgagttttgcagtatgttacaagtatgggcccttggagaatgaacgaagtatcaacctgctgacctggaccttgcagctgatgggcctgtgtttcatgtattctggcatccagataccacatattgcccttgccattatcatcattgctctttgtactaagaacctggaacaccctattcagtggctgtacatcacctgcagaaaggtgtgtaagggagcagaaaagcctgttccccctcgtctcctgacagaagaagaatatcggatacaaggagaggtagaaacccgaaaggctttagaggagctccgagaattttgtaacagtccagactgctctgcttggaagactgtttctcgaatccagtctccaaaaagatttgctgactttgtggaaggctcttcccacctcacgccaaatgaagtttctgtccatgagcaggagtatggattagggagcattattgcccaggatgaaatctatgaggaagcatcctctgaggaggaggactcatattctcggtgtcctgctatcacacagaacaactttctaacctaggtagtggtcagttatctttacgtggactggcttggtgccttggtccatgttgcatgtgttgtgcaattgctttcaaccctttgaaacagagtgagatagatagggtagaaattctcctactgaaataagaggcctaaaaaggcctccctttggaaatgggaggtctctatgggatccctgaggaaggagagtggataaagtagtgaatgctgggtagttcacttcccattggttaagctaacagcccacttttatgtttccagagaaattggatggccacagctagcatggcattctagctccttcttgaaagttgattcaatcatggcatttctgtcactggctggctctccaaagtaagaactgttgttaagtgcaggaatgcttttagactataggctgcaacttccagagagaaatccacaaatctgagcctccttcactccagcttttatttcagtgactttagaataattattgatttaactgttttgggaggaaaatagatttttattgttttgttttttaaatgaatgtcttttaaaaaacataacaaactcatgttccagaaccagcaagtgctccagagtgacacaccccctaggcccctacatatttattaatatggattatccattaaagccccaggagctgttgttttaagctttgatttagttctcatacatatgatagaaagtcctatttgcctttaggaacatgcctgtaggctcttctgcaggtgagatgtactgggctttttattatattcaactttcaattccatcttaaaaaacatttgtattcttctcttcccattcttccttaccctgcctttgccctttcaggaagggtcagttcccttacctgtgaactatgtatgttcagagtagcattattcctgctagctaggagaagtcatcttgtttaggggatttggatgctttttatacgttctccattttcctgtcattgggtcatgttatctttgagttgctatgaaatcaggaaactgtctccttttcctttcccttcctttgtctacatgctctgtccattcctttcagccttttctcaccacccatactcccccaaatctgggtaatttttaagccttgaaactatgtagtttcttgatacacaatttgtagttatgcagcagccacaatttgcattgccaggaaataggctccaggttatcttcatgcctctgggtgctcattcagctgtcaagtttccatgaacttacacttatttatgattgcgtttctgacctgagatgtatgctgcctgttattgcagtagcattagtttcagattcttttgccattgcaaagtaccccttataaaccagcaatgtcatctgtgaggaagcaaattctcaagtgtctgtcatttacttggttctttttctttgtggtcttcacccttataccctggaaaagtctgtaattaccttagccaggaagatagatggtcatggcaagcgcacagcaccagacttactggctcaccaagatgatggaaaaaggcagatgattttttaaaaagccgtaatgactcctttagaccagccatttagcgtggtaattttgaaaggcctagctccattgcagacttccaaagggtcagctctgagactgccctccaggtgggcagttgattatttccaccagtgttttccagagccttaaactgtcctaagtgacaactacctcagttggcaggaaagagacatatagtagaaagtgaaaaatgagcagtatttgggcagatgctatgggttacagttgaagggtaaaaggaactttacattgggaaacctttatacccttgtgaattatgtacatggtaaaatgttctctctctacaaagaactattaaaacttctgaaatatactattttttaccttatttatagaaattgagacctagcatatttaagcataagtttattttaaaaaataattcaactcgtgcaagtggtctcaggattctctggagattttggtgcctcccctacttagggaggtgatagcttgcctataagggtgacttttcctgatcatgtctttatttcaatgagaaagcactgtgaaattgtgaaagattctcctctttctctgtttaataaacccccatgaaatatagtttccatctctagaccagttttttttccaccgtgtttagacttgaggtgaataaaatcaaactgttttttactccctatctggtagttggagacctgagctgtaggcagtggagatggcaattggttctgcagcctgagagttgctctcacacagtgaaggacggtgctgctctggtgtgctgtgtgtccttgccctgcctgcctgtggctctgcccagatgcttcagatcctctgtgttccggagattgcttgacttcaaccttctttaggagctgctcttgtctccctcttggccacttagtttgctggctcagtcactacttgaagaccccatttaatttttctctggcagttatagctcttgtgatttcagtacagtctcatctctcagaccaatctcatcaagaaggattgaagggataactatgaggtaagctggacattggagccgtgtttgctgccacgtcagcgtcttgctgggtgaatgtcaagccataaatgggctccagggctctggatctcatcagcattggaaatctattgcctctcatcagtctgaccaaattatgtagagcattaatgtagagactcccattaatgggaatacaagaggcagctggcataaaacatttctttcactttcctttcccactcagattgcttcaagagaccaacagaacacagggatcaaaaacaaggaaaatttagcaacttcattaccttctaataagtaattcctgttagccactgcatcccaccaaaactagtttatttttcccctcaaattcatgatttttacgtctgttacaaagggaattttgctgatagctctttgggtcccactgttccattttatgctaatagattccattctagggcccagccgtctcttgactgatggtgttccctttaacccttggcatgtataatagaattttggtgaatgaaagaacccaaataggccagatagtccccccaggccctgatatccataaaaggcttgggaatgcattatgtaattgtccttagtctttttgttgttttagaaaaaaaaaacaagatgggctcagatggatgcctacgtaaaaatggttcctagctgtgtactcataacttttctttgaattgagtagtgaaaggaaggaggaggaaaggaaattaaatgtccttctagtattctctggactcaagtctgacatatgagataataacctatattgaaatgccaagaattgtatctgaaacaagagaacagtttgacacatttatcatgccttcatattacatattaactgaaaccaattaataaacatatgaaatatccattgcacaaggcaaaggcacctaaaccttttgtttctttttctacatagcagaaattgattttttttttatttttttaggggaacctatataattatgacccagtgatgtcttttggtgacttaagcttatgaattcaggttacaattgagttgattctagatggttactaccttgaaaaggatgttggtgccttatgtgacacgagccagagcctgctgggaataaacaaagcagattcatgccaacaccaactcgtagctttagtggcagatgggagtggtcacagactcccaaaatgtggggctttggatttccacaccatcccacgtgtgtgtcatcttcctctttcacactcttgatgataatttgaaaatggtgaaatcacctctgaatttgcctatagcatgagcacattcttatgacaacataacaaatagttcataatgtgaatattagaaactgttacagcctgcagttaccataattttccatgtttgtggaattgatattgaaatagcagggctaaggaattactggcaagttttagcctgtgggtaataccttagggttatttaaatatttgtaattttatttaaatgttcatgaatgtttgaaaggaacaaaattatcagggatggctctttgccatgggtcttattttcaccctcttttctgtaagaaaaaagaacaatgtcttaatgtatttttaaagtttttggtatagtttctaattccaattttaataaaagttttatagataaaaaaaaaaaaaaaa

SEQ ID NO: 283 - DNA, 6194 bp, Homo sapiens
aagggggcaaagcctcggtcttcatagaaaaggagaggaggcaaacgcagcccaaactggggggtttctcttcaaagccagctggtctggctttattctgcaggaatttttttacctgtcagggtttggacaacaaagccctcagcaggtgctgacgggtacaacttcctggagaagcagaaaggcactggtgccaaagaagagttgcaaactgtgaagtaacttctatgaagagatgaagtaaagaacggaaggcaaatgattgtggcagtaaagaagtgtatgtgcaggaacgaatgcaggaatttgggaactgagctgtgcaagtgctgaagaaggagatttgtttggaggaaacaggaaagagaaagaaaaggaaggaaaaaatacataatttcagggacgagagagagaagaaaaacggggactatggggagaaaaaagattcagattacgaggattatggatgaacgtaacagacaggtgacatttacaaagaggaaatttgggttgatgaagaaggcttatgagctgagcgtgctgtgtgactgtgagattgcgctgatcatcttcaacagcaccaacaagctgttccagtatgccagcaccgacatggacaaagtgcttctcaagtacacggagtacaacgagccgcatgagagccggacaaactcagacatcgtggaggcattgaacaagaaagaaaacaaaggctgtgaaagccccgatcccgactcctcttatgcactcaccccacgcactgaagaaaaatacaaaaaaattaatgaagaatttgataatatgatcaagagtcataaaattcctgctgttccacctcccaacttcgagatgccagtctccatcccagtgtccagccacaacagtttggtgtacagcaaccctgtcagctcactgggaaaccccaacctattgccactggctcacccttctctgcagaggaatagtatgtctcctggtgtaacacatcgacctccaagtgcaggtaacacaggtggtctgatgggtggagacctcacgtctggtgcaggcaccagtgcagggaacgggtatggcaatccccgaaactcaccaggtctgctggtctcacctggtaacttgaacaagaatatgcaagcaaaatctcctcccccaatgaatttaggaatgaataaccgtaaaccagatctccgagttcttattccaccaggcagcaagaatacgatgccatcagtgaatcaaaggataaataactcccagtcggctcagtcattggctaccccagtggtttccgtagcaactcctactttaccaggacaaggaatgggaggatatccatcagccatttcaacaacatatggtaccgagtactctctgagtagtgcagacctgtcatctctgtctgggtttaacaccgccagcgctcttcaccttggttcagtaactggctggcaacagcaacacctacataacatgccaccatctgccctcagtcagttgggagcttgcactagcactcatttatctcagagttcaaatctctccctgccttctactcaaagcctcaacatcaagtcagaacctgtttctcctcctagagaccgtaccaccaccccttcgagatacccacaacacacgcgccacgaggcggggagatctcctgttgacagcttgagcagctgtagcagttcgtacgacgggagcgaccgagaggatcaccggaacgaattccactcccccattggactcaccagaccttcgccggacgaaagggaaagtccctcagtcaagcgcatgcgactttctgaaggatgggcaacatgatcagattattacttactagtttttttttttttcttgcagtgtgtgtgtgtgctataccttaatggggaaggggggtcgatatgcattatatgtgccgtgtgtggaaaaaaaaaaagtcaggtactctgttttgtaaaagtacttttaaattgcctcagtgatacagtataaagataaacagaaatgctgagataagcttagcacttgagttgtacaacagaacacttgtacaaaatagattttaaggctaacttcttttcactgttgtgctcctttgcaaaatgtatgttacaatagatagtgtcatgttgcaggttcaacgttatttacatgtaaatagacaaaaggaaacatttgccaaaagcggcagatctttactgaaagagagagcagctgttatgcaacatatagaaaaatgtatagatgcttggacagacccggtaatgggtggccattggtaaatgttaggaacacaccaggtcacctgacatcccaagaatgctcacaaacctgcaggcatatcattggcgtatggcactcattaaaaaggatcagagaccattaaaagaggaccatacctattaaaaaaaaatgtggagttggagggctaacatatttaattaaataaataaataaatctgggtctgcatctcttattaaataaaaatataaaaatatgtacattacattttgcttattttcatataaaaggtaagacagagtttgcaaagcatttgtggctttttgtagtttacttaagccaaaatgtgtttttttccccttgatagcttcgctaatattttaaacagtcctgtaaaaaaccaaaaaggactttttgtatagaaagcactaccctaagccatgaagaactccatgctttgctaaccaagataactgttttctctttgtagaagttttgtttttgaaatgtgtatttctaattatataaaatattaagaatcttttaaaaaaatctgtgaaattaacatgcttgtgtatagctttctaatatatataatattatggtaatagcagaagttttgttatcttaatagcgggaggggggtatatttgtgcagttgcacatttgagtaactattttctttctgttttcttttactctgcttacattttataagtttaaggtcagctgtcaaaaggataacctgtggggttagaacatatcacattgcaacaccctaaattgtttttaatacattagcaatctattgggtcaactgacatccattgtatatactagtttctttcatgctatttttattttgttttttgcatttttatcaaatgcagggcccctttctgatctcaccatttcaccatgcatcttggaattcagtaagtgcatatcctaacttgcccatattctaaatcatctggttggttttcagcctagaatttgatacgctttttagaaatatgcccagaatagaaaagctatgttggggcacatgtcctgcaaatatggccctagaaacaagtgatatggaatttacttggtgaataagttataaattcccacagaagaaaaatgtgaaagactgggtgctagacaagaaggaagcaggtaaagggatagttgctttgtcatccgtttttaattattttaactgacccttgacaatcttgtcagcaatataggactgttgaacaatcccggtgtgtcaggacccccaaatgtcacttctgcataaagcatgtatgtcatctattttttcttcaataaagagatttaatagccatttcaagaaatcccataaagaacctctctatgtccctttttttaatttaaaaaaaatgactcttgtctaatattcgtctataagggattaattttcagaccctttaataagtgagtgccataagaaagtcaatatatattgtttaaaagatatttcagtctaggaaagattttccttctcttggaatgtgaagatctgtcgattcatctccaatcatatgcattgacatacacagcaaagaagatataggcagtaatatcaacactgctatatcatgtgtaggacatttcttatccattttttctcttttacttgcatagttgctatgtgtttctcattgtaaaaggctgccgctgggtggcagaagccaagagaccttattaactaggctatatttttcttaacttgatctgaaatccacaattagaccacaatgcacctttggttgtatccataaaggatgctagcctgccttgtactaatgttttatatattaaaaaaaaaaaatctatcaaccatttcatatatatcccactactcaaggtatccatggaacatgaaagaataacatttatgcagaggaaaaacaaaaacatccctgaaaatatacacactcatacacacacacgcacaggggaataaaataagaaaatcattttcctcaccatagacttgatcccatccttacaacccatccttctaacttgatgtgtataaaatatgcaaacatttcacaaatgttctttgtcatttcaaaatactttagtatatcaatatcagtagataccagtgggtgggaaagggtcattacatgaaaatatgaagaaatagccatattagttttttaacctgcaatttgcctcagcaacaaagaaaaagtgaatttttaatgctgaagataaagtaagctaaagtaccagcagaagccttggctatttatagcagttctgacaatagttttataagaacatgaagagaacagaatcacttgaaaatggatgccagtcatctcttgttcccactactgaattcttataaagtggtggcaagatagggaagggataatctgagaatttttaaaagatgatttaatgagaagaagcacaattttgattttgatgagtcactttctgtaaacaatcttggtctatctttacccttataccttatctgtaatttaccatttattgtatttgcaaagctagtatggtttttaatcacagtaaatcctttgtattccagactttagggcagagccctgagggagtattattttacataacccgtcctagagtaacattttaggcaacattcttcattgcaagtaaaagatccataagtggcattttacacggctgcgagtattgttatatctaatcctattttaaaagatttttggtaatatgaagcttgaatactggtaacagtgatgcaatatacgcaagctgcacaacctgtatattgtatgcattgctgcgtggaggctgtttatttcaacctttttaaaaattgtgttttttagtaaaatggcttattttttcccaaaggtggaatttagcattttgtaatgatgaatataaaaatacctgtcatccccagatcatttaaaagttaactaaagtgagaatgaaaaaacaaaattccaagacactttttaaaagaatgtctgccctcacacacttttatggatttgtttttcttacatacccatcttttaacttagagatagcattttttgccctctttattttgttgtttgtttctccagagagtaaacgctttgtagttctttctttaaaaaacattttttttaaagaagaagaagccacttgaaccctcaataaaggctgttgcctaagcatggcatacttcatctgttctcatttgtgccatctgccgtgatgtcgtcacttttatggcgttaatttcctgccactacagatcttttgaagattgctggaatactggtgtctgttagaatgcttcagactacagatgtaattaaaggcttttcttaatatgttttaaccaaagatgtggagcaatccaagccacatatcttctacatcaaatttttccattttggttattttcataatctggtattgcattttgccttccctgttcatacctcaaattgattcatacctcagtttaattcagagaggtcagttaagtgacggattctgttgtggtttgaatgcagtaccagtgttctcttcgagcaaagtagacctgggtcactgtaggcataggacttggattgcttcagatggtttgctgtatcatttttcttctttttcttttcctggggacttgtttccattaaatgagagtaattaaaatcgcttgtaaatgagggcatacaagcatttgcaacaaatattcaaatagaggctcacagcggcataagctggactttgtcgccactagatgacaagatgttataactaagttaaaccacatctgtgtatctcaagggacttaattcagctgtctgtagtgaataaaagtgggaaattttcaaaagtttctcctgctggaaataaggtataatttgtattttgcagacaattcagtaaagttactggctttcttagtgaaaaaaaaaaa

SEQ ID NO: 284 - DNA, 6120 bp, Homo sapiens
acttccgctgtcccgcgaagggcggggggagcgaactgttgtggtgcggagcgttcggcgggcggcggccgggcggcccaggggctgccgcgggactcggggcgcagccgagtggctgcaggggtggagtgggccggacgagccgcggggcccgggtgccgcgggttcgaggccgggccccgcgcgaggaggccgcgccaccccgggggagctgcccggcagcgagtttgccccgctgccgaaagaaggcgggagccggcaggggccttcgaaaccccctggcaacccaggcccggagtccttggggagcggctgtttcctgggacgccctcccggacacccccgctgcagggttacggttctgggcccccggcagaaggctcctccgggtgacccccggcggggccctgcgagccgcgggagccgaccccggggcctcgagccgggaggaagggggcttccggaggcggagggccgggggccgagggagccgggcctctcggacgcggggcagggcagcgcccgggctggagacggactctgggaccctcggctgcgggggtctcagcgacctgccccgcggcaagcgcggccgcggagtggcctaccggggaccctcccccagagggaccggcccggggcggggagatgaacggcttcagcacggaggaggacagccgcgaagggccccccgccgccccagctgccgccgccccgggctacggccagagctgctgcctcatcgaggacggcgagcgctgcgtccggcccgcgggcaacgcctccttcagcaagagggtccagaagagcatctcgcagaagaaactcaagctggacatcgacaagagcgttgatctgttccagctgcaggtgaacaccctacgacgttataaacgacactacaagttgcagaccagaccaggcttcaataaggcccagttagcagaaactgtgagtcgacacttcaggaacatacctgtgaatgaaaaagagacccttgcctacttcatctacatggtgaagagtaacaagagtagactggaccagaaatcggagggtggcaagcagcttgagtgaggatgaagcacatcttaaaggaatgaagtgtaatgcttgatgcacaggtgatatctactacatttaagcccataaagactgttaaatattattgtaaataaaaaagtttgaatgatgaatactgtaaatctttttggtcaggaggattatattctcatgattcagcatgtgtatagaaagactttcttttacgataactctggactaaaaaaatcaggatcattaaaagaattaaaaactatgtatttcagcattcaacaaagcattaaatcaattctactggaaatgtgggataagaaatattttggtaatcaccttatccaccaggctgccacgtgtgagctgtagcttggaatagcagcaaggtgcaattggccatggaagtgcatgagcagacccacatctggacttgcatgctgcccgctggcgacatagatatcccgcccgctttgttgcaagctttgtcatttatcagcagatcagtttgacactggtccccctcactcaccctgtgccttgtacacagtaggcactcaatcagtaggtattggctaattgagctgtcactaatagtgccagccttgtaacatccgcttcacacctctcatgactgagacctctgccatttctgttgctcaccacttaactgctagaatgtggaggaaatcctgatgcaccaacaaggaagtttctgatcagataaggatttcaggacagttgcatgtgcaaaactattcgttgaggttccagaaacactgatatagagaccctcacagaagatacggtcccttatgcaccccactatgcttcactctttggggtgcagttagatattatgacttcagccaagcttcttggtaataaatgcattgacacactgacatatttagtaggttggggcaagtatttttagaagttttcatcctaagttcacaaccaccatgcaagctgccaggggccatgtgattcctgcccagaagttcagcttaggattgaaagtctggctggccttgactccctgggctctggtcatcagcaaatcatgagtttgggcaacaaaggtcaattccatctgatgctcatttttgtgaacaatttgcctccctcttagggagaaagattgctaaaataatttttgaaaattacctaatttttttgttgttcaaaacgttgaactcctcaatctaattatatcagagccaaagtatcctgtgaaaacaaagctttatatccaaaaatgtgcttttgcaaaattctttaatctgtgtaatggagggcagagggtatggggtaggagggtgggagaaagaaaagaaaagaatttggattctaatttatgaccatcttgacatatggtcaaaggtgtcattttcctactcagtttcaattctgagttaatttcttaagccttaaataataagaacaatggacagcctggcctggcagagagtttcacagatgacttaatctgagcaccatcacagagaagtcaggactaaaccccctactgagcagggcggcggagtgtccaaaggtctcagttctgtggagcagagtaccacgctttctgtggaatggggacagggtcaccacgctcactaaaatgcagtatgttccattgcagcaaagctttcgcctgtgttcaaaatgcatgtctagcagattgcagccttttaaattaaatatatataaatggttgtatatagaatatactctggactgtgagggcatcctattttggtatgcctcctggctgtggatggcatgtccagtgctctgtgagtgttttcagtcattcacattcactatgtgtttagagattctctccctgcttacagctgaaggatgttgatacaggcatcaagaaggctgaggggcagatggggcctgcaggttaaggcattgttaacttgctccatggaaatgtccatatcttaatgagtaaaaaagtgtatttttctgatacgtaaaccagaattgtgggcgtgtaggtcacatcactatttctttagcagcaaatctgttttcccagttgagagagacaatagcttctgcacaagaatatatgatggtaggatccatctgttcaattgtgtctgaaagaatctttattccaaagcgaaacctggggaaatgttttaccttcagccagatgctgtgtgtgtacttgggtcccttgtctttcctctaaggagaggtgcttgtggaaagtggaggttgtgggcatcttttcaaccttttcaatctgacctttcaacaggtcaggtgagagaaaagacaaagctatttgaacctatgtttttcttatgtccagaaatctgttctttcatcaaaccactaaaccactcgccttagcctcttctgcagtttctggtggctctatctgtgggcaagggactcctgcctgtgagaagtggccaggccctccagagcaacggggtctggcttcagggagcagtggggtgtggggaaagcaatgttcatcttggctgctccatttttataccatccatcaaggactcttgcgcttctctccacctgtgacgtagcagcattgccttctttcctcttggtgcttctgggcaaaactggaatttgaaatccagaactggcgttgtcttcttaaagagtatggttcctgcctcagttccagcctggtatggttctttgatatgccctgaaggttctcacatggaaacatcagtatcctgccattcatgttgttttaagatgttttaaaaaccaatggacaaacttcttgcttcaaggaacaaactcttaggttggcaacagcatataaaaaaaaagatcacagctgaatctcatgaaagattaaaaaccaaaggattcaagaccggtgttgtaaaatgaagaggaattttacttacatgttacagctgccaagtttttagatgttcctgtcatagctaaatagtcactgctagcctttcagagaacagatagtaacaattgtttgcagctgcagtgttgcatctaattttggtgtttaggctttttattttgtgggaagctttttgttaatatcctgcagggcaactgcctgttgggagggagaggatggaagaaggagcttactctgggggccttgcctattgagggaggctgttgcccagagcagttgcttcatggaagtcatccaaaggcgctctcagtcattacaatgacaggatctcaaagttgggaaagggctgttaagtcatccagtctagtctccacataggtgctgacattctgcctacaaccatcccaccaaggggttgagcagtctggacttaaacacctccgaggacagagaacccactacctcgtggagaagcctgttctttgtaaacctctggcttttctatgttctctgtaatttccatcttagtctctgccccatgggggccacatgggacaagttatttttggcaaagcacctaattgctggcactgtcccaaagcatagcgtttgccttttggaaagaaacaatgctaggacatggacactttggtacactgtccttacccctgagtattagtccactcagttccttgttggagaatgttgagaaaaccctactggctggcttgtttctgccaaagcttggggagaggagagggggatgagaagatgttagcagcctgctaaacctcagacagatgaggactcagttctgtgcttgccccacaaaaacggatgctcacatcatcaggaaattgttcagctggaggatttataacttcgttgctttgcatgaagtttaaagttttcatggttgcccagggcttgtaccttagattcctgtaaggactttgcactgtttttgctgagaaaacaacgcttcaggacttaaggtctaagcgtcagagaagtgccgtattttcaaggtggaaagtctgttaagcttgctgttgtccaatcatccgtttttagagatggggaaactaaaactcaaaaagatgtgcctgaggtcatatggcattatcagaaccaacctctggccctcttgacctgtctagcattctttctttctgacctataggatgactctaattcagtctaaatcggctgccctcagattcttgagaacttaaaattgagcagaaattcccaaggccaacctagctctcagggaccaacctgcagaactcaagattgagcgaaatgtttaggccagttgagttttgcaaaatgagtggtaagggaaaacagatctagcctgttatttaaaaccagggttcaaaagccctattgggagaggtagtattgtcctagcatttaaattctcatgaaatgtgcttggtctgtgatctcttggtcagatatctgccttccaggcgatcctttgaggttgtgtaattcagctggccctggctcctggtccctgttactgagctgggcagtcgaaccgaagggcagatgagctcaagatcatgccttgggaagcatggtgctctaggggtgcctttttattcctttcattgtattatagactgtttccaagtttatggttagaaatggtaaagtgggtctggtgttttgaggtagaacccagcctagggcaagatatgaactgttcttgaggtagaaatgtctacagtcagttgtttcatctagcttgcatcttaaaacacaaacccttcagttgctttcacttaatgcacacatttgccaatgacagagggttatacaggatccttcttttacatttctattgtctgctacgctcatcagagtatattttggggtacaaggttttgggggttttttttcccattttgtaactgccttattgaaaagtaagtgcccttccattccaggcctcctcatattgtacttgtttcctgccaaatctgggggatcatttgtattttaacttcgtaatctatggctctgtactgttgaaaggctctcaattctgtggggtctccttagtatgtatgtgacttttcatgttgcaatatcacacgatgggatggcccgacttttgctcttaataaataatctgaatgagtaagagaaaaaaaaaaaaaaaaaaa

SEQ ID NO: 285 - DNA, 4153 bp, Homo sapiens
atgctgaccgtacccaggcgggagccgccgcgccgccgcctggcgctgcacctgggcccggcccggccgccaattggacggctcggggcgaccccgctgtatcgcgagacgagattggcagcggcggggcctcaagtgcccccgcgctggctttgtatgcggagccgcctgccggtcctttaacaatgggcggcgcgagcgtccaggcgctgggctctagctgaggccggcgcttagcggcccactgtccgcagcatgagcggggccggcgtccgccgcacgacggcggggctggggctgtgagggccgcggttccggactcgagttgccgcgtcgggctgggcgcgccgccgggtcccatggagctggaggggcagtggtggcgaggacagctggccgccgatattcaccaagcgcttcgctacaaggagctgaagttgccctcctataaaggccagtcccctcagttaagtctcagacggtattttgctgacttgattgccattgtgagcaatcgcttcacactctgcccttctgcccgccatcttgctgtctatttactggacctgtttatggaccgctatgacatctctatccagcagctgcatttagttgcgctttcctgcctgcttctagcaagtaaatttgaagaaaaagaagacagtgtgcctaagctggagcagctcaacagcctgggttgtatgactaatatgaatctagtattaacaaaacaaaatttgctacatatggaactattattattagaaacctttcagtggaacctctgccttccaacagccgcccatttcattgagtattatctctctgaagcagtacacgaaacagatcttcatgacggctggccaatgatttgcttggaaaagactaaactctacatggccaaatatgcagattacttcctggaagtatctttgcaagattatgcctttctaaattatgcaccttctttagtagctgctgcatgtgtggcttcttcgaggattatacttcgtctttctccaacgtggcctacaagactacatcgtcttactgcctactcttgggatttcttagtgcagtgtattgaacgactgttgatcgctcatgataatgatgtgaaagaagcaaacaaacagagagggcaagcaggacctcagtcagcgcaactaagtgtattccagacagcctcccagccatcacggccagttcactttcagcaacctcagtatctccatcagacacatcagacctcactgcagtatcgccatcctacgtcagaacaaccaagctgtcagcagattgtatcgaccacacacacctcatcttacacactacagacatgtcctgctggcttccaaactagtgttcagggccttgggcacatgcagactggtgttgggatgtcactggcaataccagtagaagttaagccctgtctgagtgtttcttacaaccggagttatcagataaatgaacattacccttgtattactccatgttttgaaaggtgattatttgtgaagctgataaccgacccagactgctttgtgacatgaagctatgggtaagcgttttgtaaacttctgttcaaaaggaaagggatctaaatgacatcagaactcttcaggtaccagcaccaggaagactgaatatcctttttaatgcaccatgaatcctgggagactaagcaaattaacagtatgtcaaattctgttacaacaaatccctgtatgacaaaaatgttcaagtcctggctgatggtccaaatatttcaaaaatattcagtacaacagaaaatttggacagacttcaatttgccattttgagatttgacctgtggtagcatctgggcctaatgttggcttctaagtcaaagactaaatgtttatctcatctatggacttgccaaacagtcttttatgaaggaaagttacagtattaatttttgaaaaggttttttttattctgcaattttttatttttgttctacacatgaatttttgactaagtttaaactcatgaattgttatgctataccaatctgcagtaaaaaaaatttttttagatgattctatataacttcgtctcacaaatagtgtaggtatctgggtttatatactaaaattaagggtggagaagatcttattttttaaatcatggtcataatttttctttttttccctaagtgatcaacatcaaatttttagaattaaaatacatttaactcagggaatttgtactacttggaaacacttaactgtaatgcaacatgccttgggaatgttatagtgtgaactacctttataacataggttaaaatacgcttgctagggtgtgttttcaaatgagaacataatatagctcagaatgaagtggtagttcctgtgattcataatacatatgtaggttttgcatatctcagtgcaatccatgatttatactcagaatcgacattcttaaaaagttatttcaagggatggcataactgtaagaggtcagtgctagaataaagtcctgtaggtttattttggaagggactgtggccagggtagttctcaggttgtgctagagcagcactttgttatgtggaagacaggttttttaagcaacctttgaatccagctctagtcagtctaagcaggcaaaggtaactgatgactaaatttcagtagctactttcattggattgaccctacaactgccctgggacatttcactgtaccagtattaactgcaaacagcaataattgtcattacagcaagggcagtttgggggtaaagcattttggaggaataaccttaaaaagttaaaaagtcattgtaataactgataaactgtatacattgtgctcctttctgtgggagaagaaagatttggtggagggaagctttctggtttaaaaattagtaaggtgtgtctttttgttttttttaagatagcacttgaatagaagggaaaactgcatggcagatacgtgactgccacaatatgcatcgaagacaaacttactataaagatgttgtgggtatgcagcaggagtctcagtaatcaagccaatggcctttgtcaggaagggaaggggctcaacacagtgatggactgatccagatggctcccggggatgaatgtgggtgggtagcttctgtcagtatcaatgcttagagaaatatcctttccttaaaaagaaaataacttttatatttagagtacatagggcatgatgtggatttattagtctggtagataaaatgaaaaaccactcaggtaagaacactcactcatggcagtttttaagcatgaaaattgttttctgaaagtatcatcacttttcctttttaaagaaggctgctaattggattttggtagttcttacctcaagaaaacttgaattatttgggggaaagtaggctcaaaagagaatatatctttcacattcacattcagaacccagcaacctggagtccaattttcagtattttaactacctcaataatgctatgaatgtaagatattgggatagagatcccaacttgaaacaacagccagtgcctgtggtaacttaatgtcttgtcaaatacttttattgattggtttatatgccattcttgttatagaagaatatgccttttaaaaaagcttattaataacactttcccaatttatattttaaaaagctaaagaacactggattaataatcttttgggagggtagaataaaataattgattactattgctgcatacccggggtgggatggggtggttggagaaccagaactatttttaaaacattaggtttcaatataaatacaactcacaactgctagctttggggggtgggggaacattgtgtgggttttgttttgtttaatttattgattagtctttaaagtaggcttttttttttttttttgagaatactggaccatcattaaatgtgtactgtgaagagattaatatgtatgaagggctttaccaaagtccactaaataaacactactcaagtacagactgcaaaccaaaatgtatctgtgttacgacattaattgcaaatagcaagtatggtgctaaagtctacaccaatggaattagatgagtgctatgcacttaattttaaaataaaactagttttcagtaaaaaaaaaaaaaaaaa

SEQ ID NO: 286 - DNA, 5010 bp, Homo sapiens
gatcgcaaacccggaagacgtgttcgggcagctggagtgtacgggcccgcgggccacggccatgcagcccctggaggtaggtctggttcccgctccagctggggagccgagactgacccgctggctgcggagaggcagtgggatcttggcgcacctggtagctttgggcttcaccatctttctgacagcgctgtcccggccaggaaccaaaacaggtcccctgatggaggatagaagtgaaggaggccgggcgcggtgggtcatgcctgaaatcccagcactttgggaggccgacgcgggtggatcacttgagttctgcctctgcatggctgaagccatcctactcttctcacctgaacactccctgttcttcttctgctcccgaaaagcacggatccggctccactgggcagggcagaccctagccatcctctgtgcagctctgggcctgggcttcatcatctccagcaggacccgcagtgagctgcctcatctggtgtcctggcacagctgggtgggagccctgacactgctggccactgctgtccaggcactgtgtgggctctgcctcctttgtccccgggcagccagggtctcaagggtggctcgcctcaagctctaccatctgacatgtggactggtggtctacctgatggctacagtaacggtgcttctgggcatgtactcagtatggttccaggcccagatcaaaggtgcggcctggtacctgtgcctggcactgcccgtctatccagccctggtgatcatgcaccagatttccagatcctacttgccgaggaagaaaatggaaatgtgagttcctgcgaacgctgaatctaggtgggacgcttgccttgaacatcatggttcctttggtgatctataagggatctatttaagaagtggtcaggttttcgcacttcttggctggtccagggactgcagaaaccaaagctgctattgttgaggaataattcagtgggtcaaaatggggagatgtactgggtatgagtggaaggtgatggagagcctgatcctgaagcctctacttgatgagagacagagttttgggtggtgatagtgatgtgctggtggtcatttcttgcttgtgtgcctgatgaaaaactgggttcctgtaagttatgaatggcatccagggatatttgggttacttttaagaaagcagtgtgatgtagtggagagagcccatgggtcttatttatgggatatggtcctcttaggctctgttgtacaaccttaggtacattccatatcttaagaccactgtttcttcatctgtgaaatgtttctaaacaatctctaagtcccttccttctctaatatacagcgtctgtcaggtcgatgtctcagaacactctcccagctgtggaccacgtggaccacttagcagactcagggggtagttctttactctccctttactaccctggagggacagctctgcccttgaggcccttcagaaatttgtgctgatttggtccctgtgccagggcacagggggtcaggcactgtggaaagaagggactcaggtgagggtcttctggactctaagacggtaaaggcactaaagtcactttaaagcttttggagaagcaggagggcattggcttaaccaagccgaaggctgctggctgggctgcctagcccagctaagatcttccttcagcccacctcaggatccgggcttgagggctgcagggcctgcgtgcgctccctcccccgaaatcacttctcagggcaaaggagccccaggcatctcatgctttgcccttcttagggctcaggttcttgccttagcacatagcttctgggagcttttttgaagcatttcataagggccaaggaagtggggcagggcttttctgatccaaagaaaacaaagtttctctggttacccctcttcccttgttatctaagctttcctcagttgtcatctcttcccagctctttggtccaagagggggctgagtttggtgccagctggcaaatgagggctggactctcttccctccagagaccaccccgctccttgctgcagctgaaagtagttccccaggctgccctcggtggtgaggactggatgctagactgctgagctgtggtctgggctcagttgagaagataggatctccctagatcatggcaaggcctgacaacagctgagccaggaaagtgctgctgaggcaagtcgacatagctcacagggaactctgggaagcctgggatgtaggcgctggagctccagttcccaggagcaggggcaggtgttcctagatgttagtgttgtggatgtccttggtcttctgaagattcaggtcctcctctccgggtagcttagaagtaaggaggttggtttgattcaatagtatggggacagaatggggacagcaagggcagaagtgtcctctccacgtaactcattatgcccctcctgggggagattgcatctccaggacaagcatctaaaggaggcccctgctgtgcagaggggtattgttcctgtctctttcattgtcctccctcctctcaaactctccagtgtggtgtgaactcagaagaaacggttactggggctgcatggagaatttcacctgcggtgattttgatccagggactgcatctcctctttcctcatcacagccagtgctgagaggctccttctacctgccgcagggtaggagggccaggcaaagttcaccagcttgctctaagagcaagcaggcaatgccgtaaagcctgagcctgcctgaggtgctgcctcctcccaggtggtgcgggggctggtgggcgggcgggcaggcgtgctgacagccggcagtttgcgtgggctgtgccatctgatgtctattcccagccctgggaggaagggggagtcatttatattctgcaggaggaaggggccccagctgtcgcctttctgaccagcaggcctggagggcaggggcacagagcagagaggagggcactggtggtctcctgcttagcctggtctgactgcagtgtagggaataggtcaccaggaggagcccttcatcctggcaggccggattgtggagggacttccctccccctcttttccatttctccctccatcaccacctgccctcacatcctggggcagcagctggacagccattagacctcagtgccagggcactcttcctccagctgggatctcagtggctcccagctgcatgggctcctgcttgtgtgttccctcctccgccatcctctgttccccgcacctcccttattctgctcatgtctggggtattcacttggctcctcagcaaggaagcaaacgccttggaggagaagcacatggttgcccttttgtccttgctccctggctagggaaagctgctagtggtcagcctgttttgcctttttttaaaaaaaaaaaaaaagccagggcagggtgcttagattttaaaaatttgcgtgtcatttgcacaaattttcatatcaagctaagtcctgattccaaatttgattatattccaaatttgattatattccaaatttgattatattcagattcaaccttgaggacattagaaatatagatggcttctgtatccaaatctgaatggaaatgagattacccttctgggttcagatacccctcccaagcccccgtcttttctgtaaccacccctcctctgagccccatcatggctggggttggtatggaatgggagcagctctgtatctggggaagtcctccagcctcaccttcttggctcttaagtggtaggctgttaccacttgccagcctgggcctcctctctccccaccctttcacaaggcaggctgcccttccgcactcactggcccatcccttctttctcatcgtcccacccttccacccccgtgcatggctgctgtaggtctggtttttttggtttttgttttttttaagacggagtctcactctgccgccaggctggagtgcagtggcagaatcttggctcactgcaacctctgcctcccaggttcaagcgattctcctgcctcagcctcccgagtagctgggactacaggcacgtgccaccatatccagctaatttttgtatttttagtagagatggggtttcaccatgttggccaggatctcttgacctcgtgatctgcccgcctcggcctcccaaagtgctgtgattacaggcgtgagccaccgtgcctagccaggtcttgttttgaaaacctcactgtgggagattcaggcatcctccctaagccagctggccgctgtgctaaagcctgttcagagttaataataatcattagctgaatggtgctggggcctttcagcttcagatctctaagcacttgcaggctgagtcagtcagccctcaccttccccctccttcctgggctgcagagtgtaacagaatgggaaggcactgtgggaaggaagtcaggaatcttgctgctagccacgccttgcagtgacttctcgtctgggagtgggcactgagtcctctcagtaaactaataagacttgcacctgacaaaggtcaagatatgtagggaacacagtgtatgctaggctgagacctatggtggtggcaggggtggctgttgagcctgaacttccagtactcctgcccttccttctgtttacctggcttggcctacagggggcacccctggtcttgatgcctcaagcccagcatttctgggtcccctctgcaagctcagagagcagggaggcttctggtagtgctcttgatgctcctgtgtctggttggcacaaagatcctgtgtaacatgaaatgaaaggtgcatcagcttgggggctgggaaacctgcagtatgggtttactccgtccctatcactggtgtggctgtgggcaaaccacttattgcctgacctacctcacagggatgttgtgagggtttgatgagagaatgaatgttaataggaattggaaaattcaaagcattaaacacatgtaaacaggtggtattattaaaaaaaaaaaa

SEQ ID NO: 287 - DNA, 4213 bp, Homo sapiens
cttcctctctcttctagcggcccgccctccctcctccctctccctcccctccccactcccttcccctcctctccaggcctgcgcgcgcgcctcttcctccggcacgcgccgctgctagccgagcactctcgccagaacctctggctcgcgcgtgccttttcccctcaggttgtggggagagcggaatcctgctccgccgtcgcagcagcagcggcagccccggcagcctcgggcgacagcggcggcgcgcgagcccccgggcggaccgtaccaccgctcgccagcacgcagggggagccgcccgtctcgccgcgcacgcctcggcgaccccgcggggctgaggcgtcgccgcgcccggcagcgtgagcgcagagccggcctcgaccccgagctcggagccccgcgggccgcgcccgccgccggccccacccatccgggtcgaggaggccgaggccatggctgagacggaggagcggagcctggacaacttctttgccaagagggacaagaagaagaagaaggagcggagcaaccgggcggcgagtgccgcgggcgcagcgggcagcgccggcggaagcagtggagccgcgggtgcggcgggcggcggggcgggcgcggggacccggccgggtgacggcgggaccgccagcgcgggggctgcgggcccaggggccgccaccaaggctgtgacgaaggacgaagatgaatggaaagaattggagcaaaaagaggttgattacagcggcctcagggttcaggcaatgcaaataagcagtgaaaaggaagaagacgataatgaaaagagacaagatccaggtgataactgggaagaaggtggaggtggtggtggaggtatggaaaaatcttcaggtccctggaataaaacagctccagtacaagcacctcctgctccagtaattgttacagaaaccccagaaccagcgatgactagtggtgtgtataggcctcctggggccaggttaaccacaacaaggaaaacaccacaaggaccaccagaaatctacagtgatacacagttcccatccctgcagtcaactgccaagcatgtagaaagccggaacaggtacttaaaatgaatgctacctggaattaaatgactacatatggcacatctacatcttactttagggacatgaattttttaaaataaataaaatgggaagaaatgtaaatgacatcagatggaaatgtgttttttggggtggcttttagaataaatcccagccttttcaccactttgagagcacagctggcttgaatttaaacctccacgtggacttgctcctctgctctgtcttaaaaaatgtgtaagggaccttgggagggcagtgattcaccacactcgagtttctttacctgatctaatcagatccactcccacaaaatcgatgtgaggagaaatcattgactaatgagtagaatttacttgaatgagaaaattgttacccttgtgcataaagagagagatgtattatctattacttgctaaaagtaagagtcttaggaggaatgtcattacacagcttttaacagttttcttcaagtttgtcctgaaatagggtcacagttaatactgttcagtagaagataggaccctagagcttcaatacagcgttctgtgttttctgtttgaattgaagccttaaaatggtttgataaggattttctatatgcctccactcctacccctccccaggattcttctaaggggtggcttttttttaaattcaaggacgaatattttcaaaaaccctagtgaagaagaaatatttactgattacatttcttttcccttagggataaagaaatggagaagagctttgaagtagtaagacacaaaaatagaggtagggatgaggtttcaaaaaaccaggcccttaaacttcagctagacaaccaatatgctgtgcttgaaaatcagaaaagcagccactcacaatacaattaaggaatgggctttgctaacccttctgaggtaactagactgcagctaaccaccaccaacagccattcatcatctgatctctgctggatctacagacaccgatgcagaccactcgatttcatgaccggccctattgcactatggaagttaaagtgtcacgactgctctatgcatattggatttaggggaattttcattgttacataaatgtgtgaactagtttcaacagtgttctttcatatttactctgcaaatacaaaaaaccaaaacctgcagccagtggtcatttcaaaatctttttatgttcagatactgagccttcataagggttgactacctcagatttgctgcactcattgtggacttcatgtggatcacaacttctggataagaagattacaactattaagtgtcgatgtgaaccttgcaaccagctctactggattcttatcagaaatcctgcataaaaagtcagccatctgggttctgatctgctgtaaaagatgaagatttaagtgaccttaattaacctgtcctgtgccctacccttaaggaatactctctgtagtaggctgttgttatattagacttcctggaacacactgctgaaaagaactgatgtgttcagatcatctgtgtagggctgtgatttgtaatttaaactaattgtattctgaggtaaccacaaaataaattcaaccaaactggggtccaccaagtgggggaaggggaagggagagaataatcttgggggttttttttttttggtaatttttttatttggatagtgcttttttgttttgtttttgttctgcattaaggccttttttgctttgacttgaaataagttctttgacagagcatattgcttggttaattaagtaacctaaagtatgcattaggattgtgaaatgtctcgtgagtatgccaatcctgagggtggaaccaaatagcctttgatgaaaagggcagtggattctggaggctctacttcaggtgctgctataatgcctcatctaatcaggactaaattgtgtaggaaactgcagtgggaagaatatgctttctgctcaggctaagagggtcactgatctgtccttagaaattcagagtaacatgagcaaaacctcagctaaaacccatttaagtggcatggattgtgcatgatctttgataagaattcctcatgtacttgtgcctagtttttcaaggtattggctgttctatagatgcagtgattgtcccagctagctctgttaccagccttttggtgtgtctttatgttcatttggagagtcagggcgaaagacaggtgatgtagcacttctgtttttaataattattgcttaaaatacctattaatagttttgggtcatttaaagggacttgaggaagctacccaggattacagaagagtgtccacctaacaagatggtctggcagtttcctagttttgtatctggttcaatagaaatatgtgaaagtggtaatgtcatcatttgatgcagagtccgggtttctctataataaatccctttgccaaatgcatgagttgcagacttgctactggcaagagtgaagcaagtgggtgagtaaaactattttgacgtgggagcgttttcagataggagtttagtcttgacgaaagtgtccgtgcaggaattggactccgaggagggttacagtatctcctgacgggacctgccactcgcatctgggcaatgttgacatttgaggtggcaggcaggatgcctgccttctaatatatttgggtgagtaactgagccagccaagggaaggttgaatgattaaatcagaaatgggattcttggtaaactgaagacttttatttgggaatgaaaaaccttaaaaaaatctcttcatcgttgaactgtgcattttccctgcattttttcccaacaaaattttgttgggggttatgttactgaagaatgaacagatgagtaagtggaggtgttatgtaaaggcatattgtactcgaaatctgaagacctgcagcagatttaaattacaactcttgttataactttttaaaagattgtgaaaatatcaaaatataaatgaatcaagttttaatatactgtatgatgggtggatgaggctgtccattgtaccatttgtttgaattctcaggcatggtttggcagtgcaagaattctgtaacattaacaaattcaataaaaagtaaatatatggattttggactgtaaaaaaaaaaaaaaaaaa

SEQ ID NO: 288 - DNA, 7766 bp, Homo sapiens; identical to SEQ ID NO: 8

SEQ ID NO: 289 - DNA, 2825 bp, Homo sapiens
ctctgcacaggagcggacgcgggagcccctccgcacccgtcccctcccccgggtcgccttcgcctgcccccggggcgaggctccccgcgcgggttcgcgtcgcgtctgcagtggccgaggctgctgcctgccgggcagatgggtccgccttgttccggctgcagctttcgccgccggggcttgctggctgtcgggaactagtcaactggagtttttgttgacttcccacggaaacatgccctgaactgtcacagaatgaaaccagcgctcttcagcgtcctgtgtgagatcaaagagaaaacaggtctcagcatcagaggagcccaggaggaggaccctcccgatccccagctaatgagactggacaatatgcttttggcagaaggggtttcaggtcctgagaaaggtgggggatcggcggcagcagctgcagccgcggcagcctctggaggttcttcagataactctattgaacactcagattacagagccaaattgacccagatcagacaaatctatcacacagaactggagaaatatgaacaggcatgtaatgaatttactacacatgtgatgaaccttctccgagaacagagtagaacacgtcccatttctccaaaagagattgaaagaatggtgggcatcatccatcgaaaatttagttccattcagatgcagctcaaacaaagcacttgtgaagcagttatgattttaagatcaaggttccttgatgccagacggaaaaggcgtaacttcagtaaacaggccacagaaatcttgaatgaatatttttactcacacctcagcaacccctaccccagtgaagaagccaaagaggagctggccaagaaatgcagcatcacagtgtcacaggtatccaattggtttggcaacaaacgaatcaggtacaagaagaacattggcaagtttcaggaagaagccaacctctatgctgcaaagacggccgtgacagctgcacacgcagtagcagcagctgtgcagaacaaccagaccaattcgcccaccacaccaaattccggttcttctggttcttttaacctcccaaattctggggacatgttcatgaacatgcagagtctgaatggggattcttaccaagggtcccaagtcggagccaatgtgcaatcacaggtggataccctccgtcatgttatcaatcagacgggaggctacagtgatggccttggaggaaattcactgtacagtccacataatttaaatgctaatggaggctggcaggacgcaacaactccatcttctgtgacttctcctacagaaggcccaggaagtgtgcactcggatacctctaactaatctctggccacacttttccctgagctacatgccttgataagtgcattcagagcaataggaggaaaaggaaagcgtttttgtagcccaccatctacagctttactgtaaaaccttgtcttattcgagaacttggtaaatctgttttttaaggaatcataatcatttgtatttatacttaaaaacacacaatgttaaaaaaaataaagcactttatccaattaggccaagatttaacattgttgacagtcctgtagctattttatcataatttattatcaatattttacattaatggtttcacagttgccaattacttggccttaagggtaaaaagtacaatatacactaaacctcaaccgttaaagcagatgcaaaaattcacctcacctaaattgaacttcttgcatatttccattactgacttggattgtctttctttcatatcactaatggagttggaataaagagctgtttgcctatccctgttaatgatggttgtgtttaagaatcttcctcgtcacgtttgtgttcagatctcttatgttataattagatcagagactggtagcatcgtttctctctctgaaagcaccagtgcccagagtctgctcggtaataaaattatggatccagattgttctgagagacgaagatacttgctgctgatagaggtgaaaacgagattgatccgtctggggttttacggtgtgcactgggtgctgcacagacttgtcaaggtttgctacgtcctctgggcatctgcaaaaggccctgctctctggagtgttgtatatagtgtagcaaaagagtatttatacatcccaccaatcaaaacacagctttattacctcatgcgaactcatacaaaccaatagaatttcaacatgttctgtagcttagagtgctcacttactacctctgaacaatactcacgctgtagtttgtctctttcttatctttttgcatcttgtaattaactctttgtttcccttcataaaatgtaatgtacattgtaatcttttaaaagaaaaatcagggttgcacttgcaacttttaaaaaaccgagtgtggaaacattgggtcttaattcaacacaggatcggtaaaactgttgtaaatactgagaaacattttgaatgttcttcatcttattactaatccatgcaaaaaaaaaaaaaaaagcagcgactaattgtgatgcattcagatttcagtattcagtactgtatatttcaccctgtgtaatggggccccctctcctttctctctttttgtattgtatgcgattctgaaactgattgagtcatgaaaataatttgtggcggtgattctaatgtattaaaaacgtttcgtgttcctttctaactggattacaccctggattgaaaaagtcttcctcgtggtagttatatgtagtttcaaacatgaataaactttttgctttcatgattaaaaaaaaaaaaaaaaaaaaaaaaaaaaaaaaaaaaaaa

SEQ ID NO: 290 - DNA, 6954 bp, Homo sapiens
aagctcgggcgggggagcggggcgcggcgggaaggagcgggcgacccggtgtgtgggccagcggagctccggaagccagttgagggaagttctccatgaatgtacgtcacaatgatgatgaccgaccaaatccctctggaactgccaccattgctgaacggagaggtagccatgatgccccacttggtgaatggagatgcagctcagcaggttattctcgttcaagttaatccaggtgagactttcacaataagagcagaggatggaacacttcagtgcattcaaggacctgctgaagttcccatgatgtcacccaatggatccattcctcccattcatgtgcctccaggttatatctcacaggtgattgaagatagtactggagtccgccgggtggtggtcacaccccagtctcctgagtgttatcccccaagctacccctcagccatgtctccaacccatcatctccctccctatctgactcaccatccacattttattcataactcacacacggcttactacccacctgttaccggacctggagatatgccgcctcagttttttccccagcatcatcttccccacacaatatatggtgagcaagaaattataccattttatggaatgtcaacctacatcacccgagaagaccagtacagcaagcctccgcacaaaaaactgaaagaccgccagatcgatcgccagaaccgcctcaacagccctccttcttctatctacaaaagcagctgcacaacagtatacaatggctatgggaagggccatagtggtggaagtggcggaggcggcagcggtagtggtcccggaattaagaaaacagagcgacgagcaagaagcagcccaaagtcgaatgattcagacttgcaagaatatgagttggaagtaaagagggtgcaagacattctttcgggaatagagaaaccacaggtttctaatattcaggcaagagcagttgtgttgtcctgggctccccctgttggactttcctgtggaccccacagtggtctttccttcccctacagttacgaggtggccttatcagacaaaggacgagatggaaaatacaagataatttacagtggagaagaattagaatgtaacctgaaagatcttagaccagcaacagattatcatgtgagggtgtatgccatgtacaattccgtaaagggatcctgctccgagcctgttagcttcaccacccacagctgtgcacccgagtgtcctttcccccctaagctggcacataggagcaaaagttcactaaccctgcagtggaaggcaccaattgacaacggttcaaaaatcaccaactaccttttagagtgggatgagggaaaaagaaatagtggtttcagacagtgcttcttcgggagccagaagcactgcaagttgacaaagctttgtccggcaatggggtacacattcaggctggccgctcgaaacgacattggtaccagtggttatagccaagaggtggtgtgctacacattaggaaatatccctcagatgccttctgcaccaaggctggttcgagctggcatcacatgggtcacgttgcagtggagtaagccagaaggctgttcacccgaggaagtgatcacctacaccttggaaattcaggaggatgaaaatgataaccttttccacccaaaatacactggagaggatttaacctgtactgtgaaaaatctcaaaagaagcacacagtataaattcaggctgactgcttctaatacggaaggaaaaagctgtccaagcgaagttcttgtttgtacgacgagtcctgacaggcctggacctcctaccagaccgcttgtcaaaggcccagttacatctcatggctttagtgtcaaatgggatccccctaaggacaatggtggttcagaaatcctcaagtacttgctagagattactgatggaaattctgaagcgaatcagtgggaagtggcctacagtgggtcggctaccgaatacaccttcacccacttgaaaccaggcactttgtacaaactccgagcatgctgcatcagtaccggcggacacagccagtgttctgaaagtctccctgttcgcacactaagcattgcaccaggtcaatgtcgaccaccgagggttttgggtagaccaaagcacaaagaagtccacttagagtgggatgttcctgcatcggaaagtggctgtgaggtctcagagtacagcgtggagatgacggagcccgaagacgtagcctcggaagtgtaccatggcccagagctggagtgcaccgtcggcaacctgcttcctggaaccgtgtatcgcttccgggtgagggctctgaatgatggagggtatggtccctattctgatgtctcagaaattaccactgctgcagggcctcctggacaatgcaaagcaccttgtatttcttgtacacctgatggatgtgtcttagtgggttgggagagtcctgatagttctggtgctgacatctcagagtacaggttggaatggggagaagatgaagaatccttagaactcatttatcatgggacagacacccgttttgaaataagagacctgttgcctgctgcacagtattgctgtagactacaggccttcaatcaagcaggggcagggccgtacagtgaacttgtcctttgccagacgccagcgtctgcccctgaccccgtctccactctctgtgtcctggaggaggagccccttgatgcctaccctgattcaccttctgcgtgccttgtactgaactgggaagagccgtgcaataacggatctgaaatccttgcttacaccattgatctaggagacactagcattaccgtgggcaacaccaccatgcatgttatgaaagatctccttccagaaaccacctaccggatcagaattcaggctataaatgaaattggagctggaccatttagtcagttcattaaagcaaaaactcggccattaccacccttgcctcctaggctagaatgtgctgctgctggtcctcagagcctgaagctaaaatggggagacagtaactccaagacacatgctgctgaggacattgtgtacacactacagctggaggacagaaacaagaggtttatttcaatctacagaggacccagccacacctacaaggtccagagactgacggaattcacatgctactccttcagaatccaggcagcaagcgaggctggagaagggcccttctcagaaacctataccttcagcacaaccaaaagtgtcccccccaccatcaaagcacctcgagtaacacagttagaaggaaattcatgtgaaattttatgggagacggtaccatcaatgaaaggtgaccctgttaactacattctgcaggtattggttggaagagaatctgagtacaaacaggtgtacaagggagaagaagccacattccaaatctcaggcctccagaccaacacagactacaggttccgcgtatgtgcgtgtcgtcgctgtttagacacctctcaggagctaagcggagccttcagcccctctgcggcttttgtattacaacgaagtgaggtcatgcttacaggggacatggggagcttagatgatcccaaaatgaagagcatgatgcctactgatgaacagtttgcagccatcattgtgcttggctttgcaactttgtccattttatttgcctttatattacagtacttcttaatgaagtaaacccaacaaaactagaggtatgaattaatgctacacattttaatacacacatttattcagatactcccctttttaaagcccttttgttttttgatttatatactctgttttacagatttagctagaaaaaaaatgtcagtgttttggtgcacctttttgaaatgcaaaactaggaaaaggttaaactggatttttttttttaaaaaaaagaaaaaaaaagaagaaaagtataccagataccaaaagctagctttcttatgttttcctttaaattttcagatttaccttcattctgttttcactgatgtcttttgcaagcctttgatttttttttttttgttacagtttagtaatttatattcaccagtcacttcatatgtcttgaacatctgtatctgtaaacatgaatcaccgtgtgtgtacttacagggctaggatttcagtgttgtcagagtattaccacacagcaacagcaacatacagaagatatgttcactcagataagactgccctaaacaaccattttgtcactcagttatttaactgtgtttagctcatttaaatcaaaatgtgtactttaatctaaaatgttttaataatctgtatttcttataattttaacactatgagctgcctgtataagaaatcaagtaaccagaatgcacctataaattatggagcattgtagattttaccacatcaattcatagcagtaactttaagagggcattgtgcaatagttagttgttttcttgttcagctattttaaaggctgctttaacttgtttgtttgtctttgtatataactacttctaatctaatcactagagttattatattctgttatgtttgaccagaattatatgacaagaactggtgacagtttagtgcctctgcccattgtccatgatttacactaattgtgagcagtcttcttatgtgtcagctcattatttttgaaacatttgcctttaggctgttctttgaggtatcaatgaagtgattgaatttcaataccttaattcagtgcacataatactaatgtaacagcagatgaaaattgataaaacccaaaagagagtcatctaaatttgtagttcctatttctgtgggtttgcctggccatggttggagagggaatggtgtttgatggtaaacacagggtgtttggggatcaaggagcctagattctctccctggatctgtcactaacttgctgcgtgacctgaacacgtcactttacctctctgtgcctcagttttcccatgcatgaaaaataaaataaaataaaacggggattctaatgtttgtaagtgctttgagatctttgaccaacaggtgctattggagtgcaaagtgttactcttacgtgtttattttgagtcatgagataatcaattttaacccaaagtcattggattatttatatgaagtccataatgttcgagtacctcagggacatttaagagttggaggtgcaaatatattccaaaagggtgcaacagacacagtgtatccccctgcttctgtttttgtatatttttgctacttggtttttcttgatcatagctattttgtgcttgatctttattgtctaagatgcagtatcctgtactagcttataatattcccataccaaagtcatggggaaacaaacattattttgtttttggtttatttatactatattctgcatacagtactttaaatgccaattacagtgcaatctttatttattgtaaaattttttaagtgtacttatgtactaattttcccttgtagcatgttatatttttgtgttttatacttttgtaattttaggtcagtcttgttccttggcaacatctgtagtattattaatcttctgacattttcttatgtttttaaaaagataagagcatctagtgcattaaatgccaaaaaaaaaatacattatcagtgattgaaacgtttacatgtacccaaaaaccataatcatctcttggaagaaaatgctgagatcaatgaattattctgtgtgcctatattgacgtagtgagtactagagagttctgtattttattattgactataataattagtttaattagctttgcaaactgatggcatcaaggtaaatatatttttgccaaagttctggccttccaaaactcacccccttatttaaatgtgtgctatgacccactatgaccacagcatctgcattttctaaaaaattccatgcaggtgttttggggagaggtattttttaagcaatgaaaattcaactgagtacaaagccccctcttggggggttggggaagtctcttttttgaaacacttcagaactgctgctataaagaaattctctaattggttgaattttttttttaagtaaatagtactttaggccaaaatttatatgaatatttgatcttcttgagattttcatactatcatttaaccaccaggaagctgaagtgtgtgaagtacaaagctgacagcactttattttattgctctccattatttggtattcattatattccttcagtcagaaaattattactctctatggcactgttttttatcacaaatatgtatatgtgatattgatatataactatatatattgccatcacacacgaacaataaaataaagtgttctattaacctgatctctttgcccttttgctatgtgaggagtgaatgagtggccttctgatgctctgactcttctctgtatgtcaaactcatccctggcacaagaaattccagtcatgtgaagcaaactgccctttgtcctcaaagaaattgttgaaaaagaaaactttttaaagagattttttgcatattctctgccttgttcttatcaacttgaaatgttggcattttctaaccttgttttgttggctacaataattcagtattcatgtcaaaattgagaagtgccctaattgaatgtgtttgaatgttatccttgcacaattctttaaattgaaagataaaatgttttacctcactgttggacatacattccaagcttttcaactctaggagaaaaagaaaatcatgttttcctgtattgtaaattttagactatttcatatacattgtattaaaactgccatatcaattttaatgtatagattttgcaaatattatgctatatgtaatacctaactgtatctgtagtgtatatgtaatatatttatgcccaataaatgttttaattctttctgacttaaaaaaaaaaaaaaa

SEQ ID NO: 291 - DNA, 3250 bp, Homo sapiens
accagggtcccggctcggggtccgggctggggaggggaacctgggcgcctgggacccgccgatgccccctgccccgcccggaggtgaaagcgggtgtgaggagcgcggcgcggcaggtcatattgaacattccagatacctatcattactcgatgctgttgataacagcaagatggctttgaactcagggtcaccaccagctattggaccttactatgaaaaccatggataccaaccggaaaacccctatcccgcacagcccactgtggtccccactgtctacgaggtgcatccggctcagtactacccgtcccccgtgccccagtacgccccgagggtcctgacgcaggcttccaaccccgtcgtctgcacgcagcccaaatccccatccgggacagtgtgcacctcaaagactaagaaagcactgtgcatcaccttgaccctggggaccttcctcgtgggagctgcgctggccgctggcctactctggaagttcatgggcagcaagtgctccaactctgggatagagtgcgactcctcaggtacctgcatcaacccctctaactggtgtgatggcgtgtcacactgccccggcggggaggacgagaatcggtgtgttcgcctctacggaccaaacttcatccttcaggtgtactcatctcagaggaagtcctggcaccctgtgtgccaagacgactggaacgagaactacgggcgggcggcctgcagggacatgggctataagaataatttttactctagccaaggaatagtggatgacagcggatccaccagctttatgaaactgaacacaagtgccggcaatgtcgatatctataaaaaactgtaccacagtgatgcctgttcttcaaaagcagtggtttctttacgctgtatagcctgcggggtcaacttgaactcaagccgccagagcaggattgtgggcggcgagagcgcgctcccgggggcctggccctggcaggtcagcctgcacgtccagaacgtccacgtgtgcggaggctccatcatcacccccgagtggatcgtgacagccgcccactgcgtggaaaaacctcttaacaatccatggcattggacggcatttgcggggattttgagacaatctttcatgttctatggagccggataccaagtagaaaaagtgatttctcatccaaattatgactccaagaccaagaacaatgacattgcgctgatgaagctgcagaagcctctgactttcaacgacctagtgaaaccagtgtgtctgcccaacccaggcatgatgctgcagccagaacagctctgctggatttccgggtggggggccaccgaggagaaagggaagacctcagaagtgctgaacgctgccaaggtgcttctcattgagacacagagatgcaacagcagatatgtctatgacaacctgatcacaccagccatgatctgtgccggcttcctgcaggggaacgtcgattcttgccagggtgacagtggagggcctctggtcacttcgaagaacaatatctggtggctgataggggatacaagctggggttctggctgtgccaaagcttacagaccaggagtgtacgggaatgtgatggtattcacggactggatttatcgacaaatgagggcagacggctaatccacatggtcttcgtccttgacgtcgttttacaagaaaacaatggggctggttttgcttccccgtgcatgatttactcttagagatgattcagaggtcacttcatttttattaaacagtgaacttgtctggctttggcactctctgccattctgtgcaggctgcagtggctcccctgcccagcctgctctccctaaccccttgtccgcaaggggtgatggccggctggttgtgggcactggcggtcaagtgtggaggagaggggtggaggctgccccattgagatcttcctgctgagtcctttccaggggccaattttggatgagcatggagctgtcacctctcagctgctggatgacttgagatgaaaaaggagagacatggaaagggagacagccaggtggcacctgcagcggctgccctctggggccacttggtagtgtccccagcctacctctccacaaggggattttgctgatgggttcttagagccttagcagccctggatggtggccagaaataaagggaccagcccttcatgggtggtgacgtggtagtcacttgtaaggggaacagaaacatttttgttcttatggggtgagaatatagacagtgcccttggtgcgagggaagcaattgaaaaggaacttgccctgagcactcctggtgcaggtctccacctgcacattgggtggggctcctgggagggagactcagccttcctcctcatcctccctgaccctgctcctagcaccctggagagtgcacatgccccttggtcctggcagggcgccaagtctggcaccatgttggcctcttcaggcctgctagtcactggaaattgaggtccatgggggaaatcaaggatgctcagtttaaggtacactgtttccatgttatgtttctacacattgctacctcagtgctcctggaaacttagcttttgatgtctccaagtagtccaccttcatttaactctttgaaactgtatcatctttgccaagtaagagtggtggcctatttcagctgctttgacaaaatgactggctcctgacttaacgttctataaatgaatgtgctgaagcaaagtgcccatggtggcggcgaagaagagaaagatgtgttttgttttggactctctgtggtcccttccaatgctgtgggtttccaaccaggggaagggtcccttttgcattgccaagtgccataaccatgagcactactctaccatggttctgcctcctggccaagcaggctggtttgcaagaatgaaatgaatgattctacagctaggacttaaccttgaaatggaaagtcatgcaatcccatttgcaggatctgtctgtgcacatgcctctgtagagagcagcattcccagggaccttggaaacagttggcactgtaaggtgcttgctccccaagacacatcctaaaaggtgttgtaatggtgaaaacgtcttccttctttattgccccttcttatttatgtgaacaactgtttgtctttttttgtatcttttttaaactgtaaagttcaattgtgaaaatgaatatcatgcaaataaattatgcaatttttttttcaaagtaaaaaaaaaa

SEQ ID NO: 292 - DNA, 2224 bp, Homo sapiens
ctcagtgcgcgtgcgcggggcgggcgggtgcgcgcgcacttcctcctcgcccccacccagacccagaaggcgccaccatggcggcgcccccgcagcccgtcacccacctcatctttgacatggacggacttcttctgggttatacaggaagcatagtggcagctgcttcgggggagtcctcaagaggcttacaatcacggtggacggatactgaacggctgtattcagtggtgtttcaagaaatatgtaatcgctatgacaagaaatacagctgggatgtaaagtccctggttatgggtaagaaggcattagaggcggcacagattataatagacgtcttgcagctcccgatgtccaaagaggagctggtggaagaaagccaaacgaagttaaaggaagtgttccccacggctgcgctcatgccaggggcggagaaactcatcatccacctgcggaaacatggcatcccctttgcactggccaccagctcggggtccgcgtcgttcgatatgaagacaagccgccacaaggagttcttcagcttgttttcccacattgtgctgggagatgaccccgaagtgcagcatggcaagccagacccggacatcttcctagcttgtgccaagaggttctctccccctcctgctatggagaagtgccttgtctttgaagatgctcccaatggggtggaggcggccctggcagctgggatgcaggtggtcatggttcctgacggaaacttgagccgagatctgacaacaaaggccaccctggtgctgaattccctgcaggacttccagcccgagctgtttggtttgccctcctatgagtgagagggagggcctcagtcttccgcccccagcccactctcatggtccacactgctgggggaaagggaaaggaaatcagcaactcttcaatcccaacctgcgctgtgattttagcctcctgagattggagtttccatcccatgttggtttgtcccagtctaacgtgttgataaaatgtgacttgacggttgagacaaaaaatacagtagagacagaaacgaagcccagaacaaagatgaaacttgaattaccatctcagaagtcaagctgatggagtatgtgataaagtgaatgtacatgtatatacacacacacctccatatatacatgtgtgtatcagtttggtaatatgcaggtaggcattacatgcatatgtatgtagacatatgcatgcatgtatatgtaaaatatatacttttccaagacaaaatggaacatcacttctctcttctagtttttctgaacactggctgggaaatgtaaactgtgtatgcatataagtatatgctttatgtatgcatatgtatgtagatatgtttatatctatcgtctgcatcactctcctcagtgttgatgtcaacatgcaatgacaactgataaagcgagatggtagttctgcctggtttgcagtctgagtgggaaagtcctgtttttgatgagcactccttgttagctaacatttaaattctttttgtgacctcagaatgtctctggatctttcctcattgactgactctgtgccacgtcatccatagtttattgttagtatgaacacaactgtaacatttacctggtatctacatccttacctgcattggaaaatgtttgctacctcacaacaaccatttgcctcctttaagaacactgatgggctgcactttttggatagaaatagaatttgatttcagaatgtatgcttggtgagtctcagtgcccaggaacacttttggaataatttatcagacattgaacttctgtgattaatcgcttttatagatttactcagtctttaaaattcgtctctgatttgccagagaaaaacggtggtagccatggaaatcgggagtgaaggagcactgcttcattgtggctcagcccttcctaggggcctctgccctttgatgtccttgagctactcttcagctctggaagttgtggacaaaccgtaggaatgtatgtgtgcgtgtggtggagtgattgtctgtgaatgacaggccctggctattgattgatgttgcatcaatttagcaaattcatttcctcattcttgatggcctgaatatatgtctgcacttttaatgctcctcttaaccagttgtaacatcttaccatttccctaacaaattgaattagtttaataaaatcttttgacacatgttaaaaaaaaaaaaaaa

SEQ ID NO: 293 - DNA, 4710 bp, Homo sapiens
ctccggggcgatgagggactagaggcgccctgaggcccgcctgcctcccgcgctctggccaccccggcgggaaaaggatcgggcgggcgggcggtcccacagtgcccgcctttgcgccgccccaccccctgggggcgctgccgagggggcgccagccgcccatgccgccccggcgcccagccgcgcctggcgcccgccgctgaagcgcaggacgcgccgccgcccgcgctcaccgccgtccgcgccagccgccccgagccgactgcccttctgcccccaagatgtggcacagcgtcgggctgactctgcttgtgttcgtggccacgctgctgatcgtcctgctgctgatggtgtgcggttggtattttgtatggcatctttttttatcaaaattcaagtttctccgggaactggtgggagacacaggatcccaagagggagatcatgagccttcagggtctgaaactgaagaagacacttcctcctctccacacagaatcagatccgctcgccaaaggagggcacctgctgatgaaggccacagacccctgacatagtcctgtacttgtgaaggatgaaaaggcagttgccagcttctgtcttttactgacttcgctttgaaatttactaatgactgaagaacatttgtattggattttaagtcgaattttaaaaaagatttacatgtaagccatataaaaataaagggaactgaaaccaaattggactattataaatttcatcttaaagataatcttttgtttcaccagctttctacttatacacttattccttggcttttgggcttattttcttgcactggtgcagatctggtaaacattaaaggcttgaaaaaccatattttgttagccctaaaatgtacatttttcttcccattttaacttatctgaaattgggatgcatctcattactgtcaaccaggtgatagtcatgtaacgctcctaccgtgtgcatgtgtgaatttacagcttgtcatcgtgtcatccctttaaccaacatgtgttttgttggtatcaaatgtgtcaggtttaattgacattttaaaatgtcttcaaaaagatcacactatgattcagcattgaaacgaaaagttattgtgtatgcagaaaagcatggaaacagagcagcagggcgtacatttgatattagtgaagcaaatattcgtcgctggagaaatgatcgcaattccatattttcctgcaaagcaacaacaaaatgttttacgggacctaagaaaggtaggtacccacaagtagatgaagctgtactacgtttcgtcagtgagacacgtgcaaaaggattgcctatcacacgccaagcaatgcaattgaaggcaggagaagttgccaaaaccctaggaattgatgaaacaaaattcaaagccacaagaggctggtgtgaccgattcatgcgtcgagcaggactatcattaaggcatcaaacatcgttttgtcccaagctccccactgccattaaacagaagacagtgttggagcactctttcaagaagtgctgcataaccagtactcttgacaacaccgggagagacgttctgtggaaaaatgcagacatcaatgactgtggtttgaaaagtgattcagaagagttggattcagaatatgaagttataattataacttaaccaatttatttcacacattttctttacatatgcacaagattgatgtgataaaaatctgtttaactcaaagcgctgtttcaataaatataaacattttctgtgatatgaaagcattgtgtcatagtttaatgggcagtgttttttcttagtgatacatatggtgcatcttaacaattggtagtgtcttaggttaaattaaaaatggtagcttgtaaatttatttttctttttaagatagcagttatttattggggaatttgattctgactcttacaatgttaaacttgtaatcctgtgtgaaacacatgtttttgggggggagggggtaaccaagatttcagggtagtaacttaggaatctaagaactatcttctactttaggaagagtgggattagttactccctttgtataggaggactttatgctcaaggaatgtgttgtggagaaaaacacttcttcacaaacaattcagtgacaagacctcaaaggtaatgcgtattgaggaaaacagtagtgggtgaaaattcccgcttagctgtaaaatgactctcttgccaggtttccgtgtttgtctcaactgaactctgggctgagtgtttaccagggagaagagatgtgaattaaacaaccttcctgtttagtgttacctgctttgtacaagaatgaagtgcaaagccaacttactttattaatccaagttctttttatgtttttcttaacctttattaaggactagtcatcacaaaatatctatttaacctctattttatgatggtgtgttattatgtttgatacctcatacttcttgcttagagttttgtttaacagttcactggctctgtcccaatgtttgtgatgaacacctttttgctatattgtagctcttggagatactaaaagagaattcacagaacataactttagttttatgtgtttgctaggggaagatttcctagcagctgagagcaaggcacagtctctgtcttcatttctttattagatacaattttctatttttatgtgactctagggcataacaaaacagtgacagtttcaagcgttaattttaatgcttcctactagctaaatatcatcttaaaatgattatcagaaaaaaaaataatgcccccaaaaacttttgggggcattatttggtactgggaggatatttaaattagatttttcatagtctattgttttgaactatggattctgttttatggtggatacctaaggtttatataatagttgctggaaaacttaaagtagctggtgagcttcctgttatgtcactattaaagaatgatggctgatgtaactctgcccctgaaatctacaagggtcatgcccaaattaatacaggttaacctttgtagaggtatatatgttggcattatttattgacatttatgcttcaagcatgtcttattttatgtaattttaagaaatactctatttaacttgtgaaatatacctaaaagcatactagttagctcttagactctcacttagggagggtaaagaaacatcactgatgccaatatgaagatctataaacaaatcctttgtttagaacttttttctcttcgtgcacctcacaacacacttaccatggtacatatttcttaatgccactaagaaaggcaagatagtgaacgcagaattatttatgtggtatagtgtttgttttcctgttttagtgcttttgtagctaaaacttactggaactgcatcacaactacatttgcagtctcagtgggaggtggactagcctgtggttaattttagagcttaaaagtttataagcattaaaaacacatacatgtattagaatcttgtctaacccctcacaaaggatgatggtgatcagcatgccatcttttgaagattaattctaaaattgaggactctggtaggttgttttatttccttcccaaccagccattcatttccaattgttctgcctttgaaactttttgtgaaaattgcctgtaccaattgcattggttgcgttgctctgatttaaatgccaaaaacactaaatatttgtgtagtgctgttaaatgaggtttttgatatttccatcaaaatgaatataaaattcacttgatggattttgtagtgatgttttcacagttgaaacaaacatattgctgtgcggtggacagccacttcacagacatgcagacccatttctttagagatattaggtttaaaacccattttaattttattttgctgaaggtttggaatatataaagtaatggattcacaaaatatgatatcttaaaacatgttgaaagatttgaaagtggtgcatttttacttttaagagcagcaatctttgaaattagtcaacaatgcagtcttttttaaaagtcagttttctcaagtagtatgttgtaacgtaagatgtaactgatataactagattttgactggtaaacttaaagtgctttttatatttgaggttgactttaaaaagccattgagcagtcctcagaggttatggactctcaagcgactaatggaatagtgttctgttgtgaagtctagaactaaagcaccttgtattgtctgcttctaaagtgtcctatagtttttaacttaaagtgtaaagagtaacattttatcttatgtcaattaaagttacatttttcatttgttggtgtacatgtgctacctgttttatggggaatgtttaacacgatcctccaagttggttctatgcataaccattcaccaaatactgctgctgtgattccttgaaggaaatattctgtggtctgctatgatgcattgccatcttgctgcttgacaataggtttataaataattagaattacgtgttttaatagtacctttgtatatataacaagatgtaaaattaaagatgaggaatgtgtgtaaatgatcattcactgtttttgttttaaaactggtcagtactatgaagcttctgtggtttgtatgatgttttaactttcactttaaactgcatagaataaattaaattgaaaacaacaaaaaaaaaaaaaaaaaaaaa

SEQ ID NO: 294 - DNA, 4156 bp, Homo sapiens
gagcttacatcatatagagattagctctcctagccccattcggtgtgggaagatgggaattttgctactacaggaatttttgtaactcaactctgctcgcgccgccataaggcattctaacttagccaaacactttcgagtagagctgtccagcagatgcagcaggatggctttgcaagagtcggagttttggcgttagacctaggttcagagctcagatccacttcttcctagccttacgacttaggagcactccgctggtccaggcggcaacatgtccatgcttttagtgatgtccctgcctctaatccagaagccatggaggagataaggtagcccccctcgatcggatggggaagcccagttcaatggatactaaattcaaggatgacttatttcggaagtacgtgcagttccatgagagcaaagtggataccaccaccagcaggcagcggcctggcagcgatgagtgcctgcgggtggcagcctcaaccctgctcagcctgcacaaggtggatcccttttatcgattccggctgatccagttctatgaggtggtggagagctccttgcgctcgctcagctcctctagcctgcgggctctgcacggcgccttcagcatgctggagacggtgggcatcaacctcttcctctacccgtggaagaaggaattcagaagcatcaagacctacacgggcccttttgtttattatgtcaagtcgacattactggaagaggacatccgagccatcctgagctgcatgggctacacacctgagctgggcactgcatacaagctcagagagctcgtggagaccctccaggtgaagatggtctcctttgagctctttctggccaaagtcgagtgtgagcagatgctagaaatccactcacaagtgaaggacaagggctactccgagctggacattgtgagcgagcgcaagagcagtgcagaggatgtgcgcggctgctcggacgccctgcggcggcgggcagagggccgggagcacctgacggcctccatgtcacgagtggcactccagaagtcggccagcgagcgggcggccaaggactactacaagccccgcgtgaccaagccctcgaggtcagtggatgcctatgacagctactgggagagccggaagccacccctgaaggcctcattgagtcttcggaaggagcctgtggcaacggatgtgggggacgacctcaaggatgagatcatccgcccatccccttcgctgctgaccatggccagctccccccacggcagcccggatgtgcttccacccgcctcccccagcaacggcccggccctgctgcgcggtacctacttctccactcaggatgacgtggatctgtacacagactctgaacccagggccacctaccgtcggcaggatgctctgcggccggatgtgtggctgctcagaaacgatgcccactccctctaccacaagcgctcgccccctgccaaagagtccgccctctccaagtgccaaagctgcgggctgtcctgcagctcctccctctgccagcgctgtgacagcctgctcacctgtcctccagcttccaagcccagcgccttccccagcaaggcctcgactcatgacagcctggcccacggggcatctctgcgggagaagtacccaggccagactcagggcctcgaccgcctcccgcaccttcactccaaatccaagccctccaccacgcccacttcccgctgtggcttctgcaaccgcccaggcgccaccaacacctgcacccagtgttcaaaagtctcatgtgacgcctgcctcagcgcttaccattatgacccctgctacaaaaagagtgagctgcacaagttcatgcccaacaaccagctgaactacaagtccacccagctctcccatctcgtgtacagatagaccggcctcgccccttccagctccaagggctacatcaaccgacctttcgggtttcacggtgaagaagtactaacgcattgatctcagaggcggaggcctgcacttgaccatgtaggtggcagagatcgtgggctggctgtgtccacgtgggagttcacttagcgactcagatatctcaaccaatggctgctttgttgtctgacaagggagaaggtggcacttccgttcagattcattttgctaatctctccactccctgttcagttggttctttttttggggttttgttttgttttgttttgttgttttgttttttcctttaaagaggatttctgtctctgggaccctcgctgcacctacccctcccattgcaaagccaacttggactgggaagggcccttcaggtcaccaaacatccacctggagcggcgagctagaggcctgttggcttgtgaaatgagccctcctgccacacggggcctctcccaaaggctcatcccttggccgcccccttcctaaacacaaggatccccagctggactccccaccccctggcttccccacctctccaggtgtcaaaggtgaaccgagtccagtattagctgaatgtcatttcgtacaccacagctcagtcagcccatggccttcgtgaactttgctccaacacactgatgtgtgggcttcccacagcaggactgacttccccctttctgttgtttgcacatgcccctcttactgtactgtcaatagatatttttgagatttatttttaaataaatattcaacttgctgtgtgtttcaacgtggttaaaaaaatgaattatgtagctatttattaaatgccctgggttctttagtcttccaagggagggcctcgcgcccattcgtgttgtatcctccactcactatggcccgaggggagaggagagtttggggcagggaggaacagacatgaagcctccttttcttgagctggtggagagccactgtcttccctgcagtaactatctatacacctacctccagtgtgcacttagggggtgagcgcgggtgtcgaggtctgtgtgtctgcagactgctaacctatgacaattcagggacctcacctgtcggacctatagcttgctgagcaggaaccttgcacttcacacttcttgagtctcgtttcagaaggaaaatcatttgggattcctactgcccctccatctcaatcctcttctcttcaccagtttccaggactcatctgcaacatttgcaatctttttgcactaaaagtgggcaggagtcggcatgtgcccatcagagagacggctcctcagatgctcagctaagcctaagcgcttccaagcctgaaggccccttcagcttctcatgtgaattaccaacccctggattttccttgtgggggtacaagagcaggagtggggcaagagtttgaaaataaagccgcttccttgtgaactaactatattttagccataactgtttgtgatgtacacaatgttaagggatttatatgcagtgggcttttctgggagaaagttattcagctcttgagcaagtttaagtctggctgaatcctgaggccactgtgaatttgctgatgttcttccaactcagttgagtgattttaaggttttccaaatcttctatggctctctttttaatatatatatatatatatatatatatatatatatatatatatatatatatctatctggtagatcacatgtagatgtacagtgtgtatattaagctgaatttcaaccaactttattactaagaccagcctagcagggcattcatctttgatgttcttccttttcacatttcagaatcggcaatgcctggcccactcctgagagctctagttttctagttttccatttccagattgcgccagcattacagtaactaactctttctaaccaaccgtgatgccacgtaacttaccctatggacaaaagcaggaatgactaacacatcctaggagggaaagtccagtgtacctgtcatcacggacgcactgtggtcacagactggaatacgaaatactacagccctgctcccaggtgtgcatcttactggatgaggttgctgtgattgagatagttaaatacatgctaatttaaaaatgcagatgttttacatttgatttctaccaagagttgaaatgttgagagatgattaaaaataataataataaagtgtcttccattgttaaaaaaaaaaaaaaaaaa

SEQ ID NO: 295 - DNA, 2640 bp, Homo sapiens
atgctaatatgctccctctcccacaaggcagcgcgccggctcggacgcggccggctaccgagccctttgtgagggctgtgagctgcgcctgacggtggcaccatgagcagctcaggtggggcgcccggggcgtccgccagctctgcgccgcccgcgcaggaagagggcatgacgtggtggtaccgctggctgtgtcgcctgtctggggtgctgggggcagtctcttgcgcgatctctggcctcttcaactgcatcaccatccaccctctgaacattgcggccggcgtgtggatgatgatggcggtcgttcccatcgtcatcagcctgaccctgaccacgctgctgggcaacgccatcgcctttgctacgggggtgctgtacggactctctgctctgggcaaaaagggcgatgcgatctcctatgccaggatccagcagcagaggcagcaggcggatgaggagaagctcgcggagaccctggagggggagctgtgaagggctgggcgcccctccctccctgtcccctcttctggctctgtgtgggtccaagtgaggcctggactgtccacgctgaggcacagcctggagaggggcctttgcacgtgtccctacacctggagtcctctgctcctttctccagactggcttaagccaggagccactggctgctggtgtgagggtctgggctgctggacttgaggcagagcctgcagcagctgtgtggacactacccagccctactcctctgctgggtgggtctgcagatctcacaccacagacagggctgcctgtgacctgctgtgacctgggagcagcttcccctggagatgctggtcctggcttgaggggaggggcaagtgggaccctgccacctgggcactgagcagagggacctcccccagctctcttagcaggtggagccccagggcctgggacagcctgccgctgccagcaacctcccactgctgcctagggtgcagcgcccactgtcaccctgccttctgaagaagcccacagggctcctaaggtgcaccccggtacctggaactgcagccttggcagtgactggacagctgggtgggggatgctccctgctggccctgggaaccttggacaggccacctcaaggcccctcggctgcccctcctccctgggcctgctggggcccctaggttctgcccatcaccccccgcccctgctggccttggtgctaaggaagtggggagagcaggctctccctggcaccgagggtgcccaccctctccctggtgtggccccgtcaacatcagccacagcccagccccattagtgggttagtgggtctgacctcagccccactcaggtgctcctgctggcctgcccaagccctgccctcagggagcttctgccttttaagaactgggcagaggccacagtcacctccccacacagagctgtccccactgccctgggtgccaggctgtccggagccaggcctacccagggaggatgcagagagctggtgcccaggatgtgcacccccatattccctctgccctgtggcctcagcccgctggcctctctgaccgtgaggctggctctcagccatcgggcaggtgcctggtcgggcctggcttagcccaggtggggtttggcagaagcgggcgggtgtggaagatattccatctggggccaaccccaggctgggcctgcgctgagcttctggagcgcaggtactgggtcttgctaagtgaactgtttcccaggaacacctctcgggcccatctgcgtctgaggctgggagtggcatctgaggccgggagtggcatctgaggccaggagtggcaggctggtgggctgggcgtggggttttctgggccctgcccagtactgccctggggacttggtgggctcctgggtcagcagcatcccacccctgggagtctggccagctgagccccagggtggcaggggcattatagcctggtggacatgtgccttcagggttcctccggggccaccttcctcaggccagtgctgggttcaaagggctgtgtgtgtgtgtgtgtgtgtgtgtgtgtgtgtgtgtatgtatatgtgtgtgggtgcacacatctgtcccatgtatgcagtgagacctgtctacctcccacaaggagcaagggctctgcccgccctctgctcattcctacccaggtagtgggaccccgggcccccttctgcctggcttgcctgcttctgccctttccagaggggtctcactgacagccagagacagcaggagaagggttggctgtggatcaaggaaggctgcccctgtaccctgtggggaaatggtgggtgcatggctggatgcagaggtggaaggccctgggccacaggcgagagtgggcgtgtcacctgtcccaggttcccagcaagtctgcagctgtgcagtcctggggtccctgaccctgtcgcccagggggcgtgctgtccagcaggggccctgccttgcaaggaacgtctcttccggcggctgggccgctcctgcctggtctgggctgtgtgtggcgccctttcctccttgtttgttcctctgtgttctgtgtgcgtcttaagcaataaagcgtggccgtggctcgcgtgcctgccctctgctcccttctgcaaaaaaaaaaa

SEQ ID NO: 296 - DNA, 4841 bp, Homo sapiens
atctcggctccaccgcacccttcgcgggaagtccccaggcttccagcaaagctcagcttatcccgcccccgcttccaacccggaaccccagaagaacagcatgatgagcctccggcagccaggtgggccacctccccgcggctcagtttgaggacacttgtgcggaaccctttcacatccccaccctacccagctttcacaactccgccgggttaaatggccaaagacaaacttctacctctcctgtccccggtcccagcttttcaaaaacccacagctggcgaacccacacacatcgaaactcctaggtcgctgttgcagtctgggcatgctcagtatcagggctgcccctccaagagcggaggcagcgagagtacgcgtgtgcctcgcgccggtccacgcggggagagcactggggaccgagacccggcaccacctcccggtccgccctccagggaaaacgggaaaactagcaagagctagcaagaactagcaagagcttgaacaaacgcctggactcagattggaagactgctcatttgtctactgcctcattcctggaaattgcactggaactgtctgattaagaaaaacagaataattctgaaagaaagaaaacaaagaaaaacatactccagaattcctaatagaacacttcacctgaacctaaaatggtgagcgagagtcaccatgaggccctggcagccccgcctgtcaccactgtcgcgactgttctgccaagcaacgccacagagccagccagtcctggagaaggaaaggaagatgcattttctaagctgaaggagaagtttatgaatgagttgcataaaattccattgccaccgtgggccttaattgcaatagccatagtcgcagtccttttagtcctgacctgctgcttttgtatctgtaagaaatgtttgttcaaaaagaaaaacaagaagaagggaaaggaaaaaggagggaagaatgccattaacatgaaagatgtaaaagacttagggaagacgatgaaagatcaggccctcaaggatgatgatgctgaaactggattgacagatggagaagaaaaagaagaacccaaagaagaggagaaactgggaaaacttcagtattcactggattatgatttccaaaataaccagctgctggtagggatcattcaggctgccgaactgcccgccttggacatggggggcacatctgatccttacgtgaaagtgtttctgctacctgataagaagaagaaatttgagacaaaagtccaccgaaaaacccttaatcctgtcttcaatgagcaatttactttcaaggtaccatactcggaattgggtggcaaaaccctagtgatggctgtatatgattttgatcgtttctctaagcatgacatcattggagaatttaaagtccctatgaacacagtggattttggccatgtaactgaggaatggcgtgacctgcaaagtgctgagaaggaagagcaagagaaattgggtgatatctgcttctcccttcgctacgtacctactgctggtaagctgactgttgtcattctggaggcaaagaacctgaagaagatggatgtgggtggcttatccgatccttatgtgaagattcatctgatgcagaatggtaagaggctgaagaagaaaaagacaacaattaaaaagaacacacttaacccctactacaatgagtcattcagctttgaagtaccttttgaacaaatccagaaagtgcaggtggtggtaactgttttggactatgacaagattggcaagaacgatgccatcggcaaagtctttgtgggctacaacagcaccggcgcggagctgcgacactggtcagacatgctggccaaccccaggcgacctattgcccagtggcacaccctgcaggtagaggaggaagttgatgccatgctggccgtcaagaagtaaaggaaagaagaagcctttctgcatttgcccatatagtgctctttagccagtatctgtaaatacctcagtaatatgggtcctttcatttttccagccatgcattcctaacacaattcagtggtacttggaatcctgttttaatttgcacaaatttaaatgtagagagcccctaagtccttcatcataccactgccctccaaatctactcttcttttaagcaatatgatgtgtagatagagcatgaatgaaattatttattgtatcacactgttgtatataccagtatgctaaagatttatttctagtttgtgtatttgtatgttgtaagcgtttcctaatctgtgtatatctagatgtttttaataagatgttctattttaaactatgtaaattgactgagatataggagagctgataatatattatacggtaaatatagtatcgtctgcattccagcaaaaatatcaactcgtaaggcactagtacagttaaactgacatcttaaaggacaacttaaacctgagctttctattgaatcatttgagtaccaagataaacttacaccacatacttggtgggtgaatccaattttgtagaattcctacacaggcaaaatagcatgatctgagcagcagcatccaggctgacctcaaggaagcatagccacaaaacagaatagcacctgtctgtacatatttacaaagctaaaataatggcttcactcttatatttgaggaagcaactgaacaggagtcaatgatttcatattactgcatatagaataacaacaaggtgttccgtgtgtgtgtgtgtgtgtgtgtgtgtgtgtgtgtgcacatttgtttggggatgggggagaagaagctaaggggagaagtcaacatttatgaaatattgcctgactatttaaaaagaaaaaagtagctctccattatcacctttatacaaaatgtacatcctgtgaattctgttccagatttcacacctacaataattccaaaaggtttgcacattagagtttgtaacaaaatattttattatataaaaccaggttagaaggaatgcaggatatttttaacacaacaatctgtgcttattacacaaaattactttgtggtaaacagacagtattgtaatcccatcaaaagatgaaagaaaaacaaaaacaaaaaccaacaacaattagccatagttctgaatgcacttcaattaagccaaaacagacagctagtgatctttttatatgctctttttacttaagttttaatttgtcctttaaaaaaaggtgaaacaaaccaagaacaagttctagaaaactgaagcaacctcttatgtatactagatgcttgatttaggaggagtttttaaacgttttcaatgttattatgtagtaaatgacactattatgaagctactagtcattccataagagtcttaaaggactgctctgtgtaacactgtgactgccgtgtgtgcttagacccgtagtttcctcagtggatagcactcaatttattccgtagtgatattgtaacaatactgccattcccttctactgcactgcccaaggtgtgtgtagcacaaacagttctcattacaaaggaccaattcagaactgaaaagctatgcataggacaaggaagatacatagaatggggtggaacacagcattttgtcaagcactgtgcaatattccatatttttccccactatggtagacaaccatttcgtggaagggcagcctattatcccacactgcatctagccttttgtcccattcacttctgtgatccattttaatttccaggccacaagacagtagtgatgctctgaaatgaaagtttgtcttcacaaatatcaaaacaaaatggaggaaaactaagcattggcctcatgttcagtcttcaggatatcacaccacgtcttttcaaaaactaaagagaattcaaaaagggctgatggtaggctttgaacatggggttggctgtttcccagtaaaactggaattcctgtcgttactgtttccttatcaaagaaggggcaagctcttttgccttttaggccagacatagcaaacgctttataattggcatagacataaaggataaaaggaaaataaccgtctgccgatggtccgtacttcttaaaaaacataggtaatagaaaatatacacaagtcagaatgtgaaattaaataatggtttgaacagaaaattcaaacaagactctttccaatttaaagggccaaaccctaccaaagagagggagttgactggcttttaaaaagtatttaaataccacaaatgacatttaatttcactgtattcagctttaagttgttcacaatgaaaccacactttcaaacaagcaggttcaagctgctgaatagacattatttcttgcattaaaataccactaatgcattctcttgcaacactgccagacatgggattgtcaccatagaattagttggtactatgccatctttcactctttcacaagtcagtgatggaacctgctttatgaccaagattcatcctcaaataagccacatgtacccttctgacaaagctgtgtaaagtattagaatctgatgctctagaaagatcctagttgcctttgtgtatatttactgcctgcttgagtgtttctatgtgtgggttttccctgtatcttgtagaaatgttggggtgttttcctctgccatatggctcgtggcctgcgagccaactatttcagctgtattttaccttcatttttgatgaggtgatttaaattttgtttcactttgtgtagtgaattccacagtagttttctgattgttgttaaaaatgacttaacatattacacagatattcaataaaaatgttttatttcctgttgaaaaaaaaaaaaaaaaaa

SEQ ID NO: 297 - DNA, 6351 bp, Homo sapiens
cggcccagccgagccgggctgcttgtctggccggcggaggctgagcgcgaccctagcaagccgcggcgcccgccgaccagggacaagagcgactcctgggaccccactctgccccgcgccgccgcctcctcccctgttgtcgcggggacgctcaggcccgcgccgcccgggccacgattctcctcctctttctcccggaggggaaggaacggagaaagccgagcggcggctccgggagagagcgagccgaggcccctgcccccgaggctcggggcaggaggaggaggaggaggaggaggcggaggcggagggaagtgcgcgtcactctcgggaggagagtatttcacctccaggcagaggctgcggctgccagttgagtacgagcggcagctgcgggcgccggcaatcgagtggcttcctggccatggagaggagatctggacccgaggacgccagggactcctctccgtctccctggaccgctgtgtaggcacctgagttaacggacgctaagcggggtaggggaagtaacagtgtatcatgtatgccactgattccaggggacactcccctgctttcctccaacctcagaatggaaatagtcgtcacccatctggctatgttccagggaaggttgtcccattgcgtccccctcctcctccaaagagtcaagcttcagccaaatttacctccatcagacgagaagaccgggcaaccttcgcattctcacctgaagaacagcaagcccagagagaaagtcaaaagcaaaagagacacaaaaatactttcatttgttttgctattactagtttctcattttttattgcacttgcaatcattttaggaatatcctcaaaatatgctccagatgaaaattgcccagatcaaaatcctcgtctcaggaattgggatccaggacaagattctgcaaagcaagttgttatcaaggagggagatatgctccgtctgacctcagacgccaccgtgcattctatagtcattcaggatggaggactgcttgtatttggggacaataaagatggatccagaaatattactttgaggactcattacatcctgatccaggatggtggggcgcttcatattggagcagaaaaatgccgctataaatccaaagcgacaattaccttgtatggcaagtcagatgaaggtgaaagtatgccaacatttggcaaaaagtttattggtgtggaagctggcgggacactggagttacatggggcacggaaggcatcgtggacgttgttggcaaggaccctgaattcctcaggcttgccctttgggtcctatacctttgaaaaggacttttcccggggcctcaatgtgagggtcattgaccaagacacggccaaaattttggaaagtgagagatttgatacccatgaataccgcaatgagagcaggcggcttcaggagtttctgagattccaggatccaggtcggattgttgccatagctgtcggggattcagccgctaaaagtctcttacaaggaaccatccagatgatccaggaacggttgggaagtgaactgatccaaggactgggctacaggcaagcttgggctttagttggtgtcattgatggtggaagcacttcttgcaatgaatccgtgagaaactatgaaaatcatagcagtggcgggaaggctcttgcccaaagagaattttatactgtggatggccagaagttctctgtgacagcttatagtgaatggattgaagaaacccctcagttcctgcacatgggtgagatcatagacggtgtagacatgagagctgaggttggaattcttacccggaatattgtgatccaaggagaagtggaggactcatgctacgcagaaaatcagtgccaattttttgattatgatacctttgggggacacattatgataatgaaaaattttacttcagtccatctttcttatgtggaattgaaacacatgggtcagcagcagatggggcgataccctgttcattttcacctgtgtggtgacgtggattataaaggaggatacagacatgcaacatttgtggacggcctgtctattcatcacagcttctcaaggtgcatcactgtgcatgggacaaatggcttgctaataaaagacaccattgggtttgacacactaggtcattgtttctttttggaagatggtattgaacagaggaatactttgttccacaatctgggactcctcaccaagccgggtactctcctgcccaccgataggaacaactccatgtgtaccaccatgcgagataaagtgtttggaaattacattcctgtgcctgctactgactgtatggctgtttcaactttctggattgctcatcccaacaataatctgattaataatgcagctgcaggctcacaggatgctggaatatggtatttattccacaaggaaccaactggggaatccagtggattgcagctcttggcaaaaccagaactcactccattgggtatattttataacaacagggtccattcaaattttaaggctggcttatttattgacaaaggtgtcaaaacaaccaactctagtgctgctgacccaagggaatacctctgtttggacaatagtgcaagatttcgacctcatcaggatgcaaaccccgaaaaaccacgtgttgctgctctaattgacaggctcattgcttttaaaaataatgataatggagcttgggtcagaggaggagatattatcgttcaaaattcagcatttgcagataatggaataggactgacctttgccagtgatggaagcttcccaagtgatgaaggttccagccaagaggtatctgaatctctctttgttggggagagcaggaattacggctttcagggtggtcagaacaagtatgtaggcactggaggaatagaccagaagcctcgaacattacccaggaacaggacgttcccaattagaggctttcagatttatgatgggcccattcatctcacaaggagcactttcaaaaaatatgtgccaactccagataggtacagcagtgcaattggcttcctcatgaagaattcctggcagataacccccaggaataatatctccctcgtgaagtttggtccacatgtctctctgaatgtcttttttggaaagcctggtccctggtttgaagattgtgagatggatggtgataagaactccatattccatgacattgatggctctgtgacaggatacaaggatgcttatgtgggaagaatggacaactacctgatccgccatccaagctgtgtaaatgtgtctaagtggaatgcagtgatctgcagtgggacctatgcacaggtctatgtacagacatggagcactcagaatctttctatgaccattacacgagatgagtatccgtccaaccctatggtgctccgaggtattaatcagaaggctgcctttccacagtaccagcctgtcgtcatgctggagaagggttataccatccactggaatgggccggcaccacggactacatttctatacctcgtcaacttcaacaagaatgactggattcgagttggcctttgctatccatcaaacacaagttttcaagttacctttggctatttgcagcggcagaatggctcattatccaaaatcgaagaatatgagcctgtgcattcactggaagaactgcaaagaaagcaatccgagaggaaattctattttgactccagcacggggttactgtttttgtatctcaaagccaaaagccacaggcatggccacagttactgttcatctcagggatgtgaaagagtcaagatccaagcagccacagactcaaaggacatcagtaactgcatggccaaagcatacccacagtactacagaaagccgtcagtggtcaagcggatgccggccatgctcactggactctgtcaaggctgtggcactcggcaggtggtgtttactagtgatcctcataaaagttacctccctgtgcaattccagtcacctgataaagcagaaacccagcgtggagacccgtctgttatttctgtcaatggcactgactttaccttccgaagtgcaggcgtcctcctccttgttgtggatccgtgcagcgttccattccgcttgacggaaaaaacggtttttcctcttgctgatgtcagtcgcattgaagagtatttaaaaacaggcatccctccaaggtccattgttctgttgagcacaagaggagaaataaagcagttaaacatttcacacttactagtacctctgggattagccaaaccagctcatctttatgacaaagggagtaccatatttttgggattcagtggaaactttaaaccatcatggactaagctatttaccagtcctgctggacagggccttggggtgcttgaacaattcatacctttgcagctggacgaatatggttgtcccagagccaccactgtccgcagaagagacctggaactgctaaagcaagcttcaaaagcacattagagactaactgtaacttaagtgctgggggaaaaaaaatgtgaactaacttatttaatttatggcattttaaaatgacactgttaacccaacggaaccattttccagtttgatacagaatggggagaaaagaaagcgtttgaaattattgcttggataccagcttcatgcaccttctagttgtacaaaatgttaaagacgttgtttgtatttgtaaggctggtgtattcagagagcagatctcttattcctcactttccacccccgtattttgtaatgaccatgagcaatgtttttactttttgtataatggggtggggtggagtgggggcttctgagagtcagcctgaggtctttagaggaccagctattgtagcaccttggatacttgaagtttaatgctcagttgggtcgggtggcagttgacttggtggctggcatgttcagcagtgcctggggccctgtttctgggcagcctttgaggattttctatgatattgaatgacagttttaagtggcaactcaggcccagctcatgcccttttttgcctggacatgtgctatttttattcacttatatatcaattacttgtaagggttaaactttcaaacaggaagtatattgggacaaaagggctcttggggattagatatccctttaatctgtgaccattgggcaaaaaattttcctgcagcaaaagtctgaggctgttgggaccatttttgcagctttaatccttagcctcttttgactgtatatttgtgtttaaaatgcagagctcaactgaatatttccttttttgttttgttttgttttgttttaagaagtaggttgttttcctgaaccgtaaacttgtatcattttaacttgcacaaaggaagtctgttcttggtattgctcttgcacttgggttttttgttattgttttgtgtggattttttaaagcttttctgttcaccctcctgccaggaaaatcccagaaagcttaatgataccccaaaatgattacacccagggaggaaaaaaaggagcgctttctagggtcagaatcgtggagagaatactcagaaatgaacctctttaaagccttgcaggaatgagtcactcttacttaatgaaatgttaaagccaattaaaaagcatgctgtgatgcccagcttccctttccacagggtgcatgcgtctcctgctggtgaatcacatgcggcaagaggcaactggctccacagcctgggatgctgccgtaccaagaggaaagaagcagcaaaatgcctttacgttgttctaaacccccgacgcataaagtgtagaggagggatggccaagggtgggtggtagaaagtgtgttcaggctgacactggcaatgagtacagataatttcactttcctcttctaggggcaaaggctgatggcctctacctttgtatccaggagaaactgcagagcagccctgtgactttacaaaatatgctacctcaaagtgctaccgataaacctttctaattgtaagtgcccttactaagggcacatgtcttaatcaaagttagttttttgttttctggtttgttttttttttttgtatattgatgaatgagatcttacctattaaatatattattggattatggttcctgaaggtcattagagtgtgtgtgtgtgtgtgtgtgtgtgtgtgtgttttatgacttaaatatctttacgtgtgttttttagagcttggttctttaaagatttggagaagatatgtaaattaccaaggcacttggtttttctgttttatatactaataatcagggcctaagttaaataaaaatatgtgtgcatgtattttaaaaaaaaaaaaaaaaaa

SEQ ID NO: 298 - DNA, 2399 bp, Homo sapiens
agctgaaaaacagctcgcgctgcagcaagctagctgggaagctcccagttctaaagagaggctgtttaccagaacagcataacaagggcaggtctgactgcaaggctgggactgggaggcagagccgccgccaagggggcctcggttaaacactggtcgttcaatcacctgcaagacgaaggaggcaaggatgctgttggcctgggtacaagcattcctcgtcagcaacatgctcctagcagaagcctatggatctggaggctgtttctgggacaacggccacctgtaccgggaggaccagacctcccccgcgccgggcctccgctgcctcaactggctggacgcgcagagcgggctggcctcggcccccgtgtcgggggccggcaatcacagttactgccgaaacccggacgaggacccgcgcgggccctggtgctacgtcagtggcgaggccggcgtccctgagaaacggccttgcgaggacctgcgctgtccagagaccacctcccaggccctgccagccttcacgacagaaatccaggaagcgtctgaagggccaggtgcagatgaggtgcaggtgttcgctcctgccaacgccctgcccgctcggagtgaggcggcagctgtgcagccagtgattgggatcagccagcgggtgcggatgaactccaaggagaaaaaggacctgggaactctggggggaaggatttgaaagaacagcatgatcagaaagtatgtgagagggagatgcagcgaatcactctgcccttgtctgccttcaccaaccccacctgtgagattgtggatgagaagactgtcgtggtccacaccagccagactccagttgaccctcaggagggcaccaccccccttatgggccaggccgggactcctggggcctgagcccccccagtgggcaggagcccatgcagacactggtgcaggacagcccaccctcctacagctaggaggaactaccactttgtgttctggttaaaaccctaccactcccccgcttttttggcgaatcctagtaagagtgacagaagcaggtggccctgtgggctgagggtaaggctgggtagggtcctaacagtgctccttgtccatcccttggagcagattttgtctgtggatggagacagtggcagctcccacagtgatgctgctgctaagggcttccaaacattgcctgcacccctggaactgaaccagggatagacggggagctcccccaggctcctctgtgctttactaagatggcctcagtctccactgtgggcttgagtggcatacactgttattcatggttaaggtaaagcaggtcaagggatggcattgaaaaaatatatttagtttttaaaatatttgggatggaactccctactgacctctgagaactggaaacgagtttgtacagaagtcagaactttgggttgggaatgagatctaggttgtggctgctggtatgcttcagcttgctggcaatgatgtgccttgacaaccgtgggccaggcctgggcccagggactcttcctgtttcataaggaaaggaagaattgcactgagcattccacttaggaagaggatagagaaggatctgctccgcctttggccacaggagcagaggcagacctgggatgccccagtttctcttcagggatggatagtgacctgtcttcattttgcacaggtaagagagtagttagctaacctatgggaattatactgtggggccttgtgagctgcttctaagaggctaacctggaaactaagctcagaggcaaggtaataaagcacttcagggcttgctccccaagtgggcctgatttagcaggtggtcctgcgggcgtccaggtcagcaccttcctgtagggcactggggctagggtcacagcccctaactcataaagcaatcaaagaaccattagaaagggctcattaagccttttggacacaggaccccagagaggaaaaagtgacttgcccaaggtcgtaagcaagctactggcatggcaagagcccagcttcctgacggagcgcaacatttctccactgcactgtgctagcagctcagcagggcctctaacctgtgatgtcacactcaagaggccttggcagctcctagccatagagcttcctttccagaacccttccactgcccaatgtggagacgggttagtggggctttctatggagccatctgctttggggacctagacctcaggtggtctcttggtgttagtgatgctggagaagagaatattactggtttctacttttctataaaggcatttctctatatacatgttttatatacctcattctgacacctgcatatagtgtgggaaattgctctgcatttgacttaattaaaaaaaaaaaaagactccaaaaaa

SEQ ID NO: 299 - DNA, 5253 bp, Homo sapiens
gtctcgcgtgcgtgtgtccgagcagtcctgggcggtgggcgaaggcgcggcttggggacccgggaggggccggggcgcgggggctgcaggaagtggaggcggccgccgctcggggaccggcttggcggggtgagagacacccggaaacggattccgcttcggggcccgcgcgagttgggtgcttcggagggcgcgagaggagcgggcgggtgctgctgagtaatccccgcggcggcggccggacgcccacctcccacgccgcgccgcagccgggccgcggctcctccctccgcggtccttccctcctcttccctcccgtcttctcccctcccctcccctcccctcccggctccgcttggctccgggcaggtagagccgggctccgggcgcgcgcggggccgcagcagctgctcccgatctcgcctcggcccagcgcagggcctcgcacgcccatggccggctcggagcagcagcggccgcggcggcgggacgacggagactcggacgcggcagcggcggcggcggcgcccctgcaggacgcggagctggccctggccggcatcaacatgctgctcaacaacggcttcagggagtcggaccagcttttcaaacaatacagaaatcatagcccactaatgagttttggagccagctttgtcagttttttgaatgccatgatgacatttgaggaagaaaaaatgcagttggcatgtgatgacttaaaaaccacagaaaaactgtgtgaaagtgaagaggctggagtaattgaaacaatcaagaataaaattaagaagaacgttgatgtccgaaaatccgccccctctatggttgatcggcttcagaggcagataatcatagctgactgccaggtttacctggctgtgctttcatttgtaaaacaagaattgtcagcttatatcaaaggtgggtggatccttaggaaagcctggaagatttacaataaatgctatctggacatcaatgcccttcaggagctgtatcagaagaagctaactgaagagtccttgacttctgatgctgcaaatgataatcacattgtggctgaaggggtgtctgaggagtctctgaacagactgaaaggtgctgttagctttggatatggcctttttcacctttgcatatccatggtgcccccaaacctgctcaaaatcatcaacctgctgggttttcctggagaccgcctacaggggctttcttcactgatgtatgcaagcgaaagtaaggacatgaaggcccctttagctacattagctctgctctggtatcatactgtagtccgcccgttttttgccttggatggcagtgataacaaggcaggcctggatgaagctaaggaaattctccttaaaaaagaagctgcttatccaaattcttccctctttatgtttttcaagggacggatacaacgactagagtgtcaaatcaacagtgccttgacatctttccacactgctttggaacttgcagtagaccagagagaaattcaacatgtctgtctgtatgaaattggttggtgcagcatgatagagctcaatttcaaggatgcatttgattcctttgagaggctaaaaaatgagtccaggtggtcccagtgctattatgcctacttgactgcagtttgtcagggagccactggtgatgtggatggggcacagattgtctttaaagaagttcagaaactcttcaaaaggaaaaacaatcagattgaacagttctcggtgaaaaaggcagagcgatttcggaagcaaaccccaaccaaagcgctctgtgtgttggcgtctattgaagtgttgtacttgtggaaagctcttccaaactgttccttccccaacctgcagaggatgagtcaagcttgccatgaagtggatgactcatctgttgttggattaaagtatttgcttcttggtgccatacacaaatgtctaggaaactcagaagatgctgttcagtacttccagcgagctgttaaagatgaattgtgtcgtcagaataatttatatgttcagccgtatgcctgttatgaacttggctgtcttctattagacaaaccagagactgtaggaagaggcagagctctacttcttcaagcaaaggaggatttctctggctacgactttgaaaacagattgcatgtccgcatccatgctgctctggcctctctgagggaattggttcctcagtgacagacccggaacacccgctccgtccctccccacccagggtccgcactttaaaataaaagcagaggacaaagctcttgtgaagatgggcttttcttctgaaaaccacctgtgccagggacacattttcccagttaagctgacatattaaagatctcctcttttaaacatgtagctgaaaagtaataatgatgttgaggaggatgatgatggtaataataactaaccacctggggagagggttaagtgaccttgctcaaacgttttagttttgtgatttattatttttaaaataaaatcaaacggaacatccaacccaagatcctgtaggaacacctaccttaagcacatatctgaatgggtaacatgatgaggtacctgtaaaattattaacaatatcatgacatagcatttatatttgtgttttgaaaaaataaaagtgctttctagtgttttactttatcctcaaaatactccagtgaataacatagcacagatattcttaaccccactttgcagacagtgaaactcaggcacaaaaaggcaaattgacttatcccaattaattattcctgttatcagcagagcaatgaatagaaagcagatctcctgaccaccaactgacttttattgtaaaaataattcatgttaataggccagaattccatgttttacttattaaaagaacaaaatcttcagctgaagttatgtcaccagaaatagtcatctccagattgtctacagaatgtttcaaagcgatggacactctttttcctttgaaagccaaccaagtaagagcaaatattaatagaagataattttacaactaaaagtgtgactcttttgctaatctattagcctagtctatagattagacaaacagtatctacattttaggagtttacctttctttgtgaaaattgtcaaattaccaacttttggaaatcttttgacacattacttgaaaaggttattcgtgaatgaacatagattttggcctcaaaatatttgctggtggaacatttgctgggctacacagtgccaggatttaatcattttccccttagctcaggttatttagatattatacaaggaattcaaagttatttttttattcttcattgctaatttttgtcatttaatttacctccatgcccggtactgcaaacctgtggttttgaagaatctaaatacctcagtcacttttaagaatctctgccataatttggctcaatgtttaaggttagatttttaaagaaatttttattgagctaaaggatatcattttagggtatcgtttatttacaaattcttttggctgaaacatgatctcatattaatattttaatatttcttttcaaaataaaacagaaaagcaagtagaatgttggcaaattttatctgatttgaccttgttttgagggaatagtcataatttctttgaaagaagttatttctcactgattttggctaaacagtattcatatttcttcatctctgttactgaccacttttcagtagactgtttccaaaatgtgtattcacattgactttctccctgatgtgaattccgtgtgggttttagataatagtaagagagaagagattgctctcctatattcagtgaatgagaagggaacttttttctgaagagcaaaattggtgcccaaaaatattggacatctgttttttgtttttttttttttttttttttttttttgagacggagtctcgctctgtcacccaggctggagtgcagtggcgtgatcttggctcactgcaacctctgcctcctgggttcacaccattctcctgcctcagcctcccaagtagctgggactacaggcacccgcaaccacacccggctaattttttttgtatttttagtagagatggggtttcaccatgttagccaggattgtctccatctcctgacctcgtgatccacccgccttggcctcccaaagagctgggattactggtgtgagccaccgtgcccggcctggacatctggttttaactagatggaagggaagaacattatgaatctttaaaatacggctgttgccatttttctctcttcttaacatgcagcataggtgacaagcttttctgtcatcatcatggagcattctgaatcatgacatttttgtttgagagttcattcttgaattttcagttcaaaatattgtttgaactattattccacattcaaagattatataaggtcctgtgcttttgaatctttttcaaaacatttatttctgcctgcttaaaaaaaatacttttatttccccacagagagttcaggacttcagattagtttgtgttcagctcacttaactggatagacaattttgcgttttgcaacaccatcctgtaggttttctttactagtcaaagtgtaggtctttttaaaatttttaatctttatttttatttttattttgaaacagagtctcactctgttgcccaggctggagtgcagtggtgtgatctgtgctcactgcaacctctgtcacccgggtttaagcgattcttctgcctgagcctcccaagtagctgggattacaagttcctgccaccgtgcctggctaatttttgcagttttagtagaggcagggttccaccaccttggccaggctggtcttgaactcctgacctcatgatccacccaccttgtcctctcaaaatgcttacaggcatgaaccactgtgaccggccaggtctttttttttttaaagagtctatcctaggcttggtacagatggcgcctgtggtaaatctgtgttaacatggtggtagaccatggagaatgggtagatggagcttctagactccaaaacaacaaaaccacagtgtgagtacactgtcccattaggttgactgaagtctgagtacattttctggcctgcgtgccgtgacttatccaacctgtgaactgattgtgatctgcttggtaacttggtttggtgtaaactgctcttaaccctttgctgatgaagaaaataatcatataagtggaactatttgcatctaaaaaaaaaaaaaa

SEQ ID NO: 300 - DNA, 11648 bp, Homo sapiens
ctctttacacagaacagtttaacttttgtgcttctgggcagaggtatggtccttgggacagttctccttccacctaatagttatggcagagatcaggacacttcactttgctgcctgtgcactgaggcctcagaatctgctctacccgacttaacagatcactttgccagctgtgtggaggatggatttgagggagacaagactggaggcagtagtccagaagctttgcatcgtccctatggttgtgatgttgaaccccaggcactaaatgaggctatcaggtggagctccaaggagaacttgctcggagccactgagagtgaccctaatctcttcgttgcactttatgattttgtagcaagtggtgataacacactcagcatcactaaaggtgaaaagctacgagtccttggttacaaccagaatggtgagtggagtgaagttcgctctaagaatgggcagggctgggtgccaagcaactacatcaccccagtgaacagcctggaaaaacactcctggtaccatggacctgtgtcacgcagtgcagctgagtatctgctcagcagtctaatcaatggcagcttcctggtgcgagaaagtgagagtagccctgggcagctgtccatctcgctcaggtacgagggacgtgtgtatcactacaggatcaataccactgcagatggcaaggtgtatgtgactgctgagagccgcttcagcaccttggcagagcttgtacaccatcactccacagtggctgatgggctggtgacaacattacactacccagcacccaagtgtaataagcctacagtctatggtgtgtcccccatccacgacaaatgggaaatggagcgaacagatattaccatgaagcacaaacttgggggcggtcagtatggagaggtttacgttggcgtctggaagaaatacagccttacagttgctgtgaaaacattgaaggaagataccatggaggtagaagaattcctgaaagaagctgcagtaatgaaggaaatcaagcatcctaatctggtacaacttttaggtgtgtgtactttggagccaccattttacattgtgactgaatacatgccatacgggaatttgctggattacctccgagaatgcaaccgagaagaggtgactgcagttgtgctgctctacatggccactcagatttcttctgcaatggagtacttagagaagaagaatttcatccatagagatcttgcagctcgtaactgcctagtgggagaaaaccatgtggtaaaagtggctgactttggcttaagtagattgatgactggagacacttatactgctcatgctggagccaaatttcctattaagtggacagcaccagagagtcttgcctacaataccttctcaattaaatctgacgtctgggcttttggggtattgttgtgggaaattgctacctatggaatgtcaccatatccaggtattgacctgtctcaggtctatgacctactagaaaaaggatatcgaatggaacagcctgagggatgcccccctaaggtttatgaacttatgagagcatgctggaagtggagccctgccgataggccctcttttgctgaaacacaccaagcttttgaaaccatgttccatgactccagcatttctgaagaggtagctgaggagcttgggagagccgcctcctcgtcatctgttgttccatacctgccccggctacctatacttccttccaagactcggacactgaagaaacaggtggagaacaaggagaacattgaaggggcacaagatgccacagaaaattctgcttccagtttagcaccagggttcatcagaggtgcacaggcctctagtggatccccagcactgcctcgaaagcaaagagacaagtcacccagcagcctcttggaagatgccaaagagacatgcttcaccagggataggaaggggggcttcttcagctccttcatgaagaagagaaatgctcctacaccccccaaacgcagcagctccttccgagaaatggagaatcagccccataagaaatacgaactcacggggcttccagagcaggataggatggcaatgacccttcccaggaactgccagaggtccaaactccagctggaaaggacagtgtccacctcttctcagccagaagagaatgtggacagggccaatgacatgcttccaaaaaaatcagaggaaagtgctgctccaagcagggagagaccaaaagccaagttattgcccagaggagccacagctcttcctctcagaacaccctctggggatctagccattacagagaaggaccctccaggggtgggagtggctggagtggcagctgcccccaagggtaaagagaagaatggtggggcacgacttgggatggctggagttccagaggatggagagcagccgggctggccttctccagccaaggctgcccccgtcctcccaaccactcacaaccacaaagtgccagtccttatctcacccactctgaaacacactccagctgacgtgcagctcattggcacagactctcaggggaataaattcaagctcttatctgagcatcaggtcacatcctctggagacaaggaccgaccccgacgggtaaaaccaaagtgtgccccacccccaccaccagtgatgagactactgcagcatccgtccatctgctcagaccctacagaagagccaactgccctaactgcaggacagtccacatcagaaacacaggaaggaggaaagaaggcagctctgggcgcagtgcccatcagtgggaaagctgggaggccagtgatgcctccacctcaagtgcctctgcccacatcttccatctcgccagccaaaatggccaatggcacagcaggtactaaagtggctctgagaaaaaccaaacaggccgctgagaaaatctcagcagacaaaatcagcaaagaggccctgctggaatgtgctgacctactgtccagtgcactcacggaacctgtgcccaacagccagctggtagacactggacaccagctgcttgactactgctcaggctatgtggactgcatccctcaaactcgcaacaaatttgccttccgagaggctgtgagcaaactggaactcagcctgcaggagctacaggtttcttcagcagctgctggtgtgcccgggacaaaccctgtccttaataacttattgtcatgtgtacaggaaatcagtgatgtggtgcagaggtagccactgttagcctggtgggaaaatgcacacatttctgaggggagagggaaaaggacttgttttcctgtgttcttgttttcagaaaatgaaagactcatacttgagtgtgtttatgtgaagtacctcagatccctgagttctcacgtttacagtttcatctcaaaaataagaagcaaaccacataagtataggagaggtaaattaagtgggggcaaggcagtagtggacagggttggaaactgcactggaaaatagggaacatgtgtatgtcataaggaaggcaatgcagcccatccctacctggaatgctgggaagtgctaggcagggctgctctcagcaagactgcagcagctgcacccagacctggggctctggtaggtactaatggtgattatgctccaatttacctaatgaatttggtgggacagcagaaaagaaagctgggaatgtaccaagagaaatttttgttcagggctgttggaagtagctgttagccttgcttccacaaggccattgctgctgtaataagaactgcaaatcagagtgctacaacataaaactgggaaatatggccctatctgaatgcctctgtcctattttccgctggtgtatcagttagtgcaggaagtaaagaatgctggaaagttgaatcagaaattgaaaaccttctaaaatcttacacagattagcagaagtcacttctcccagtctggtatattatttcataatggaccaggatcggcttcctgcctgttggtggctatctgtaaaccataagtacaggggtctccctagtggttcttctctgtcttttgctgggcaggctgtcttcctttattcctggtagcattcagagcattaaccagtgttgattttgaaaatagtagtccctacaggttctcacaaaggaatgaatcctgttctgatacagttcccctgcatactgacatactggccaaggacttgagcagctgtgtatttttctttatcaactaaaataccagggagatggtcttttcttgaaacccagtggcctgtatgtgactgagaggaaaagctggcttggtcctaatggctgtttctctgtacctttcccttcccttaccaccttaagcccaatccaggtagagaatagggagaggcattctcctctctatggatttgaagtgaatcacccccacattattctcacatgcttttcttctctcacatattcctccctactcccccacccaatcattgtgcttatttgtacagatcttattgggaatattctttatttattttgtcatttcacttctattttaagaatgcataattgaaggagtagtcattttcagggagcaccaggtagaccctgggaacctaatgacttaatccttaaatatgttttgcccttgaaaaataggccttttccttccttccttagttataattgtggaagctaattaggatggcatggaagtgaatctaatgagttaggtattattaatgttcttggtatcgggtctaattccagttactgcttcattctctttttaaagctttatgaatacttcccccatcctccccaaggagagctcaatacacacatatttttattttattctctcaaaggaatattagcttaggaagataggaattcaacattgagcactgagttttcttctggctctgtcattgatacactgtcaaaccacagcctcatctcttaatctatttaattaaggtaacagtacatgttctcaagggtgttgcaagtaagtgtgcagctatcccttggagagcctctctggaaagctcttttagtgcagtgttgttatgctgaattgttttccattatcttatttgctgagtagaaaatattaatgaaattaagaattgttgagattatatgaattgggctagaatactaaggggaaaactatgttttgaatagagtttggcatttttgaccaagaacaaaattgagttttcattggaaagaaaggaaaccttgattcttaccattgctgctccaaaggaggcccaggttaagaggattagaggagacacgcggtgctgggcattcctggcaggtgttgggtgatccccgcagtatgtcacctgcagttgcagcacaggcagctagtgattgggttcatctcctcctagtggttggaagagaactcagatgtaaaaaccagcggtccttctcccaccttctttcctgccattcttgctcatcatacatgtccgtaaacttgaagaactcgttttagcagctagccttttaaggtcgaggatgggaaagctaaaactgtagaatattattatgctgctttttaggtttatccctgttgttgtgggatgcaagttaagggattgtaattgtttttcagggtttttttgttttttgttttttaagcaagggctctattttcccttgagagttctggaactaagccttggagaaacactactgagtgtatttaggctccctggttttcttgcccaacaacaatctgaagggtagggggtgggggctgtgtcttactcaggggcagcacctagctgtcttgcctacagtgggtgcacgatatataaatggaattgatttttgtcaacactgtcaagagtggcattgactattggagcataccccgtccacatgatgcttgaactatgtaacttcaggggttgagggctcaaggttcaggttaaagaggcactgtcaacttactatacaagcataatttaggtttttcctttttctacttgaaaaggaccagcttaaacacaaacccttatgtaaattaaaaggtttgaatccaaagcagagagaactgcttctggaaaagtgtagtttaattttaactattctaaaagcaatgagcaaaggcccttgtccaaggcgttgacagttttctaaagtggttatgctgtatatctggatgcatgcctttgggctgccactgcttgattcctttcatgtacagataatattacttcagtttagatttcccactttaaaatgcagtgatttgtgttgaatacatcttgattgtgctttacctaaagtattttcttaaaaggctttgtgtaaaatttaaatgtatatattttcctgtagacttccatcatgattttcagagattagccttaaaaaatttggccctaagaaattcattcagtgtttttctagatgacctctgtacatagaggtcattatagtggagaccctttaccagcagcattttaagatttaaattagatagaaagtttcttaggattcaactgaaaattggctagtaaaatatgtcccaggtaataaagcatgctgactttgctaaggcactgcccatttttatttaactaaagtcatggagattttgagtttaaaggatgcagtatagatagtggtttagtgtttaggctctaatgccagtctaaaaggcaagtcatttaaccttgggagcctcagtttcctcactgtaaaacagggataataatagtaactacctcagggttgttgtaaggattaaatgagatgatatttgtaagatacttagctcaagtgcctggcacacaatgagcacactctataaatgttctactactactattattaacacctagtctagggatgcacagcagaatcccctagggttaaaaaacaaaacaaaacaaacaaaaaaaactgacggaatagccccactccagatcagaattcccagtgggctggggtctcggccagtgtattctccagtaatctcgccaggtgtttgaaacacccagtgctatctgaaaactatcagtaccccaaccctttggtttatagattaagaaactagcagaagatggttaaattacttgcctattgtctcagaacggttaattagtggcggagccaaggctagaattcaagtctcttgactttatggttgtggggtctttccaccatacctgctgccatgtgagacactgcaaaaaagtggctcagaccgacaatcagcctgtgtggtgctgcacactttctaaagcacatgctcctgacactttgaccttaaggggcttgaatgtggagtaatgggaacacaagccaagcaagcactcagtagaattcagtcatttaaaaaattcaatggggtcattcttttggacagacctcagcaacacagcaatgtgcactttgtagtaaagaaataccaacttgagtttttaaaaaacctagttagtcctacattcccttttctttaaaaaaactttattgttcacattattttaatgactatgagataatgtatatgacagcactttgagaaaatatcaactgtaatataactataaggttgtagtattgtctgtttaaaagataagacagttgattcaatgtggatggaccctgtggggtacctgaaaatgtagatacgtaagaatcacctctgtcatttatcacatttagaaatatgaaactgcttaacaggtatgagcaggtatagcaagtgtttgctaaagttgtagttcagagctgaattacttcaggaaactagggaccaactttttggtttaattccgatctttaaaaagtaagaatgtgtactcactccagaacacagaagctcttccaaggaccttgactcaagaaggatgaggtcctcttactcttctccatttatccactatatgcttggccatttatcctaaatgtggtgggaacagacttgttatctgttgatgttgacagtgtcttttttaacctatgtcctgcatagttttgttaggtttacagggggaggtggatggccataaaaccagtgcactttgggaattacttttctaggatttcctaccagttataaatgacattgacatttgtcatcttttttttctttttctaaaaagaatagctgaatttaattcacctattataaaatactcaaaagtaaattgccttggtggccacttctgaattatagctacatttcattatgaccccttctgctcccttccattttgctactgatgtcattcttgttatcaggctgtgcccctaccaggagttcatattgggttgacagggttatctatatttttgttcttgatttttgagtttcatcatcttgcattaaattgttccacctggatttggggttcatctctgtgccctaaggatctgctatgaccaatcctctttttgtaggtgggtctctggcttaagtattgataggcttcagcggtttgtgtctctgtcttagcttgtatcaagccagtagtagctcacttcctttgtaaattcctgcttcagtctgggatccgtaggagtatgtgagaacttctgaaacgtctccaactcttaacagtcaagatatctatatcatttggatagagttctggttttccaactactagacttaaagaaattctggccgggtgcggtggctcacgcctgtaatcccagcactttggggggctgaggcgggtggatcacgaggtcaggagattgagaccatcctggctaacacggtgaaaccccacctctactaaaaatacaaaaacttagctgggcgtggtggcgggcgcctgtagtcccagctactggggaggctgaggcaggagaatggcgtgaacccaggaggcggagcttgcagtgagcccagatcgcgccactgcactccagcctgggtgacagtgagactccgtctcaaaaaaaaaaaaaaaaaaaaaaaaaaaaaaaaaaagaaattctaatgcaaagcttgctttttttttcttttttccagcaagccagtagtaatagttattgttacttgctctgttcagcacaactgtagttcacttgaacttcactgtcattccctacgctcctctcttactgagaagcatgggtgggattcagggctgtgggacaagctacagcctactctggagcactcacccccatgactcagtccagcctgtctcttgggaagtttattgcaatgtgcagacggatgaatttctgcttttcatgccacctctctgaggtatgtattctatcttgagtatgtacaagatgataccttttggctgggcacagtggctcgtgcctgtaatcccagcactttgggagaccaagatgggcggatcacttgaggtcaggagtttgagaccagcctggccaacatggtgaaaccccgtctctactaaaaatataaaaattagccgggcgtagtacatgcctgtaatcccagctactcccgaggctgaggcagaattgcttgaacccaggaggcggaggttgcagtgagctgagatcgcgccgctgcactccagcctaagtgacagagtgagacacgttaagaagaaaaaaaaaaaaaaggataccttcatttctgactcaatatcctagatccaaaggacaggaaattagggaaggcttcaccctgtgggatcaagataagaagatcccatacttcttcccaggtaaggaggcctgtggcaggtcatgattcaaagctgacttggaatggcagaaactgctgagaggccacccttggagatttgtgccttcaaagatgggtttcatgagtctcagagaggaaaagacttgtcagctgggttgattttgcatgattattgaactagagctggtagacacgagcttctcagatggcagtggccagatcctccatctgtgagaatccgccacttgaagtggtttcctgagagtgttcacttggcagttgctgcgtttctcaagcccacctggcgaggtctcgccggacccttccctccaagtgcacttacttcttcatccccatgtacatctctaactttgaaattgtttacctctcctacaaaaatcttaccttttgacctgagcagagtagcaaagccctgttcactctgagggagcagctggcgtgttgaaggggaaaggccaggcacagcactgtcctcagaccacaccatatttggagcagaattgtgatacatgtcatctgtgtctattctggaaggttctttgttcatcactgtactcgcatcagcaaattttcagggtcctacctgtcactccaggctactgagctgaaccctcagaagctgaggtctccgagcatgctaagtaaccttttagaaaagctggaggcaaactgtcgaatgctagcaggctttatgaaaggaaacataaggagtttgtgtagtcagaacttgcttaaatttgcttcggaattaggcaccataaactttagttggagaatgggacttaaattttcacatatatgtatacttaattttcagcaattatgacacaataaaaagaatatgcaaatttattgttgtttcagaaggttttgcaggactgggaacgctttagtgtcatcaacagtaaacctcagatactgttctgcacagttcagaagtaccataccaggtattgtgagtggcaagaacgccaggggacagagatgcttctggtagatgagggccagagaaaccagctctcctccattttgacagcaatttctcactgtggccatttggcctccattatgttttgagaggaatttcttgagatcttgagaaatcaccatgattaggccaattgtcaatcagtattcagaaactagaaaggaacaatgagatacttgtttatggttctttagggcatatgtttgaaaaccctctcatctcagatctgtatagctggtgtgtgtttgtgtccataaatacacgtgcattgctgtcgtgcccattaagaaagggggagtaagtaaaagaggaatcgctcagatctttccttggatgaacagcagtggcgtggttggtgtgttgactgtgaacaggctgacttagctgttgatgtatactcagaacctccatctcctcccagaccctgcacttttccttctctgcagtctgattctctaatgactgtcactggacaaaccccagttttatgctcgcttagtaaaaataagtttaaacatttcatggtggttgacagaactttgtccccaaacatgcggattcaattctttaaaactcgttgaacgtttataccaaaggtcccgccccgcaggtgtgtatgtggtgcacagagggtgaggtttggagcatcgggcactgtgtgcattgctaaggggacatagtgagacaatgtgggatttaactaaaaacacatcaattgtgtgtcacattaccagtgttgtcaggtatttgttcttaattgttattgtaatatattttcagttgtttttctaatttaattctctccgtctgttgtctgactgtgaactgctaacagtgttaaacttgatgtaaataaatgaggcccttgaaagggactgctttctctgtcttctcacaaggtttgccaagttgtgttctgttttaaataaaggttgcaatattttattggcaaagtaaaaaaaaaaaaaaaaaa

SEQ ID NO: 301 - DNA, 7812 bp, Homo sapiens
attaacgtgacagtgtcaggtggacccacagccatcccacctccccctctggggagtgctgagagtgaggcagcatggaggagaggaagcatgagaccatgaacccagctcatgtcctctttgaccggtttgtccaggccaccacctgcaagggaaccctcaaggctttccaggagctctgtgaccacctggaactaaagccaaaggactaccgctccttctatcacaagctcaagtccaagcttaactactggaaagccaaagccctctgggcaaaattggacaaacggggcagtcacaaagactacaaaaagggaaaagcgtgcactaacaccaagtgtctcatcattggggctggcccctgtggtctccgtacagccatcgacttatccttactgggggccaaggtggttgttattgagaaacgagatgccttctcccgcaacaacgtcttgcatctctggccattcaccatacatgatctacgaggtctgggtgccaagaagttctatggcaagttctgtgctggagccatcgaccatatcagtatccgtcagctccaactaatacttttgaaagtagccttgatcctaggcattgaaatccacgtcaatgtggaattccaaggacttatacagcctcctgaggaccaagagaatgaacggataggctggcgggcactggtgcaccccaagactcatcctgtgtcagagtatgaatttgaagtgatcatcggtggggatggtcggaggaacaccttggaagggtttcgtcggaaagaattccgtggcaaactggccatcgccatcacggcaaattttatcaaccgaaatacaacagcagaagctaaagtggaagagatcagtggtgtggcttttatattcaaccaaaaatttttccaggaactgagggaagccacaggtattgacttggagaacatcgtttactacaaagatgacacacactatttcgttatgacagccaaaaagcagagtttgctggacaaaggagtgatactacatgactacgccgacacagagctcctgctttcccgagaaaacgtggaccaggaggctctgctcagctatgccagggaggcggcagacttctctacccagcagcagctgccgtctctggattttgccatcaatcactatgggcagcccgatgtggccatgtttgacttcacttgtatgtatgcctccgagaacgccgccttggtgcgggagcagaacggacaccagttactagtggctctggtcggggacagcctcctagagcctttctggccaatgggaacaggaatagcccggggctttctagctgctatggactctgcctggatggtccgaagttggtctctaggaacgagccctttggaagtgctggcagagagggaaagtatttacaggttgctgcctcagaccacccctgagaatgtgagtaagaacttcagccagtacagtatcgaccctgtcactcggtatcccaatatcaacgtcaacttcctccggccaagccaggtgcgccatttatatgatactggcgaaacaaaagatattcacctggaaatggagagcctggtgaattcccgaaccacccccaaattgactcgcaatgagtctgtagctcgttcaagcaaactgctgggttggtgccagaggcagacagatggctatgcaggggtaaacgtgacagatctcaccatgtcctggaaaagtggcttggccctttgtgcaattatccatagataccgccctgacctgatagattttgattctttggatgagcaaaatgtggagaagaataaccaactggcctttgacattgctgagaaggaattgggcatttctcccatcatgacaggcaaagaaatggcctccgtgggggagcctgataagctgtccatggtgatgtacctgactcagttctacgagatgtttaaggactccctcccctctagcgacaccttggacctaaatgccgaggagaaagcagtcctgatagccagcaccagatcccctatctccttcctaagcaaacttggccagaccatctctcggaagcgttctcccaaggataaaaaggaaaaggacttggatggtgctgggaagaggagaaagaccagtcaatcagaggaggaggaagctcctcggggccacagaggagaaagaccgaccctggtgagcactctgacagacaggaggatggacgttgccgttgggaaccagaacaaagtgaagtacatggcgacccagctgctggccaaatttgaagagaatgcgcccgcacagtccatcggcatacggagacagcaacgggaaaaggagtgttctcggacctgccccaaaaaagtgatcaccctgtctcctccccctactccacctccctgtcgggcacatggcggccagcagacatacagggatcttgatgctgacaaccgtggcaagcagagcccccaccatgagaggccagagcctgaacctcctcgtcgattttttgtcgaccagtgggagctttctcttagtctccgctcctctgcccgccccgcctctccctcctccgactccctccgacagaagtatataaagatgtacacgggcggagtgagctcattggctgagcagatagccaatcagcttcaaaggaaagaacaacccaaagcccttctagacaagaaggaactgggctccatgaagaaggagttcccgcagaacctgggaggcagcgacacatgctacttctgccagaagcgggtctacgtgatggagaggctgagtgccgagggcaagttcttccaccggagctgcttcaagtgcgagtactgcgccaccaccctgcgcctctcggcctacgcctacgacatcgaggatggtaaattctactgtaagccacactactgctatcgactctctggctacgcacaaaggaagagaccggcagtggctcccctgtctggaaaggaggccaaaggacccctgcaggatggcgccaccacagatgcaaacggacgggccaacgccgtggccagctccactgagagaaccccaggtagcctcacttccttgtttggctgggtggcgcgtcactccctcggcctctgtgacaaggccaagggcatgagccagcacctccaaagcaacatttcttcattcgggcaacaagtggcccaaaaccctctggactcctttttcatgtgccagctgcttgcgttcggagtcccctttctctatggcctgtcggaggtgctggtgcaaatcagaggggagttccactggcaggctgtggcccagtgatggggccgtccggtgggcggcagagccgtgaagtgctgtccctcagccccgtcccgcaccatcacacctgagggcggcccaggtcctgtgtaggtagacaggagctcgcaggcgctcagacactgctcccatcacccgccctggtgaggccaaggccactcggccttcatgcagtttgcttccaagctcctctgacggcctggagctgtgttgattaagccccgtggtcttgttttgggttcaccttcacttaagattctgcgtcctgttccctgtcactgtgtgtggatgagctgtggctgctctcctgtctgccctgcaccgtgatgggacatgccctgtcctgaccccttggccactgggcttgtcatgaggtccaagccctcacctgtcccactttcatgaccacttccttgtgttgggaggtgaacagtaccatctctacctctacaaacacatttattcttgtcatagcatgacaggactcgcagggtttgtgggtaccaggcctgttgggaagaattatgtagattttccttaaaatggcctctctcagcaacttgtaaaacttgcctgtgagatgcgtccagagctccacaaactgctgggtgttctgaatgtcccacatacagctccaggtggttcacggcccagggtcactgtggcaagagggggccagcagggctgtgtttctgtctgtcacactttcctcttgttcaaaacacatgtatctcaagcagctatatacaaaactcataaaaattaaagatggtcagccagtgccaggaaatgtggaggaggagttggtcatagaatttccatggtgggacaagagaattacccatttggccttcaacgagaggttcccagagttgcatcctttcccttccctaacagctggttcatgtaggccttgtggtgctcattctgggagagggaagatgcgcccagaggctaggcggtgtgccctgggagccatgagaacccagccaagccaggtgaacgcagcttctgctactgcacgtgcccttattatcatctgagcaagttttttaagtaccctgcaggtgggaccaacattttatagccatgtttcaaccattaatgacttttaaaccttctacaatcttgaagatctttataatccatctttctcgtgaagtacccacaggcctttgcagctgacactctcagagcatgggcagaatcactggtagagaaaaataaccaaaggggtctagacagagactttggctttatgctatagaatgtacattcagttggagagagcaccaccttattagtctgggccctatttcatcagagatggattttgtgaggaacctgactactcagtagaacaactcaaaagaaactaaactttccatttcggtttggagtacagaacattttttaaaaagaattaaacacagtgaagtttaggttattcctgaatgacgccaggtttgctgactttcccatctggtcgaggttgccattcttgccatctaattgaaagtataatgggtttcaggtttttaggagttctaaagaattacgctttccatagagaataagaggaagaatgttctacatagtggggagagaggatgagggttggcagtgtggttaaagagcaaaaccaccaagaaagagtcagagccctgaggacgtctctgtccgcgtggttcttgattctgagccagaaggtgacttggtatagcacgggagttcaaaatgtggtgtcccaaaggaatcacagtgtggacctttacagttaatgacaggcactgtcccccagcttgggtggcaaaggccagtgagctcagggctgaggggcttaccctccggcagctcagagtccagaacatcttagtccggcagctcagaatcagggcaccttgcctcccggtgagctcactctgctgctagccttggtagaaaaggaacaggattatgggcagtattttatggctggcatgaaatagatacccttttctcctttgatagagatttccttctttaaatatgaaactgaagctttgaggacttaactagacttccttttgaaaagtttcagaaaagctcaggtgtggccaggcacgatggctcatgcctgtaatcccagcactttgggaggccgaggcgggcagatcacgaggtcaggagatcgagaccatcctggctaacacagtgaaaccccgtctctactaaaaatacaaaaaaattagccgggtgtggtgtggtggcggatgcctgtagtcccagctactcgggaggctgaggcaggagaatggcgtgaacccaggaggcagaggttgcagtaagtcgagatcacaccactgcactccagcctgatgacagagcaagactccatctaaaaaaaaaaaagaagaaaagggaaagctcaggtgtttcagggtcccagaatgtatgttgtagagaacagtcattagctcaggcccatggtaaccgcctctactgtgcactcgaccagtagaggcgatgatgacggcacttgattctcttgtgtgtaactcagccatcctccctagacccacgtcccaggaggcagggctggtaaagctatgactgggcagtgtttgacccagctgtgcttttactctgtgcctcctctttatattgtggcatttctctcttctcctttatgttctttttctttttatgccaaaattcttgctgttgccaaaacaaaaacaaaaaaacacacccacacccaattacaacctgcagttcaaagaaccactctaggtcggctttaaagtattgtctttctctggtaaccaaatctgtacctgctgcctaatttagtgtttgggggcattgtttacagtatttctgtttgtaatgtgcttttaatatagaaatcctcttttttgttcttaaatctatgaatgctgtgtttccaagcttatacttactactgcgtgttagtggtcctggcacagattttcttaccctggccttgtactgtccaccatgactttagaaaaagcttgaacaataggcagagaaaggaaatccccaaaagggattattttccccttggacatgagaagtttagttacaggtttcttgaattcgtttttgtccagaggaatcctctttttatctgatacggttgatgaccaaaaatgaagtagggaagccgaaggcatagccggaaaggaacagaagagctttttccccgagtgctcatcaccgggttcattaccggccagagatggacggggagaagcacgttagtttcctgtcatcttatggaaaagatgatctgaagttaaaaaatgaaggtcacaagtggcagttgcctgacccctgtccccagacattccttgcccgataaccatgaggttccatagttcggatcctgaatgggcctttaggaaatgcaggcctttcccacaccagctagaagggtagccaggcagtagaatttcattcaaccctagggttcccacctgacagagggaagttcggaagtcttactgcttcccacgtccccttcccttctaggcatttatggaaagctttttagtggagcaagagaattctacaatccagcttacctcccaccttaccccaagagccatagctgacggtgatgtgtgaatgtttatatataggtacacgtttgtatgtatatagatctaattgcacatatatgggtagatatttatttatatgttgcaccctaaattatagtaattataataattgtgaagctgtttctaaagctgcttgttcctggttctgagaaccacgggagcctcacactggggagccgtactccaggtcagggctttggggatgcacagcagcgtacgggcagcacgcctgtaaggaggtgagtgggtgggtgtctcagaaaatgggcagcacacccccaagaaagggccccaagagcagactaggaacgcagggggctgctgctgccaggacaccacggagagccgggcacccgcctcacatgtctcctgtctggctccactgagttagccgtttgagcccactcctatcttttggtggttagtgcatcttcagctcttttctgcaagacactggaacattcctaggctgtcccaaaaggagttccaccatagcctttaaggtccgagcagggcaccaaggggttcacttttctcccgagccattcagcttggggtgcctgcgggaggggcggacagccagccggcttcccggcggcggtacgagagcccaacaggagaggattagctgtgccaaggaacacgccactgctgcctgtctactgcccgccttctctccacttccatttttgcctttgtttttaacttgtgctcttgtgagttcttggtgtgtttctttgtgagtttttatttaattgtgtaactttgtttttgccgttgactgtgaaaccaagttgtcgtgcttttaattttttttttaacaaatgttacattcttatttaagagaataaattccaaacaatcttcggaaaaaaaaaaaaaaaaaa

SEQ ID NO: 302 - DNA, 7154 bp, Homo sapiens
gcgcagaggcgtcacgcactccatggtaacgacgctcggcccgaagatggcggccgaatggggcggaggagtgggttactcgggctcaggcccgggccggagccggtggcgctggagcgggtctgtgtgggtccgaagcgttttactcctgttgggcgggctccgggccagcgccacatctactcccgtctccttgggcagttcccctccctgccggcaccacgtcccctctgacactgaggtcataaataaagttcatcttaaggcaaatcatgtggtcaagagagatgttgatgagcatttaagaatcaagactgtctatgataaaagtgttgaagagttgctccctgagaaaaagaatcttgtaaagaacaagcttttcccacaagcgatttcttatttagagaagacttttcaggtccgtcgacctgcgggcactatcttacttagcagacaatgtgcaacaaaccaatacctccggaaggaaaacgatcctcacaggtactgcaccggggagtgtgccgcacacacaaagtgcggccccgttattgttcctgaggaacatctccagcaatgccgggtctaccgtgggggtaagtggcctcatggagcagtgggtgtgccagaccaagaaggcatctcagatgcagactttgttctttacgttggtgctctggccaccgagagatgcagccatgaaaacatcatctcttatgcagcctattgtcagcaggaagcaaacatggacaggccaatagcaggatatgctaacctgtgtccaaatatgatctctacccagcctcaggagtttgttgggatgctgtccacagtgaaacatgaggttattcatgccctgggtttctctgctgggctgtttgcattctaccatgataaagatggaaatcctctcacttcaagatttgcagatggcctcccaccttttaattatagtctgggattatatcaatggagtgataaagtagttcgaaaagtggagagattatgggatgttcgagataataagatagttcgtcacactgtgtatctcctggtaacgcctcgtgttgttgaggaagcacgaaaacattttgattgtccagttctagagggaatggaacttgaaaatcaaggtggtgtgggcactgagctcaaccattgggaaaaaaggttattagagaatgaagcgatgactggttctcacactcagaatcgagtactctctcgaatcactctggcattaatggaggacactggctggtataaagcaaattacagcatggctgagaagttagactggggccgaggaatgggctgtgactttgtcaggaagagctgtaaattctggattgatcagcagagacaaaagagacagatgctgagcccttactgtgacacgctcagaagtaacccactgcagctaacttgcagacaggaccagagagcagttgccgtgtgtaatttgcagaagttccctaagcctttaccacaggaataccagtactttgatgaactcagtggaatacctgcagaagatttgccttattatggtggctccgtggaaattgctgactactgccctttcagtcaggaattcagttggcatttaagtggtgaatatcagcgcagctcagattgtagaatattggaaaatcaaccagaaatttttaagaactatggcgctgaaaagtatggacctcattccgtttgtctaattcagaaatcagcattcgttatggagaagtgtgagaggaagctgagttacccagactggggaagcggatgctatcaggtttcttgttctcctcaaggtctgaaagtttgggtccaagatacttcatatttgtgtagtcgggctgggcaggtcctccctgtcagtatccagatgaatggctggattcacgatggaaacctgctctgcccatcatgttgggacttctgtgagctctgtcctccagaaacagatcctccagccactaacctgacccgagctctgccacttgatctttgttcctgttcctcgagcctggtggtcaccctctggcttctgctaggcaatctgtttcctctgctggctggatttcttctgtgtatatggcactaggaatggaaaagtggatcttcaagatattcttttatgttatgttcttgtgaacaaagcacaaagtttgagtgagtgccaacctatgcagatggtagaagtggcattcctggctttggcttggaagaattgacgaccatcagaccttgaagcagaacttcacagcagcctgtcctcatcagcaacccaaccaccttcatcagcaacccaaccaccttcatcagcaacccaaccacctcgtcagcaacccaaccacctcgtcagcaacccaaccacctcgtcagcaacccagccaccttcatcagcaacccaaccacctcatcagcaacccagccaccttcatcagcaacccaaccacctcatcagcaaaccaaccactttcatctgcaacccaaccactttcatcagcaactcaacaccttcatctgcaacccaaccaccttcatcagcaaaccaaccaccttcttcagcaacccaaccacctcatcttggagaaggagaaggaactgcaagccaccaagtcttcatttttcagggtttgtaatcttcccaaagttttcctttgaaaataggataatgggtggaattttcagagtgattacatacctcaacatttttattaacatacaacaatgggaaagttcatcatccatatactgcagtcacttaaacaacagccaattattgcaagattagaattggagatcttgtcctcaaaagtataaattgtcctttgagttatagaaaataatggaattgggatttctacatatcattattatacctattttaaatttaatggcagccaggcatggttccagctacttgggaggctgaggcaggaggatcgcttgagcccaggagttcaaggctgcagtgagctatgattgcaccactgtattccagcctgcacgatagagttagaccctgtatcttaaaaaaaaaaaaattaatggctggtatatagtaaacttaattcactgttcccattgttctaaagaatttttttaaataatgtttcattaaatcttatgatttaaccgtgcttgccctttttgccagctatgtggcagtttacggcagaactgctgtcagtgtgctggtagccctctattcatccctcctcagagcccagcttccagaactgctatcactgtgctggtagccctctgtattcatccctcttcagagctcagcttctggttgtattctccatgagtttaataatgacatgaaaaaatgtggaagccgagagagtaaaatactctgccctgtaaaaacatggaagacatgcaaacagaaaaaaaataattgtattgttttagataatacttaagacaactgtgaaacaacaaaaacacaactattcctttgtgaccgatgaagataaaaagaaattctggtaaagacgggtatgcagttttttaaaatgggttaagaaattgttgcagaagaatttctaacatctgaaaatggttttatgtttaagaaggatggtctgaattgtgtactaatagcaaggtataagtttggtgtagagcctatccagtagcgtccactgtaccacttttaagtaagactcagtccacagaagctggaagattgccttcgctttaaatatcctttaccttctgcatttgacactcctcctgttactacatagattccggtccccagaagcaattttacactggtactagagcttaccagccccatttagtaatttttaatggctagatgaggtttaacaagaatatgaaaagaaaaaagaaaaaatatattcatgaatgataggcgatgcccattctttctctcaagctaatgaagtcctatggcattctaaccacaaccctcggacagactcctcctattcctccatggcattgtaaccacaaccctcggacagactcctcctattcctccatggcattgtaaccacaaccctcggacagactcctcctactcctccatggcattgtaaccacaaccctcggacagactcctcctactcctccatggcattgtaaccacaaccctcggacagactcctcctactcctccatggcattgtaaccacaaccctcggacagactcctcctattcctccatggcattgtaaccacaaccctcggacagactcctcctattcctccatggcattgtaaccacaaccctcggacagactcctcctattcctccatggcattgtaaccacaaccctcggacagactcctattcctccatggcattgtaaccacaaccctcggacagactcctcctattcctccatggcattgtaaccacaaccctcggacagactccttctgttcctcctttcctcgtccttccctgcttttcgtccattcagcatatagctattcagtactccattgaagaaattatgctaagtgagcaaagcaacataattactaagaattaattctgattatttggcactagagccaacagcaaccccagcacagaggaaagtcgcttttttttcaaatgcataaatttaaagtatgtatttgcatgcagttttaaatgggaggtatttgtcattgtgaaaagctgggaatctcaaacatagtcaacttaactaaaaagaagctaatacaggttgagcattcctaatccaaaaatccagaatccaaattgctccaaaatctgaaactttctgaatgctgacctgatactacaagtagaaaattccacatacaagtacttaacacaaactttgtttcatgcacaaactactaaaaatattgtataaaattaccttcaggcagtgtgtgtagttatatatgaaacatgaatttcatgtttagacttgggtccatgcccaagatacctcattaggtatctgtaaatatccgaaatccaaaaaaaagtctgaaatctgaaacacttctggtcccaagcatttcagtaagtgatgctcaacctgcgtaatggtctgcgggccagtgctcattttctgcctatgttgtacatactttaaattgtgtaaattaaaagtcaaagcaaagagtctatttttaaagaaacttacaataatctaaacatatacttcttatgattatgaatcatcctgcaaagctgaatgaagaattttaccaaaaatacaatgaattaatcatatatttgagagtcacagtgataggttcgactatattttgactgttgtgtagtggcaccgtttaggtagtattgtttctgagcatggtgctttttatacttgaaatatatttttgctttattttttattgatataattatatttgcactaatggctttctgaagaaaatattatagatgacattttttgtatatatatttattaagcttgggaacctggtcgcccagtgttttctctggacaaatgtgaaactggataaagtatggataaagtcttgagttcctcagggtaactgtgttgatgtctcccgtcctcttcagtaaggcttgaatatgattttactcatcattgattctgcatagtgtacccagcaagacttagaaggacactgaacctgtcagagattttaagaggcacattttagtcactttgaatatggtagtggtgggcgcggtgactgaagcctgtaatctcagcacttcgggaggccaaggcaagcagatcacgagatcaggagtttgaggttacagtgagctgatcgcaccactgcactgcagcctggatgacagagtgagactttcttgggaaaaaaaaaaatgacagtgaagcagacttttagaatccgagatgtcattgcagaattattggtataaaattcagctgcaaagtgaagaaattgaaatggcccacacgttgatatcctgtggcaggttatacccttcatgttagcaaagacgaagccacgtcgctgtgttaagagggacaggctgggccggctgcagctgtagtggaagtgagggacacagggaaggaatggggagcagcaatttggggacagtagactggagtcactttctgactcaaaaagggtcaagtacttattaaaaactatcttggttttctgttcagacttaggctcattttgatcattttaaggtcccagttgtcaaaaatatcaagtgaatttgtctcaggttttcagaaacaaaatttacaggaaggaagcaaaagccatgtcagtagccttgagctgacagctttaaagaaactggcaaacaggtaggttgtcctcatatagatccttccagtattctgaaaaacatccttttatttcttaaaaccagtaacccttacatttttcctataggatagttatttttgttgagatcaaatagacattctataaatgttataaattatgcttgcagttactcagcctatctaggcttaaggtttatcaatatttgaagttgaaacatcatcttatgaggtttagttttaggaagataaataaatatatcaaagtatttcataaagttgtatcaatgttccttctaacattagaagacttactgactgaggccatctgtgaacgactaggtgatctcagaatccttccagctctaataccctctgactaacactcacccagaattgctgtctgtgctggctgtgatctgcctccaggagcatacgccatcctgcgtgctgtgtccatcacagtgtctgtgctcggtgccttaccactgtccgtgtccttggacgctgactggacagagaggagcctgtctctcagggcacatgagtcgtcgtggcaggaggagacgggcctcagtcacagtgtcacagacccttgtcacagtggacactagtcattcctgccatgtccttgcagcccaggaggactaaaaagattttaatgaagtctgtgttactcattctgaagaaaagaacttacctgagaggagtaatatttttttaatatatattgggtcagggacagggatggagtggttgttttatgtttacatttttaataagtaaaatagaagatttaagaactaatatttatggtattgaactttaagtgtgatatattccttagaaaaacacaactttaataaaaatggaaactaa

SEQ ID NO: 303 - DNA, 3691 bp, Homo sapiens
gtaactgaagtcaggcttttcatttgggaagccccctcaacagaattcggtcattctccaagttatggtggacgtacttctgttgttctccctctgcttgctttttcacattagcagaccggacttaagtcacaacagattatctttcatcaaggcaagttccatgagccaccttcaaagccttcgagaagtgaaactgaacaacaatgaattggagaccattccaaatctgggaccagtctcggcaaatattacacttctctccttggctggaaacaggattgttgaaatactccctgaacatctgaaagagtttcagtcccttgaaactttggaccttagcagcaacaatatttcagagctccaaactgcatttccagccctacagctcaaatatctgtatctcaacagcaaccgagtcacatcaatggaacctgggtattttgacaatttggccaacacactccttgtgttaaagctgaacaggaaccgaatctcagctatcccacccaagatgtttaaactgccccaactgcaacatctcgaattgaaccgaaacaagattaaaaatgtagatggactgacattccaaggccttggtgctctgaagtctctgaaaatgcaaagaaatggagtaacgaaacttatggatggagctttttgggggctgagcaacatggaaattttgcagctggaccataacaacctaacagagattaccaaaggctggctttacggcttgctgatgctgcaggaacttcatctcagccaaaatgccatcaacaggatcagccctgatgcctgggagttctgccagaagctcagtgagctggacctaactttcaatcacttatcaaggttagatgattcaagcttccttggcctaagcttactaaatacactgcacattgggaacaacagagtcagctacattgctgattgtgccttccgggggctttccagtttaaagactttggatctgaagaacaatgaaatttcctggactattgaagacatgaatggtgctttctctgggcttgacaaactgaggcgactgatactccaaggaaatcggatccgttctattactaaaaaagccttcactggtttggatgcattggagcatctagacctgagtgacaacgcaatcatgtctttacaaggcaatgcattttcacaaatgaagaaactgcaacaattgcatttaaatacatcaagccttttgtgcgattgccagctaaaatggctcccacagtgggtggcggaaaacaactttcagagctttgtaaatgccagttgtgcccatcctcagctgctaaaaggaagaagcatttttgctgttagcccagatggctttgtgtgtgatgattttcccaaaccccagatcacggttcagccagaaacacagtcggcaataaaaggttccaatttgagtttcatctgctcagctgccagcagcagtgattccccaatgacttttgcttggaaaaaagacaatgaactactgcatgatgctgaaatggaaaattatgcacacctccgggcccaaggtggcgaggtgatggagtataccaccatccttcggctgcgcgaggtggaatttgccagtgaggggaaatatcagtgtgtcatctccaatcactttggttcatcctactctgtcaaagccaagcttacagtaaatatgcttccctcattcaccaagacccccatggatctcaccatccgagctggggccatggcacgcttggagtgtgctgctgtggggcacccagccccccagatagcctggcagaaggatgggggcacagacttcccagctgcacgggagagacgcatgcatgtgatgcccgaggatgacgtgttctttatcgtggatgtgaagatagaggacattggggtatacagctgcacagctcagaacagtgcaggaagtatttcagcaaatgcaactctgactgtcctagaaacaccatcatttttgcggccactgttggaccgaactgtaaccaagggagaaacagccgtcctacagtgcattgctggaggaagccctccccctaaactgaactggaccaaagatgatagcccattggtggtaaccgagaggcacttttttgcagcaggcaatcagcttctgattattgtggactcagatgtcagtgatgctgggaaatacacatgtgagatgtctaacacccttggcactgagagaggaaacgtgcgcctcagtgtgatccccactccaacctgcgactcccctcagatgacagccccatcgttagacgatgacggatgggccactgtgggtgtcgtgatcatagccgtggtttgctgtgtggtgggcacgtcactcgtgtgggtggtcatcatataccacacaaggcggaggaatgaagattgcagcattaccaacacagatgagaccaacttgccagcagatattcctagttatttgtcatctcagggaacgttagctgacaggcaggatgggtacgtgtcttcagaaagtggaagccaccaccagtttgtcacatcttcaggtgctggatttttcttaccacaacatgacagtagtgggacctgccatattgacaatagcagtgaagctgatgtggaagctgccacagatctgttcctttgtccgtttttgggatccacaggccctatgtatttgaagggaaatgtgtatggctcagatccttttgaaacatatcatacaggttgcagtcctgacccaagaacagttttaatggaccactatgagcccagttacataaagaaaaaggagtgctacccatgttctcatccttcagaagaatcctgcgaacggagcttcagtaatatatcgtggccttcacatgtgaggaagctacttaacactagttactctcacaatgaaggacctggaatgaaaaatctgtgtctaaacaagtcctctttagattttagtgcaaatccagagccagcgtcggttgcctcgagtaattctttcatgggtacctttggaaaagctctcaggagacctcacctagatgcctattcaagctttggacagccatcagattgtcagccaagagccttttatttgaaagctcattcttccccagacttggactctgggtcagaggaagatgggaaagaaaggacagattttcaggaagaaaatcacatttgtacctttaaacagactttagaaaactacaggactccaaattttcagtcttatgacttggacacatagactgaatgagaccaaaggaaaagcttaacatactacctcaagtgaacttttatttaaaagagagagaatcttatgttttttaaatggagttatgaattttaaaaggataaaaatgctttatttatacagatgaaccaaaattacaaaaagttatgaaaatttttatactgggaatgatgctcatataagaatacctttttaaactattttttaactttgttttatgcaaaaaagtatcttacgtaaattaatgatataaatcatgattattttatgtatttttataatgccagatttctttttatggaaaatgagttactaaagcattttaaataatacctgccttgtaccattttttaaatagaagttacttcattatattttgcacattatatttaataaaatgtgtcaatttgaaaaaaaaaaaaaaaaaaaaaaaaaaaaaaa

SEQ ID NO: 304 - DNA, 2605 bp, Homo sapiens
gaaacccgtcggctctccggcgcgcaggcgcagttgcgcccggcagcgacgggaaacgtctctgaattaggtgttccgctcgcctcttgtgcggtgtggagctgcgcgccccccgccgaggcgggcccaggtgccttctccaagagaggcagcagggagggagaaatggcaaggaggttgctgccagcccatgtacaggagtccgtgacgttcagggatgtggccgtgttcttcagccaggacgagtggttgcacctggactctgcccagagagccttgtaccgggaggtgatgctggagaactacagcatcctggtctcactggggattctcttttccaagccaaaggtcatctcccagttagagcaaggagaagacccctggatggtggagagtggagttccccaaggcgcacatctcggatgggaaagcttgtttggaaccatagtttctaaagaagaaaatcaggaagtcatgaaaaaactcataattgatggcacatttgacttcaagttggagaagacctacataaatgaagataagttagagaagcaacaaggcaaaaagaacagacttttcagtaaagtgttagttaccatcaaaaaagtctacatgaaggagaggagctttaaaggtgttgaatttgggaaaaatcttggtctaaaatcatcgcttattagaaaaccgagaatagtttccagaggaaggagaccccgttcacagcagtattcagttctctttaaacaactgggggtcaacacagtgcgtaaatgttataaatgtaatatctgtgggaaaatcttcctccacagttcctccctgagtaaacaccagagaatccacactggagagaagctctataaatgtaaggaatgtaggaaagccttcagccaaagctcatccctaactcagcacttgagggttcatacaggagagaaaccttatatatgtagtgaatgtggaaaagccttcagtttcaccacatctcttattggacaccagagaatgcatactggagagagaccttataaatgcaaggaatgtggaaaaacatttaaaggtagttcatctcttaataatcaccagcgaattcacacaggagagaagccctataagtgtaatgaatgtgggagggccttcagtcagtgctcatctctcattcagcaccacagaattcatactggggagaaaccgtatgaatgtactcagtgtgggaaagccttcacttcaatatcgcggctaagtaggcaccatcgaattcatactggagagaaaccctttcattgtaacgagtgtggaaaagtattcagctatcactcagcccttatcatacatcagagaattcacactggtgagaaaccatatgcatgcaaagaatgtgggaaagccttcagccaaagctcagctctcatacaacatcaaagaattcacactggagaaaaaccctacaaatgtaatgaatgtgggaaagccttctcttggatttcacggcttaatatacatcacagaattcacactggagagaaaccatataattgtaaggaatgtggaaaagccttcagttcccactcaggcgttaatactcatcgaaaaattcatactggagaaaaaccttataaatgtaatgactgtgagaaagccttcaaccaaagctcagctctaattcagcaccagagaattcatactggagagaaaccatataattgtaaagtgtgtgggaaagccttcagacagagttcatcccttatgacacacatgagaattcatacaggggaaaaaccttataaatgtaaagaatgtgggaaggcttttagtcagagctcatctcttactaatcatcaaaggactcataattgagaaaaactgtataaatgcatgtaggaactgaagttatattccatactgagtatcaaaaaattcattgtggggagaaagtgatgaagagtagttaatcataggtaaaacttcagcattagacctcatcacacatcagagacttcatgatgcagggtaaccttgggaatgctagaaaagcttctataaaatgtttattcatatgttcttaagttattaccatgaaatggagaatttttaagattgcagggttagtatttgattgtctagtgatgtacgataacagccaccagctttcctgagcatcactgggaagcctgctgtttatgtacaagtacagccataaaatccagacacagataaatctaggaatctattttttgaaactattatgcaagccagtggtactagaaagaatgttttagaaaagaaatatgtacaggtgacccatagctacctcactgtcactaaaatgttttttaataatcttaaagcagattctgcacttcatggtaaagactttgaattgtttctctgctttctaagccattcacctgagaagaaaatcactccataaactatgcagacgtactgtctttgcgttttcttcctgactacttgttccaaactctgagtcagatctaaagtcactttaagtcacagaacgcatggtatttcacttgtttttctcattaaaagtgattacctttgctgtattaaattgataagtaaaggtcattcagacaaccaa

SEQ ID NO: 305 - DNA, 3701 bp, Homo sapiens
aggcgctctgaggggcggaagcggagaggcggggctaggcccgacaggggagcggaagaggcccaggaggctgggtgaggcgctgagacggtttggcggtgagtcctgggccaggcgcagctgaaaggcccgcaacccgggaaacgtcaaaacaaacagaaggacttgggattccggagcagtcgcccctatcgctgctcctgcagttgcggacgccaccgaccccgccgccggaggactgggcactgaaaggcctctaggcctaggcgcggcccgcggagccagacgtgttgctgccgtgagtaaaacgagcgccctctccgcactcgtttacaaattaaaatggaggaaatttcgttggccaacctggatactaacaagctagaggccatcgctcaggagatttacgtagacctgatagaggattcttgtttgggattctgctttgaggtgcaccgggcagtcaagtgtggctacttctacctggagttcgcagagactggtagcgtgaaggattttggcattcagccagtggaagacaaaggagcgtgccgcctcccgctttgctcccttcccggagaacctgggaatgggcctgatcagcagctgcagcgctcacctccggaattccagtagctgcaaaatgagagtctgaaagtggccaggacaataacatagactggtcctgtggcttcgaggagtaagctaagtagaaaaaagtagaaaaatcagacaaaagttttaattcccccttgaagatcctagcatttaaaaacccaaagtggataatttaggaatcctttttttaaagtgtattacctggagcaagctctgaagccctgggcaggaggagctgcacagcctgcgggccatgcagtgcctgttgatctctaaacacaccaggatgtgcgcaagatcctgtagtgcccccagtgcacaggtgagcagttgtgtgcccagcatataaaatttttggttcctcagcctttctgtctgcctgatgtcaagggcttcctggacagtttggacgttacagttcgtcaggccgtgatcagtggcctgcagtgggactgctcctttgatatctgaacctctgttatgggcttctctgagacaagtaaatgtcaggtgcaagatctggatactaacagtttcagtttgggaaatccaagaaaaagaattatcaagtttgatagggaagctctgtagccttgactccagcaagaagaaaaggtcaaaaccacgtgtttcccaaaagtccagactacaatgattcagctgacttgaggacaaggcctagcatttggctgagcagagccctcttccttgccctccaacctggtggcataggcttggcaaatggacaacttggttgtccagacaggttgaggattcggttatgatcccctggggaggtagcagggacctctgcaactatgcatgatttctcaaacttcaagattcatgtctggatgtattatgctgtggatataagtttagtagggcggtcatttcctactctgagttactggttacctagccagtccatgggtgtgacttggtccttaagtcaggtcactatctgcctcccaccctgggggcaggactgaagtatagaagagcatcatggctgtgcaggaggctgtggtttgaaaactgagcccagagggcactttcagctgccctcaataatgtgaatggattagtgctaggagccaaggagcaggactggattatctcatctgactgtgtgcagaatcctgttgaatgtccctgttttctttggttgggcagtcagagctctgctatggtgaacatccagactgtcaccactttctgtctgccgctcgaaagggatagtcctttccactcggtcccctttggatcttcttgacaacaggagcagtccttttattgttagaagtcagagaaagacctccagaatctcctgactttagggaatggtataggggaagatgggaagtaagagtcacatatcaaaactaccctccactttattccctgagcgagggtttatgaagtataaaggggtgggagccccgaggtgagcgggaacggtgctgctttatttgaaatgttttcttacctcattctgtgccccagtagggggtccagcctcatctgtctggcttggccctgtgttcctcctgtcccctgctccactgcctatctggtgccccaggtgctgcttgccactccagctgtcacattgaacagtttcaattcagctcttaatgctcctgcttccgaagcctgcccaatttcttttttcttggcctctgttttttttttttctttctttttcccttgtttttgtagaagactcagaggagaatctttcttatggctccctctgttgagattggaattggaagagaacttaattttttgtatttaaaatgcagtgtcatgcctataagcatttctcctatataggactgctttgctagtgtgccctcttgctgtgtcttacttcataaggagttgtatcttcccacctccatttcaatactgccggttaggacctaagtagaagagcagtaaaggctgattgacacacagggggatggagttggtccttgtccattctctcacccttgctgtgcatgtatcaatccttatcccagaaggtactatttagactgtatagactgatttagattacatactttagaggattaaggaaaccatagagtttgggccttggaactgttactgccttgtcctagagttgtcctgatcaggcttggggcctagttacagattagtcttaaagaattgcattaacttaaaaaaaatcaaaccttggcaagagctaaaataatttggagatatctttgcccttgacttgtagacgacatctaagaggatgaagaaaggagagtctaagtgagactctggcctacttcctaacaatgtcttggaagtgggatgatggtaaaggagaaaggccacagtccaatccctctgccttcagatagggaactcaaatcctgaaattactgttttctttctggccttttctcctggttagaggaggaagcggaaagtagttttgagtaatactttgttcatattaccccccttttgttttttgtttctggcccctctaccaatagggcagtagcctcctgccctggatgggtataaggtgggcttggtccaacaggtgcccagagggtacatactcctttctggggagagaatgctccctaccatatagttgacagtggttaggaactctccctttccctacctaccttccttttaatagcagaattcctatttttcccttgattatgtgtattgatcaccctgcaatcctattatgtatctgagtgtgtgtgtgtgtgtatgtgtgtgttatgggggaaggggggggttctttaaaatttctgtggtttgtggctttttcttccatacattagttcccaccatcgcatgcccagggaccactgcctggcattatcgcatgctgggatcatcgggggagggtagtgaagctcaccactgtcctttgttttggagatttttatttttgcataagtagtccatcctatacagatagctgattaactgtattcccctttcccctatggctgctggtgtaaataaactgcatctccccattggtaaacagtaataaaattttaaaaaatgaaaaaaaaaaaaaaaaaaaa

SEQ ID NO: 306 - DNA, 4273 bp, Homo sapiens
ggaacatcggcggctgcccgggtgacttggttatatgtcacagaataacattcgagaatgggacatggaatgaggcgacggccccagcaagccccagcagccccagccccagccccaggcccagcagcagcagcagcagcccctgctctcccgccgcccggagaggctctgcagccatgaagccaaccgtcccgaggcaccgccggtaagcagggagcctccgcggagctcccgccgccgctcccccttggcgccaaaggcacccggtcccggagcagccacgcgcggcccgtgagcctcgccaccagcgggggctcagaggaggaggacaaagacggcggggtgctgttccacgtcaacaagagcggcttccccatcgacagccacacctgggagcgcatgtggatgcacgtggccaaggtgcaccctaaggggggagaaatggtgggcgccatcaggaacgccgccttcttggcaaagccttcaataccccaggtcccaaactacaggctgtcgatgacgatcccagactggctccaggcgatccagaattacatgaagaccctacaatataatcacacagggacccagttctttgaaattaggaaaatgagaccgctgagtgggttaatggaaacagcaaaagaaatgacccgagagtccttgcctatcaaatgccttgaagctgtcatcctgggcatctacttaaccaatgggcagccttccattgagcggttccccatcagctttaaaacctacttctcaggaaactactttcaccacgttgtgctggggatttactgcaatggccgctatggctcattgggcatgagccgcagggctgagctgatggacaagccattgacttttcggactctgagtgacctcatctttgactttgaggactcttacaagaaatacctgcacacagtcaagaaggtcaagattgggctgtacgtcccccatgagcctcatagcttccagcccattgagtggaagcagctggtcctcaacgtctcaaagatgctgagggctgacataaggaaggagctggagaaatatgccagggacatgagaatgaagatcctgaaacctgcaagtgcccactctccgacccaagtgagaagccggggaaaatccctgtcccccagaaggagacaggcaagccccccgaggaggctcggccggcgagagaagtcgcctgcactgcctgaaaagaaggtggctgatctgagcactctgaatgaagtgggctatcaaatccgaatttagccaagccataccggccagcaagagggtttctgtggtgcttctctctgcactttacccagcatcttcaggaggaactgcaactatttattaagaacttgtgaattttatttttaaggattcacctggaaatagaatctgagtgggtggtaaccattagctttaaaaaattcactaaaaggcaccatgaaaaggctgaagtaataagccccactggggttggactatgtccctcactcaagatcttaaggataaccgtaactgaagttttatatttttccatttacctactttcttttacttgctttgaacattatgcctcaccaatagtaaatgttcatgaaataatctcttgaacttttggtatagtaaggtaactctaacagtattactgtctttttcagcaataacagaaagcaaaaatgggtgggttttttttaagcagttattacctcagcattttgacatcagatatgcaaacttaatggcgttttgtttttttatattctatttgtattctttccccagtatttcccatggggatctccacaagtttggagttttttcctggtgcacacacgtgaggagatttaaggtactatatgcaagtgttttactaaaaagcactgaaattcttctggcaatacaagaaccattttcaggatcttggagttacttccttcttaatctttcttaaagcattcactgatgtttttgttttttcaaaatgaaacaaaaatatcacattgagaagctagtctatgttctgtcactaacatttaaactttgcagactctaacaaaaagcacaagaggtcacgtactattatacaaatttagcggtactggatttacctctgacattaacacactcaggcagagaccaggagtgatcagcaggtcttcagaaccaaaaaacctttctgttcacatttcatctgatttttaaactgaggcaggctttgattcttctgaaggatgccaagaatcaaactaagggaggactcactgttaaagatgtgttctgatgtcttatattaagaccaaatgtgacatgatgtgattatcttccagtactttgcttttaggtaccatttcatgacattttaggaatgagtattggaaaatataaagaattagaaaagcagcactttttttttaatggaaaagtcttcggtccagtgttacaccttatagtgtaattcagtccctaagcacagaatgaatgtctggcctgcatatggtagttacagtgtaacctctggctgcagaccacacaggacaaccctaacagcctagtcttgtatggtgtaaatatcaagagtacagcttcaatttcatttgctttatcttagcaacaatgccaactcaggagagcagacggccgatttcagtgaagtctggtagtcaacagatgttatttcagtctcagtgcatctcctctggctttctttgactgaaggtgtttataggaaggaagttaaaaaaaaaaaaagctcattgagattctttaccaattctttacaagatttctgggggtgacagggaaagcaaaaggacttcaaagcaaaagggtgcacaagagcttacttcaccctgaaaatcagtattattaatgaaaagtactgttttcttaaagaagtcgaatgtcctttagatgaacaagaccaagtatacatctccattagattaaaatgtagcacagggttaaaaattatcagtttaatctctttaagaacagtattatcagagtttaaaatgagttagctctgtttatctacacacagcaaacccattcgcagcctcttggccacatgtattcagatgtttgaaatagtgaatcatttcattttcattctaaaacaatactgacttagccatataccttctgtttgtcaatctgaaacttgcttacatctaataagtagacctcttataacactgcaaccattctaagagttggaatttatttttgccaagtattaagtactgttacatctaaaatacagaatgtcaaatggttgcatagcttgtttcccacaacaaggaggaaaagaacaggaatacaaactctgtaatatgctgataaagaagccttagaactgccaactggcttgatggttcaattagtaagctaatttctcccacacccgctccttgatttttagactaattttcccaaagcaaggtttagtcacacaaacttgaaagtacatttaaaatgttcttagttgtcatcctacttttattgcctatggaatatgctaatttctaaaaaaaatacgggagaggcaccaaacccctaaattctagtgcaataatttaaaaaacaaaaaacaaaacaaaacaaaaaacatgttatatgcacccccctcccaaagctgattttaagactggctagaattcaaaatataaaaaataaaactatgaagtgatttgaaatcggttttaaaaagttgttagtgcaagagaaattttatgtttaagccatcatggcaatatatgcaaagtttaaatgaatgacagaaatcttgattttagactgtatgttgtgctgttttgagtacactttatttcggagatatttagtattttctatacactctgaaatcatgagcatttcactttttctaagtcaattatttcataaggattttattaatagatattggtaaatagaactttggaaatcttaattcagaattcttactatacctgagtcttttgtaagctatagttttatgtacaaccttgtacagtttttttgacatacaattcagaactttgtttattctcttggactttgttctggccaatacattttttttaaatctttaagaagaactgtgattgttttagtgggtatttttctaattaaatgaaaacttgtataatggtattttagagaatgccagtaagtgcatgtttcaagttaatgtttttctcatcacttgtatgtttctaacacagcatgggactttaataaaaccatcctggaaacttaa

SEQ ID NO: 307 - DNA, 4576 bp, Homo sapiens
aaagcaggcggggcgttggagttcagatgttcgctcccgggataggctgccccggagagggagaggcggggtcggctgtatcacgtggatctgctcccgccgccgccgccgccgccgtcgtctttctctgtctcggctgaggcagccatctttctcttgccgcgtgctggtgttggaggaccctccctgcttcagggtacagctcgcagaaagaagaaggtggtacatagaacagccacagctgatgacaaaaagcttcagagttctctaaaaaaactggctgtgaataatatagctggtattgaagaggtgaacatgattaaagatgatgggacagttattcatttcaacaatcccaaagtccaagcttccctttctgctaatacctttgcaattactggtcatgcagaagccaaaccaatcacagaaatgcttcctggaatattaagtcagcttggtgctgacagtttaacaagccttaggaagttagctgaacagttcccacggcaagtcttggacagtaaagcaccaaaaccagaagacattgatgaggaagatgatgatgttccagatcttgtagaaaattttgatgaggcatcaaagaatgaagctaactaaaagtttggtttttggaagctggcatggactagatttaacaaatcagctatgtggttccaaagttttacagacatggagaacatcacctgttactagttcagtaatataaatattttgtatattaataatgctgtttgttcagcatttttcggtcatttgattttgcattttgcacttcctcccaggatatttttttggtcaaaatatgaagtattggtgcagtttgagggtgttttggtttttgattcctggtttttttgttttttgtttggggtatttttggtgtatgtatgtttatgtatgtgtgtgggtatgtgtgtatacagtggagagcaaattggaaaacagttctatttatcctcctccctccccagtagaaataaaaaaaatctttacatttgttacttttcttttccccccgtaagacacagaattaatggaaagtgagtatcttggatttcaaatctgaagagatttttaccattagtggtttgattttaatttgcttggttaactatcatatttttcatacacttctctggatttaaaatatcttgaggtattttgccactggcttcatgctggagtaatgggtaacatatctttggtatggttgccttagattaacttacctagtcagacccagaagaacttcttttactagcttgcttcctaaatgccttttttcctctccttttggtctccaaatggcctggtcagcttttggtaatattcttcctcatcttccacctagcttgagaaggatgttctccatatagagtttagcgagtgcctaatccctccttttgtaagattttgttccctcagcttgaggaacaacttcatcttcaactttttatttctccctgatgttacagtttggtagatttcaaactggaatagctagcatgtgcttgctaaataattttatgccagccttatcctgtatcctagctgttcttaacagcaggtacaaaaatgcctgtttttcagcaaggttgaaattgggaatgtccttttgaatcagaagaaaataggccatagactcatctcccagcacaaatgggcattctatgaaatggtactggccctaggaggatttcctcaaccactctcctactcttggccttgaacctacctctgggttggatcttactattgtagctgctcactataccctcctgcatgcttagaataatgctttgaggggagcactggtaaaacacagtatttatttttttacctcctttaagaggacttggaggtaagttgcattcattcactcaagtttccctcttgctgtctaatagaagcttactttttgctatatcagcatttgttacagccaatatttaaggacaaaatttagaaaatatatcatttcctggcccatcatcaaactaatacagcttaaccttgcagctaccaacttttgtgtcaagctagatatctttatttgatatctaaggtgcaagaccaacaatatattaagagatctgtagacatgaaggcaaagctcttgtattttttttcatccaaacacctcaatttattttataaattcgttcatttttcctgttatgttttatataatatatggactaaacaaaataaaataacagtgcaaaagaggagaatatttcctcttgtgcttttcttgatgttgtgtacagaatttccttttatattattcctctaccctccacctgtaaatgaatgttagtgcagtaattgtttgaaataatgcctcatccagtgttaggtcagtagctccacagtctacacagtccagaattctttctctaattgtcccaaagggggacattgtggaggcagagttagggggaaccacttcaagtggttagggacagataaataataggcagtatagcacatgaaagaaaacacacacttggaagccaggagacttgtgtcctagtcaaaactctggcattatgtgaccttggacaggtcatctaactactctgaaatttatcatcagtcaaataagattttattctgttttgttttgtttgagatggggatttgctcttgttgtccaggccgaactgcaatgttgtggtctcggctgactgcaacctccacctcccagattcaagcgattctcctgtctcagcctccacagtagctgggattttttttttttttttttgtatttttagtagagatggggttttaccatgttgcccaggccggtcttgaattcctgtcctcaggtgattcatttgcctcggcctcccaaagtgctaggattacaggcgtgagccactgcacccagcccaaatgagatgtttctaaatctaaagtttcttctgcttctgcatttctgtgaatctcatttgaaatttttcagggaagggattttatcatttgttcagagatgtctttatttttattaatacccataaaacgtttgtgtatttgcttcttcctctttctccttttgatcacattttagctacttatctagaggatctctggccaagtattcccttttattgtattgataacaattcttaatggctggcctctcttgtgtacaatgagccaatattcttttttgttctatatttttgtatcttcccctttcctgaacaaagcatatttagagtctcaaagaaatcctctccacaaagacatgttcctccctctggtgtgggtagacatagggtaagagtttggatgaaacttttgtaaattgtagtgttcttggcataaatatgaattaaatctttttttatatttaaataactagttaaatatgtgcttcttactaagattaggtattttttgccaagataacaatgataaaaacattttgggggggaaattgaccttaaaattttgggataattcaagaaatgtctgcagaaaattgatttatgatcttaatttttgtgttagtcctttgaggtttttttgtttttgtttttgttctttgtaaagcgccttatctgttttggacaagtccaaagtaaatggttgggctcttatatctgttttacccttatttttcccattaagtaatggtttaagaatatatcaagcaccttaatttgttgttaagtagctagtgcttacaggattccattaaattcactttaataagcctatgaagttcttatgaaaaacccatatctgcgatatgtttgatttgtttctttgttttaattcagtgtttaaccctaggtatgctacatacccataaataagataccatggtaagagatagtatgttatagtgggaaaagcacaagtttttagatagagatcaattctgctatctacccttacattgtaacctttctgacagggctgctgcggtgcacaacttcgggagccatcacttatttttgttgtgttccagaaggtgtcattttcatagactgcagtgtgaatagtgtcctccattaataatgcaatgatggccttgctctctgagcctcagttttatctataaaatggtacctagaagagtcatgatttcttagaatcccctaaattattaaggtgaaggtagaagatgattaaagcgtgttatctcctaagctatggcttagattttccgaagctcatggttctaggcacagaaagtctccattctacactgcatttcaacctgtgttgaacaacactccagttcagcctgtattgctatgccacatagagtttgcctgaattattatagctttcttaatagttttgtttatgatccactctctccagcccattacacaggagccagctacctaaatttcctatctgagcatgtccttacatttacttccagcatactattcatttgccatagtagagtattaagattatttgattttctttttactttctcgtagtgcccaatgtgtagtttactcaacatcataatatgtaatgtttttcaactacttactgttgaatacaaagttatctcatttaa

SEQ ID NO: 308 - DNA, 7614 bp, Homo sapiens
atagagagagggagagactcgagagcgagcgagcgcgggagcgagggccgcagcggcagggccggcggggaagtgggaagagggacctggacttcgggaccccagctgtccccgcccccgcccccgcccccgccctctccaccagctcaggctgaacgcgcccggaacgtcccaggctgtttcctctgccaccatgaggaacattttcaagaggaaccaggagcctattgtggctcctgccaccaccaccgccacgatgcccattggacccgtggacaactccactgagagtgggggtgctggggagagccaggaggacatgtttgccaaactgaaggagaagttattcaatgagataaacaagattcccttaccaccctgggcactgatcgccattgctgtggttgctgggctcctgcttctcacctgctgcttctgcatctgcaagaaatgctgctgcaagaagaagaagaacaagaaggagaagggcaaaggcatgaagaatgccatgaacatgaaggacatgaaagggggtcaggatgacgacgacgcagagacaggcctgactgagggggaaggtgaaggggaggaggagaaagagccagagaacctgggcaaactgcagttttccctggactatgattttcaggctaatcagcttactgtgggcgttctgcaggctgctgaactgcctgccctggacatgggaggcacctcagacccttatgtcaaggtcttcctccttcctgacaagaagaagaaatatgagaccaaagtccatcggaagacactgaaccctgccttcaatgaaaccttcaccttcaaggtgccataccaggagcttgggggcaaaactctggtgatggccatctatgactttgaccgcttctccaaacatgacatcattggagaggtaaaggtgcctatgaacacagtggacctcggccagcccattgaggagtggagagacctgcaaggcggggaaaaggaggagccggagaagctgggcgacatctgcacctccctgcgctatgtgcccacggccgggaagctcactgtctgcatcctggaggctaagaacctcaagaagatggacgtgggcggcctttcagacccgtacgtgaagatccacctgatgcagaatggcaagaggctcaagaagaagaagacaaccgtgaagaagaagaccctgaacccatacttcaacgagtccttcagctttgagatccccttcgagcagattcagaaagtccaggtagtggtcaccgtgctggactatgacaagctgggcaagaacgaagccataggcaagatcttcgtgggcagcaatgccacgggcacagagctgcggcactggtccgacatgctggccaacccccggaggcccatcgcccagtggcactcgctcaagcctgaggaggaggtggatgcactcctgggcaagaacaagtagacagcagcggctgggaccccacacctttcacggacactgacaagatccagagctatcaatacctcagttatgcaaccttagaggttttcttttttctttcatttgttgggtggttgtgtccttgtttttccttgtttttctctttttaaagaccaacttccctttgatggctgtgtgaggagagtcccctaagaggtgaaagagaagcctggctctgttcacggtcccaggagctgtccttgctgcatgccctgtcacagttccctcgactctttcaaagcttcacatctgcctcaccccaagcgaggctctctactggcacaaacttgcagcagttcctgttttttgagccttctggaccaacaaaatggcagcacatcctgcttcctgacagggaaggcatcacagtggccaatgatcgtgtgtgtgtgtgtgtgtgtgtgtgtgtatgtgtgtgtgtgtgtgtgtgtgtgtgtgtgtgtgtgtgtctttgagcatttctcttcattcctggaatgtgtgtgtgtgtgtgtctctttgagcatctctcttcattcctggaatgagccatggacagtaaagttgtgtgggaaaagaaggctctttggggaccctgacatgaagaagtccactaagtgggagatcttctctcatctatggcaaagtctcaggatcctgttcagatatcggggctttcatactcctgttggtggctatttgggaggcagcaagatgtgaagactggatgtgttcagaactaggaccaaacgatgccatcaaatacttcctcctgccagtcatggtttccccagaagtgtagttcctgggacattcatggatatgagctattcactagttgggtcagactaacagggactctcagtcccaaaatctcactcttattgacaataaatatcaaactatgaagaaacagaagtcccattaccagaaagaccaaaattaaactcctggatcttcaccccatccagtgggaaacacagatgctttctccctttccagaatataagcagccaagttcatttgcatttattccccattgtgcttttgcttctgtttctcttttaagtggagcaacactgtctgaagacacgttatctgtgcagagccagagaactttaaaaggaaagtttaaatgttcttagttctcctgaggtccaggtaagaagggggtggtaagaagaggatgggggacagatggctgagatcccttgggaggagatataggggagcactggaattcccccgactcccactccttgctcccttggccctctgccctccatgctggagagctgataggtagctggagtggcccagggagacctatgggaaggacccgtcctaccattagggggcttctctctatgaatgctaagaaacaaagggcatccattccaaatgagtagcagaggtgaccttctagggtttctacccatgctcagttgtatcccattccctgttcaccttttgtccccagcactgatataaaagccatatatatgttagtcaggtttgcactgagtcttcttccaatccttcagcctggacaacagagtgaggtccccttgtggccagaggccagccctccttgcctgccttcctttgacctctcttttccatccatgaagccctcaggcccttgccattttttcaccacagaaaactcatggcttctccagaagcctgagtatctctctttcccagcacaaatggcagcatctctatcctgccccatctgggccacttcagcttcctgtagacacccaagacagatggacagtgttggagggaatcaggctttgaggatccagtgtgaagaagttgcagagtgtctttttattttattttaaaaagggggaaggggcttttggttttgctttgttttttggatgaaggagtgagggaaatgagggaatacccccaccagaaacagactggaaagcctgcctgtctcttggagatccttctttgtcttgttagtggtacatgggaagttatgtttttactggtgtgtgtgtgtgtgtgtgtgtgtgtacttaatgatgggaaggtaagactctgatcaggattatgaactgcggtccttgggaccaaaggtgtggtcatggtagagagttgtaggacaatagggtgttttcagaatctgggtggccacagagtgggatttcctggtatggacatcagaagtcactggactcttctcccaaccccagagttatgggattttggtgctttctcagggtctctccccagactcactcttctcacccatatcccacagactcactcatggagacccccttgtcaatatcccctctacctttactcctttgccctttcccaattcatcttctaccacctggattcttttccattcatgaacttcattcagcccttccaaagcccaagatttgcattcccttgacagggaggaaaggcaatggtaggaacctctggtggtctgggtgtctatgtgcctggtgaccagggctggatttttattactctgagcccactgctagtgaggagccttgaggggtggggacaggttgctgagtgattttgaacgttgacaccagtgtggagccagtgtgggtgtggggagcagtgccttcctcaggtcccagctggtcctgatatgccacgtagtggatggcatctgtcttggtccatgggcttggtgggaacatgcttctgcttgtgtgttttccatacctgagggctgacgtagcttaaaccacagggcatcatgccaaacactcactgctgggcaggtttatttctggggatgtcagggtactggggtgtaggcactaagcaggatagagttagggtgtctggctagtaaggggttctggacgcctctggggctgtgagttttcatctcaaagtctgttccagagaaaggaaagtagtatagaggtgatttttagagaagctgagaccatgaaaacaagcctaatcccatccagaaactggggtaaagtctgaaagttcgttttcttcttcctccctgaataattgttccagaagggatgctaactctgccagagctacaggcagatttttgggctttggaagtggaagctgaggcctggggaaggctgggtaaggaatgctggggcaatctcagacagtaggcaggtgcttggcatgaatgagaagtgactttcctggagtccctcagtagaggatgagatagcagggattaggccacagtctcagatcctgatcttttttcttcctaggaaagcatacataacttgtgtctgcagaatcagtgtgggatgattttgctggcccaaggcttcagcgagagggagaagagaggtcactacagccctcctgtgggtaaaagcagctctcttataaacctgcctccatgcagtggggtgggggtaagggtgggtgacagcaaagaggttgaggaacctccctgggtttggggagtgagagcttccatgttcccttaatgtcctaggttaattcataaggcatctgagtcctgggtctcacccagcctcacagagagaaaaactgtccctgagggtgtcccctcccactcaaaggtagaaagagattgagccaggaactgccctcatatcctctgctctgccccttcccttccctttcctctgcccctcccacctaaagctgtttggggccctttctcagagccctgggtggtggcaggcagggaggagtcccaagatcctggtggccctgagccccatgctatggttgccagatttggcaaataaaaatacaggatgtccagttacatttgaatttcagttcaacaacaaacaattattaagtgtaaatatgtcctaggcaaatagttgggacatatactaaaaaataatttgttgtttatctgaaattcaaatgtaactggtcatcctgcattgtgtctgggaaccctaccctatgacttttccccctctccctttggtcccaaggggccaggaaccccaaggatttgacttaaccagttttttgaactgcaatattgagaaggggacactgtgacttgaagacacatgaattactttattttttaagcaacaacaaaataagaaccttctgaagccatttgagcctcatctgcccccatccgtgtatatttaattatatataaaagaagataattacctagaaacatatgaacagaatcttgtttaatcaagatgcatgtctataactttctgtaaatagccgcatggcaatgctgagagtccccttgatccccaacctcaaacccattttacagaactggttgaggctgctcctttgattttatgtcgtgtaaagtctttgttccccagccccacccctgcctcctcccatcgggaaaccccccatgggagtcatcagtgggcgggagtcggtgcctgctccagtccagccctgccttgggagatgctggaggaccctgtcgccctgaaggcctgtttgctgcacatctgcctgcagagccaaacctcagggcccggtgcagtgtccagcctggtatctggcatcccagtagcttccatgttctgtgtatgtgtgtggtgtgccccttcctcccactgtttgaattcactgaaaagccataaagggggcctcctgctggagatttggcctcccttggctcctcccaggagcccccatgtctctccaactggctccccacagaccacttctgaagggctcacctgttgtcactccctcctgctccctcagtcccgtgtcatgagaatggacggtgtccagggcttccggtggggtctcaggagatgcccatgctggccctgcccgagctggctttctcggcctgggttcacagttcagctccatctctacgctgggcgaggagcagacagcagtgggactccatggttctggatacctttcctggggtccctgtggaggcaaccaggattttcaggagcagccagtcagcagctcagccagggatgacagaaccatccctgcttactcacctctgtagtgtgagggtctgtgggtggtgatggaggagggactcagggagaggccggtgaatacaggggctgacgctcttccctcgtgcatcctcctgcagtctgacagaaagcagcccaatagcggggcaacctcagggctaccagcgatcccctgagagtggggtgggcaggttcagctgtgagagaggctcaggcagagcaggtgtggactaagtcccctgaccttcacacctgctccccagagaagccccagccagttgcaccaagtagcagaggtgagtagaggggcctgggggcttccaaggccccaggtcatcctgttgaactgagagggacaggtagcccccctgcctgcggcccctggccccatgggcacctgagggcagtactgcatgggaagagcccaggatgcctcaggcctggcaactgtgacaagtatgaggaaggagagagaacgggaagggaatcaggcagggcgcattcgaggaggccagaggtggcgaggcaggcttgccctgcacaaaccacaacagaagttgcacacagaagtcccagggacctttgtgctgggaactgaaagagtggggaaggtggaggggaccatttcagagcaggctggaatcaggtgcttggaccagtgaagacatgtcttgcttcctccagctctctctggggccctcccactctccacacccacagcagagacaaattgaggcaagagttgagagagcatctgtctggtgaggtgatgggagcagtgtgcatggggcaccaggagttcctccatcccacctgccttagcgatcaggactttaggggggcctcttcaaagatagtgacccttctgccctgactcctgcccatctaaggacttgatttgctgctttctgaaaaccctggggctgaaaacttcaaaatcagggcctggcagagcctagcttcgccaaggtcagcccaccaggagccctgccttcgtctccataggaaggacacatgtacagcccttgcccccggccctctcattcccacttctgcttggcaatgctctccatctcccttatgtggactcttgttcttgtctgatctcttgtcaaattgttattttgtaatgaactgcgtctccttattaaagaaatgagctgaaagaaa

SEQ ID NO: 309 - DNA, 7886 bp, Homo sapiens
gctgtggggggcgctgggtgtggggcggctccggggccggggatggcggcggccgcggttgcggcggctccgggacgagtgagtggatcctgggaagcgctgtgaaatgggctggctcccgagccagccgggaggacacttactacagctgctcagaagcaccactggaaactcagatgtgggcgccccagccagaagcagagaggggtacagggaagctacagagaagccccttctgatgccccagggagcaagtcgactccttccaggctccaggaacaccacaaagcaatatgaaacctgttcatgaaaggagtcaggaatgccttccaccaaagaaacgagacctccccgtgaccagcgaggatatggggagaactaccagctgctccactaaccacacaccctccagtgatgcttctgaatggtcccgaggggttgtggtggctgggcagagccaggcaggagccagagtcagcctggggggtgatggagctgaggccatcaccggtctgacagtggaccagtatggcatgctgtataaggtggctgtgccgcctgccaccttttcaccaactggactcccatctgtggtgaatatgagtcccttgcccccaacgtttaatgtagcgtcttcactaattcaacatccaggcatccactatcctccactccactatgctcagctcccatccacctcgctgcagttcattgggtctccttatagccttccctatgctgtgccacctaatttcctaccgagtcccctcctatctccttctgccaaccttgccacctctcaccttccacactttgtgccatatgcctcacttctggctgaaggagccactcctcccccacaggctccctccccggcccactcatttaacaaagctccctctgccacctccccatctgggcaattgccacatcattcaagtactcagccgctggaccttgctccaggtcggatgcccatttattatcagatgtccaggctacctgctgggtatactttgcatgaaacccctccagcaggtgccagcccagttcttacccctcaggagagccagtctgctctggaagcagctgctgcaaatggaggacagagaccacgagagcgaaatttagtaagacgggaaagtgaagcccttgactcccccaacagcaagggtgaaggccagggactggtgccagtggtagaatgtgtggtggatggacagttgttttcaggttctcagactccacgggtagaggtagcagcaccagcacaccgggggaccccggacactgaccttgaggtccagcgggtggttggcgctttagcttctcaggactatcgtgtggtggcagctcagaggaaggaggaacccagccccctcaacctatcccatcatacccccgaccatcagggtgaggggcgagggtcagccaggaaccctgcagagctggcagagaaaagtcaggcccgtgggttctaccctcagtcccatcaggaaccagtaaaacatagacctttacccaaagcaatggttgtagccaatggcaacctggtgcccactggaactgactcaggcctgctgcctgtgggctcggagatcctggtagcatcaagtctggacgtgcaggccagagccaccttcccagacaaggagccaacgccgccccccattacctcctctcacttgccttcccatttcatgaaaggcgccatcatccagctggctacgggagagctgaagcgggtggaggacctccagacccaggattttgtgcgcagtgccgaagtgagcggggggctgaagattgactctagcacggtcgtggacattcaggagagccaatggcctggatttgtcatgctgcattttgtggttggtgagcagcagagcaaagtgagcatcgaagtgccccccgagcaccccttctttgtatatggccagggttggtcctcttgcagccctgggcggacgacacaactcttctctctgccctgccatcggctacaggtgggagatgtctgcatctctatcagtttacagagcttgaacagtaactcagtttctcaggccagctgtgctcccccaagccagctgggtcccccccgagaaaggcctgagaggacggtcttgggatccagagagctatgtgacagtgaggggaagagccagccggcaggagagggctcccgtgtggtagagccttcccagcctgagtccggtgctcaggcctgctggccagccccgagcttccaaagatacagcatgcaaggggaggaggcacgggctgcgctgctccgtccctctttcattccacaggaggtaaagctgtccattgaagggcgttccaatgcgggaaaatgaacctcttccccagaccaggactggggctttaccccagagcctcgcctcgccgccgtgagcaggcagaggatttgcacacgccgagcagggaatggctttcttggcagtgagatttgggggaaaggggaggcatgaagtcagcctcccaaggcaggatctgttgttcattaccccatggcatcctttcaggacaaccccagagggtgttgtgatggggagcagcaggcctggggcaaggaaggaagggggtgcacacaggagaagaaacattccaaaatcagggcctccctgttctttcctccccatccctagctcctgcaagagaaagtccaggctttgggagcagatggcagagggagggagtaaagaaagagccaaaaatgatgatccacagcttatagtagcagttaaactgtcagaagttttttttcttttttgtggtagaagggcaggaggccccaaggttggaaataagagggttcccacccagaacccttcttgtgagagatgcgcactttaaagggtgattttgttccagatgtctatggctgggtgtgtgggggaggagcactctcatctgcaggactctgcttgatcctctgcttcatagcccttccccatctctcctcaccattctgcctacaaggcttctagcagcacgggggcccggagggagagccccttcagggttcagagtgaagtactaccttgccagggactcagtcaggggactttgggagaaagacttgatagccaggctgactgggttctaggcaggccctctggaaaggtagctcacctaacaaagctcctccatctcagcatgccagacccactttgaaatctcacagaatcttgctggtaatggtgactttagaactagtagaccctttttcccaggcactgaccccccacctttgtctgtgttgtgcccaagtgcctgcgccacccccaccctcctgctgcgctgaccgctgcatggtgtcgtgacctgggcctcatttgtagctgcactgcctttccttgtctgcaaagttggttttgtccactctgaccaagacctctagtttttggtgggtagggggtctctctggtttccccttcagctataatctctatttttaaaatctcaaaatcatgtcccctccacttccactgccaaacagcttggtgaagaaacaagaagggaactatgccctgggccagggcgaatgcgtggctgggcagtgcccatcatggcattttcacatgtcccatatgcccctcctgtcttattccactgcttctcccagcattctggtgcctccaagccatcccctcccaccaccagctctaagattctaggatagtcttgataacatttcagtacctgaatagatgtcattttgtgttggtatattcctctgcaaaaagtattttcaatcttggttgcattggcaccccccctaccccccaccaatgtcttaatcccacattttcttcacaacttttagcatcagctcagaccgtggggttccactgggtattgggaattaggctcccccactagctttcaggtgggtaagtttttttgtttgttttttgggggtctttagactcttgaaggcaactcagggtattgtccacgcagctctctggttagacttctcccaggctatgatcctggcatgtcctttataaggtatacttggattggccgagacctggcctggcatcaggagtccaaacctctgaggtctgatctctgctctgtcaaggactttcggcaagtctcgtgacctctggctctttcacttcctccccacctgccaaatggggataaataatcttacctacctcctggggggaggggaagttctgagaatggagtcattcttagtgttcaggtgctaaaggttgttctcctgggggaacagagtgactgaaactggcttgtttgctacaagccctaccctccactctttcattccttgaaagcagtttgcctggtcagtcagcttttgggggtccatcaaaggaggttgctgacctgaccgtgagtgcttcagtatctggtttgtgtcagaaccagacgccaactttgtactgcatttgggatcatatctttccccttctctgtcccccattctctgaatgctgctttctctggcttgtttcctacagtgggggcctgtggggttgagtcttgaggaatcccctcaaatgagaaggccttgggagaaggcctcatctctggctgtttcatgagcaactcattcctagagttcattgtttgcatgggtttctcacaagcgtccttcctcataggaaggctcatcaactgaatttagtgacatgtacacagtagatgctcaagcagtgtctgcaaggacacaagctgagctttctccttatggggcaaacctatgtctaaccagatacagaccaattagtttagatcaaatcaccttccacttgggctacttgtgactttccaacctggtaacttccactgaattctggaaagagaaattcttgaggaccctggcaagttgggccctgacctttctgttgctgtctcttgctggtgaagcaataccagcagttcctgtaataccacaatatcgttccatgcatatataacatattaatacttgattttgctgagctgcaaaggtatctgtcataaaatatggtccccaggaaaagaatctctgtgctctaaatctcggtcagagctgtggcctcccccttgcctttaacctctagtttagtcttttcctccaggcatgaaaaatatgactaacctgtggtgtgtccattcttccttataggaatttcctgagtttgcaggagacatgagagcagtttttagcgagtattttagtgggaagttgccaactttttaagaatgagcagttgacaagggccagagcctgtcccttgtcagcagtaggacatttccagctcttaggaatagaaaggaggactgctgactgtctggcgctgtataaaaatgtgtataccaatttgggaataggggaacccagtcatggatggataataagccaagtcttgaatcattcctatcaagattagtatacatgaggaagaggtggcatggggggaaggggctctgggagttcagagctgagtacttgtacctgagggagggcccccagccaatctgggctggtccttctatattcttggtcccagttggtcataacaccaagggctttgccctgcgctgctttgccactgctgctgtccgctcactgtcctgcctgctgtcctctacagctccctatccttccatgtctttggccatgtagattaagtgtaggcgtccggttcattcttacctgtgttaggccatgttattttatagcgaagtcatgttcgatagggatggtatgaaatgctgctggtgggctggtaaatccaaagggataaggcttcagtgctgttgggagccctctggctccaaatgtctgactatcttgagggagaaacaagcaggtttctactagtggtgtcttctgttgtattaacttctttcctttgtggtatcttgtatcctgttttaaaaactaaatgaagggaaccacattagggcccatgccagcatcccagtgaagttcgtccagctccagttaggtggattctggagttcggagagggtttaaagtttggctgaaatagcacctcaagtggggtttagttttatttttacctgcgggcatcatgggcgatttagggggaagcacaggatggtggtgtggtttaaacctgcagcaagcaggcatgttgaagagttgagtgatcacgctggagatgaagggttggacatggattgactgggaaaaggcctgggtccattggagtaaagataacctagtcgattgaattggccatgggaagttaggtcacagtcttataaacaaagtaaataggacagagactaagttttagggagacatcttggcctcctaggctaagtttactaaaccacactgaagctatagtaccttccagatgggcaaaagtgtacactacagttgaggagctgaaccttattaggttggatgtcgatcaggaacctgtttgccctttgctgggaagccttcactctccagctttcctggggtagggaaggtctcccacattatgcaataataaaataagcatctgggtctttgcagctgtcagttgctctttcaactctaggatccatctttggaccagaagcctggtctgtgcctaggatgacactggccccagagatgctagagtcgactgcactctctccttagctgcagaccatgcacagtgcctggggcggaaggaggagaggtgttgcggtttgccctgctgcctccccagcaggaacaatagtcataaatgcacttttcacactaaaggtttctttattagttctccagttaaacctagatccctccctggtagattgcgaactcaaagttttgtgatcccaaagccattccactgcaaatgcccagcagtgaagatggcctcaaattgggttcttgcctgcagtgtgtgtggcagcagcccatgtgcctttacctgttgtcaaacttgcaagcatttatttgtctttatgactgtcatggggactgaggttcttcagagaaagagtgtgagctgatgacacagtggttttacacccaccccctgggcagggagtttgcacgtagttgtgagctgtgagtggttagtgcattgctggtattgctgaaggcagggttgatccctcacttgactgatacttgcattcaagagaatctagattgtgttgggggagggactgactgtactcatggctaacttaaagtattaaaataaggctgtcccctacaaccttcttagtcacacaggatccctgtagccaaaacagtatatgatccagctgcagagagcagactgctctcagcttgcacagcaccttaggcgagggaagaatatacggatagggaatggggtggagaaaggatgggaatgttgtcatccaggtggctttagggtcctaaggagtggagaaggatggcactggggaggtctggatggatctgtgtaggagttccctgtagataaattactgatcccccatctactatccccagtatgtaatggctgaattaatatgtaatcaactgcattgtatctaaagccttagaactagtcaggtgctccctccacccaataccatttcttaccctctaatcctacctgatctttaacaaagcattaataattctaaggataatctctattttgttgtgcttttttgtaactgttttaaataaatcaatttgtactgtatatttgtacttttgtgagatcctttttgctgttttaccattttaagtctctgtacttggctacacacagattgtatttttattgttaatgctcttcttatggatacctgcatttaacttgtggactatgtaaacacaatatctatcaatatctatatatctatatatctatctatataaactactagcttttcctttt

SEQ ID NO: 310 - DNA, 6386 bp, Homo sapiens
cggcgcgccgggcttcgcgctccggtacttcctatttaacagacattgtgtggtgggctggcacaatcgcaatggctgttggccagattggaaacttcctggcttacacggcggtccccacggtcctggtaacccccctgggcgcccttggagtaccgttcgggtccattttagcttcctatctcctgaaggaaaagctcaacatcttgggcaagttggggtgcctgctaagctgtgcaggctccgtcgtgctgattatccactccccaaagtctgagagtgtgacaactcaggctgagctggaggaaaagctgaccaatccagtgtttgtgggctacctgtgcatcgtgctgctcatgctgctgctgctcatcttctggatcgcgccggcccatgggcccaccaacatcatggtctacatcagcatctgctccttgctgggcagtttcaccgtgccttccaccaagggcatcgggctggcggcccaagacatcttgcataacaacccgtccagtcagagagccctctgcctgtgcctggtactcctggccgtgctcggctgcagcatcatcgtccagttcaggtacatcaacaaggcgctggagtgcttcgactcctcggtgttcggggccatctactacgtcgtgtttaccacgctggtcctgctggcctcagccatcctcttccgggagtggagcaacgtgggcctggtggacttcttggggatggcctgtggattcacgaccgtctccgtggggattgtccttatacaggtgttcaaagagttcaatttcaaccttggggagatgaacaaatctaatatgaaaacagactagattgcaataggagcttggatggttcgaggaataggcattggaggtggtttctggccgtgattggatgtgaagtagaagaggtcctcgatcatggtgttagaattgactggatagtaacaggtggtctggtggatagcggggagcatggctcagcaccagagcagaggcccagccagccctctgcagcccaaacgtccccaacggttgcctggcaccatctctctctgatgagacgaatctcattttcatttccattaacctggaagctttcatgaatattctcttcttttaaaacattttaacattatttaaacagaaaaagatgggctctttctggttagttgttacatgatagcagagatatttttacttagattactttgggaatgagagattgttgtcttgaactctggcactgtacagtgaatgtgtctgtagttgtgttagtttgcattaagcatgtataacattcaagtatgtcatccaaataagaggcatatacattgaattgtttttaatcctctgacaagttgactcttcgacccccacccccacccaagacattttaatagtaaatagagagagagagaagagttaatgaacatgaggtagtgttccactggcaggatgacttttcaatagctcaaatcaatttcagtgcctttatcacttgaattattaacttaatttgactcttaatgtgtatatgttcttagattagaataatgcaacttcgagtatgctttaatatttcaatattcaagttacaaatgtataaggcagttagaaataatacagtcacatgtcacttaatgatagggaaacattctgagaaatgcattgtaaggtgactttattgtgtgaacatcatggagtgcacttatacaaacctagatgggacacctatgacccacccaggccagatggtacagcctgttgctcctgggccacacacctgtacagcatgtgaccgcactgaataccgcaggcaattgtaacacagtggtgagtatttgtgtttacaaacataggaaaggtacagtaaaactatggtattacaatgttatgggaccaccgtcatgtaagtggtatgtctttgacagaaacatggttacgtggttcatgactgtatattcactggaagatagtcaagactaaagacacattagagcaaattgacccctttaacatgtgattattgtccaattaaagacagttgatttaagtagcatgaggtattattttatttgtattcgatctgtgttacctgggatccagtatcaaatatatccacattctttatcagcaagcattcatggccattcagaagaaataaattaggtaacttgataataaggctaagtgggagagtacctgttcaatagctcatatatcgagtaccctgtcatacaggaacaagttaaaggacacaattgaggttaggctagcttctacaaattgcaatatgcagtttttgaaagattttctaacaaaaagccaataaatgtagccatctccttgttgtttgcaatggcagagcatcctagagttcctcagctaacctctcattatgtgtcttaaatgcaaaagagccattaattatgccagtatttgaatcaaagaggtcattctctgtctatagtgttcccatccatgtgttccaaatgggagcatagcatgaagtgatgcacatatttcaccacggtatcatgtacttcatggccagtgttttatctcagcagggaactacgccaagttgaaagatggggttgggtaaagtagattaggtgaagtagaacataaaattgaatagtacccaattaaagttcctcagtaagaaaaaaaatgtgtttttgtaggcaaaaagaacatttctaaagtctcaaggaatagcttcctaaagtgttgagtaaagaggctaaataaaatgagactagtttaatatagagagaaaaatacctttatggagtaaacgtgtacatgatgatcatgggttgtcagtgatttgtgaactgagagcagcaacaacattattttttaaaaatcttaaatcctctcaatggatggttaacaaatgctcaaagtccattactctttttattggctcttgcaggttttgtgttttatcatcagtgcttttagaaatgcaggccttaacttactgaactgaactttctgaaaacgtaatgtagcagtatcaatatacttttgggcataaaaatagtttcctaggtaaggggtgtgagatattcaaagaatacatgtggctaacaagtgtaatgagaaagttcatgtgtcacatgaaaatgatcatgtttgtgttgctacagcttttgtgggaaatttagtttaaaggcagctcttggtgtaccttagtatattttaatccacaattataccattgatactgagaggtgatacccgatgatcttctctataatattcttagagtaaaacaaaatctcaaaagtattaatagctcttctacccttgaaggtgactggtcctgggacagttagaatctttcaggtttacctctgttcagcagatacttcagtaggatacatagcttttcttccagtgaaacaaagttcatatcatccattgtttttcaagcacgtgacaccagcctcaaagtaaatgacatgaccagtggttgaacagtctaattttcaaatttaatatagagcatataacttctgatttgatagtatttattttaaaaaattatgttttcatcattcatttgaaaatgaaaaagccccaaagtgagaactttgggggagggcctagaacatggatagatctcttagtggtctttccaaaagtacatgtacttgaaatattttcattatcatactattctttgaaaaaaaagatgcttactgtatacttgttttcaagcatcctctaaaatcaaaggttttgatcacaatatgcagatttctcttgatagatacttaaataggctatttctctcctcttcttgggcaatgccttgttttctcctctgaatatttgcatttgaaaggattgcttcctgttctgctcattgatcaaaggtagggccaattaaggattctaaccctaacccagcaccacaaagcccccctggagcatcttcccggctggcaggaccatgccatctctgtggagaaggtgctggggagggaagtccttccagtgccacatggagtgaggccctgcccatgctggggactttggggaggaatttggtattctggtggccttgctcagctctcattgagatcttttcctatcagaatgttagtgaatatacttcgcagctctttgttcagcaataaggaatattctttcaattcctgctcttcaagccaatttactacacccagttgtctttccagaagttcatcccagcggtaatatgttggtgtttgttcttctttggatttcacatctgttttctggtagaagtgagcactgttcacttgtgcagtcgtcttattttccttcttcctagatgactcagctctttgtaaatgttgtgctcaacttctaggggccagttctagactttggagatgcagtgtctcccaggtgtgcacggacacctggtccgtggaaacaggtgtgatgggcacaggctgctgcccttctgtctggtcgggggattcctcttcttcaagctgctcagctaacccagaagaggggagagagtactccggtggttcccagagcccctcccgttgtgccgcttcgacctgacacctgctcgatgctgacttaggcttcctgccaccaagcaggaaactagaaagagaacatttcagtgtaaggtctgttcccgacagcatggattagcttccgtgttctgaagttgttcttttcatggtgtctgacaccgagggcgttgttcgtccatcaggcgggattggatggagtcttggtgttttgccttctcagggaccaaaaatgtatcattgactccttaacagtgaccttcctcccaaggacatatccgtgttcatttttcataggttttactcatattcataggtagattctgttaatgtgagttggaaagaaaagaccaatttgtacaccagtcacaccacaagacagtttatcatataaaatacctcaattttttgtattcctcatttccacctcacaattgtactggtgatgaattttaagggtctgtcctttagcttataggtgatgtttcacatctggccagattcttatacctccattgtatacttgaaaaggttcagaattacaggaacagcagtgagaatttggcccactaccacgactcatttgtttcattcacattcctcacgtgcaacaacataattatattttaagaaaatgtaactttgttacatcaaaatatgttgtctagtaaaaagttgatattcagtagaacaaggatcatgtaaataaacatctatttcacatgtacccaaaagcatttaaaaagcagaatccagggcccagagcatgagccagggaggaggatgtttttcttcttttctctatttttccctaaattgtgcaaacataggtgagtctcttaacctttctgtgcctcagtttttctacctctaaaggggtgggatggttcttcaaattgtttctaaaacaccggcactttcagcagtgttctggtggcctgagatgagagcaccgtgttcagaagtgcctgggagtggcacagtggaaactccgcttgcacggaccatggagtctgctcaggaccatgctgtaggacacacagcctcatgcgctgagaaagcaaaggaagtgctgggtgtaaagtttgcatgattccatgaagctttagttttcctttttttgttttaaaagaaagggttttatatgttctattgtaaaatatggaaattaaacagggacttcagaaagccgcacagaaagatcaccttccgatggtgtgatgtgctcctgacattcggccgaggtctgtattctgaaaaagatttaatggcctgtgaaacacgtggattctgttgcactggatttgtaataaatgacgctgaacttcctgcttccaagcagctcaaccctgatgctgaactgacaccaggcgaatgtcagggctcccaaaccactagtgccaaagggtcatgttgaaaagttcagaatatttatttgtcagaatataataattgccccccaccttagtatttttgcactttacagaaatttagatactgtttttcagtggcttgagcgttttgccttttcaaaggataactattattttcttgaaaatggaatataatcatgagaggaagaagatgtaaaaaatgtcaaatgttgattggttgtgtaaaagttttgtcatagacatgtattggggagcttccaattagcatacatagacacatgtgtcagtggccaagacctgcttatattttgctttatagatgtagtcatagcatgttgttattgcctcatgtaaataaaaaggctattaagttttccagtaatatttattaatctgtatgtgttttaaaataaaataacttatttctagctgaa

SEQ ID NO: 311 - DNA, 4694 bp, Homo sapiens
tccggctctcctttgtttattttctaatctatatttttactggaagatttcctctttattctctcccgccctcctacaagcgctcttgctggccgtctgggtgcacacaccgctccctcgatcaccccagcccccttcctggtctcccgagcgcggggtttgaaggtcacctcctttccagtccccgtgcgagccgcgctgccgccgcctcctccagccagagtcggtgggactggctgcgctgccctgaagtggttctccaagcagcgcggagggtggcggacggcggacggagcccaggggccgcgtcgggtggggaaacccgaactcgcggaggggaatccctccccctccgccccagccccccagcagcacccgcggtggggcgggggcgctctgccagccccgggaacagcagaggcggcggcactggctggacccacgcgcgcgcctccggggctgaagaaggaaggagtgagccgagccgagcaccccacatctggaggggacagccagccgtgggccccgccccggcgtccggagcaggagaactccgagcttcttgcccaggcagagagagcaggagcggaccgcgcgcccgggattgagagtccttgcgctccagacccccacccagtggccgccagggtccccgcctgtccggaccctcgccgcgcccaggcaggcgcgccagggcggggctgacctgcccgcgaagttgcggacagtgcgtgagaaaccagcacccccttccgccgcctccagcttatggtgagtgtggctgggggtgcagagagcgcacgggaattcgggggtctggggccgagaacgtgaccgcagccgggctcgccgggagttctaggaaactggtcaaagaactcatgcaagtggaacttacagcttccttgatcggactcagcattcagatatcaaagcagactgcaatacctgcgtggaaatagaagacagaaaggtttcaagacaacagatgaattgtgaaagagagcagctaaggggtaatcaggaagcagccgctgcccctgacacaatggctcagccttacgcttcggcccagtttgctcccccgcagaacggtatccccgcggaatacacggcccctcatccccaccccgcgccagagtacacaggccagaccacggttcccgagcacacattaaacctgtaccctcccgcccagacgcactccgagcagagcccggcggacacgagcgctcagaccgtctctggcaccgccacacagacagatgacgcagcaccgacggatggccagccccagacacaaccttctgaaaacacggaaaacaagtctcagcccaagcggctgcatgtctccaatatccccttcaggttccgggatccggacctcagacaaatgtttggtcaatttggtaaaatcttagatgttgaaattatttttaatgagcgaggctcaaagggatttggtttcgtaactttcgaaaatagtgccgatgcggacagggcgagggagaaattacacggcaccgtggtagagggccgtaaaatcgaggtaaataatgccacagcacgtgtaatgacaaataaaaagaccgtcaacccttatacaaatggctggaaattgaatccagttgtgggtgcagtctacagtcccgaattctatgcagtgccaggcttcccgtatccagcagccaccgccgcggccgcctaccgaggggcgcacctgcgaggccgcggtcgcaccgtgtacaacaccttcagggccgcggcgcccccgcccccgatcccggcctacggcggtgttgtttaccaggatggattttatggtgcagacatttatggtggttatgctgcataccgctacgcccagcctacccctgccactgccgctgcctacagtgacagttacggacgagtttatgctgccgacccctaccaccacgcacttgctccagcccccacctacggcgttggtgccatgaatgcttttgcacctttgactgatgccaagactaggagccatgctgatgatgtgggtctcgttctttcttcattgcaggctagtatataccgagggggatacaaccgttttgctccatactaaatgacaaaaccataaaaaccttccaatgtggggagaaaggaagctttccgaggcctgagtattgcaatacatgcagtagtacatcattttagcaactctaaaaaaaaaaaaaatacaaataaaaaggaaaaaaaattacattttttatcttatacctcagatattttgttctgtgtattttaatattgtgggtctttaatttctgaaggttccgtagtttggttgctggctgtaggagtttttgtggttgatctagacagatgctagataatgaataaaaactggtttagggccatatccagagtgctatattatgtaaatgaattatatatgctgaatattaagctactggggttatcagctatttgggaagagtgtaagtgactacagtagtcatttttttctgcacctgcattattttattttgcgaaaggggaggttgggaggggcttaggggattggaactggggtttggctgaaagaaaaaaaaaaaaatgtaactgatgaatctaaacgacccactgcaccaacaatcatttatcaatggttctaagttactcattgccagttcaagccaaaggtcatgttgttaagggggtgcttctagtagcacttgtgcatctgagttgaatgaagctgtgcaaacccaccctttaaaccattccacccggcagtattcagcttcttaaccagtcgctatttaggaaaaaaaacccactagttaggccatcaacaagcattctttttatatttcttccagtataataaattattgatatcactgctgacttttatattatgggagggaaaaaataacattaataaaaaggtgataaaaaagcactgtttctatttttttctttttttccaaaaaaagaaagtaataaaaacttaaattctttgtaccagttaaaaaaaatgtataaaatttacatctgtgcagtggagttgttaagttctagaaacagtctatgaagctttagttttagcctagtagaacaactgttagagacagacgtataatttttatggaattacatgataatcatattcggatttatagaagcattttacaagtattgcaatcattgagtagagataatcatggtattttcatcagcttggtactttttgaaacgtgactgcgttgtgtgaacaatctgcaatttttcagtccgtgagatcctgcccttccacctctttcccatacccccaaggattatctcaaaatgatctctttagttctgtctccaaggcccaggacacttgtcagaaggatgcaaaaaaagaaaaaagtacatccaccctcttaatcccaaaagaacaaagtctccccacctttctcggatgcagggccagagtgacacagccgaaaaattgcagtttgtctgtacttctgtttgaactttccacgttgtcctgtttacaagttaacttaagttggggtatccgtcacgggtcttcctgttttgtatttaaataaaaacaacagcagcaggctgtccctgagtagttttgctgccataggttaagtcctcatgtgtacagtgcaggccctgtggcccgcacttcagtaagttatcaactctcaccgctgtgaacctgccaatccgctgtaacaactctgctttaaaacaaaaccaaacaaaactttaaaaaaaaatgtgtgatccagctttctcttgccatcctatgtgcatgccgtaagatcagttggatattaaaccatcaataaagtttcacaagatttgaaaacaaagtttctgtagcttcgatacctaagacagacgatagtgatcttgaaaagagaaaagggggaggggggagctacttatcagccaaaagcatataaagtgttcttttcaccagacttctttgggtgggtgaggggaggggcaagagggtgttttatagcatcactaagacattctcattcccccacctggaaaacagtgttatggcaatgggtgcctggttgatgttcttaaaggaaacgaattattaaaacactatgacatcctccagagggaagaaagagtaggagcagggggctatggagaataaatttctcccaattgccgcctcagatttcaaaatccagaatttgtattgtgtttcgaatcacaaacatagaattcttactgtgttggttaaagtaaaattcatttgcagttttgattttcatcaatgagctgtactttcccccatgactgtatgtagttttaataaaatcatttagagtgagtgagtgccaaccgatgttgcagaatcttttgtctaggcactccaagatgccaataagtcattttaaaatgtatgtcagagatgtaaacaaacattttggattttttttaaacagtatttatttggaatgttttcatttatctaaataactattgctattatgaattatggaaaattaatattatgtgtggcatatagtgacttcttaacacacacatcacgcaatctgcaaacccagaaaatgtgtatatctgtctttagaaattagtgtttatatcacttacagtggtttgtgaataaagaaaactggtttgtaatatcaaaaaaataaaagcttagtctgaaaagg

SEQ ID NO: 312 - DNA, 6048 bp, Homo sapiens
agtctagaagctgagcagaacaaaggcggtgtgactggtgagcctcggagggatcctcctccctgctagaatatgcatgatcctccgcgagtcttcgcccgccaggagcagggacgcgtccgagccaacacggggcgcgcgcccagacgcactttcccggctcggggtgcaagagagccaggcggccgcggcgcagcggaggggctgcgggcccggaacccaggccggtcagcgtcaggaaagagaggagccgtcgcaggagccgcacacgtctccaactctctattgctttttgcgcacattcctaacttcctgacgtccatcccagcgggcaggcatggggtgtttgggcggcaacagcaagacgacggaagaccagggcgtcgatgaaaaagaacgacgcgaggccaacaaaaagatcgagaagcagttgcagaaagagcgcctggcttacaaggctacccaccgcctgctgctcctgggggctggtgagtctgggaaaagcactatcgtcaaacagatgaggatcctgcacgtcaatgggtttaatcccgaggaaaagaaacagaaaattctggacatccggaaaaatgttaaagatgctatcgtgacaattgtttcagcaatgagtactataatacctccagttccgctggccaaccctgaaaaccaatttcgatcagactacatcaagagcatagcccctatcactgactttgaatattcccaggaattctttgaccatgtgaaaaaactttgggacgatgaaggcgtgaaggcatgctttgagagatccaacgaataccagctgattgactgtgcacaatacttcctggaaagaatcgacagcgtcagcttggttgactacacacccacagaccaggacctcctcagatgcagagttctgacatctgggatttttgagacacgattccaagtggacaaagtaaacttccacatgtttgatgttggtggccagagggatgagaggagaaaatggatccagtgctttaacgatgtcacagctatcatttacgtcgcagcctgcagtagctacaacatggtgattcgagaagataacaacaccaacaggctgagagagtccctggatctttttgaaagcatctggaacaacaggtggttacggaccatttctatcatcttgttcttgaacaaacaagatatgctggcagaaaaagtcttggcagggaaatcaaaaattgaagactatttcccagaatatgcaaattatactgttcctgaagacgcaacaccagatgcaggagaagatcccaaagttacaagagccaagttctttatccgggacctgtttttgaggatcagcacggccaccggtgacggcaaacattactgctacccgcacttcacctgcgccgtggacacagagaacatccgcagggtgttcaacgactgccgcgacatcatccagcggatgcacctcaagcagtatgagctcttgtgaggatgctgccgccaccctgcgacggagcggcgccccggactgcctgactgccagccccatgccatggtaggaggcagagtctctagttccatctcgctgccgtctgtcccgttctgtgtcgaccaccaagcctctggctacctctgtcccctcaggtttggttgtgtagcttctgttgtcattgaatacggcctcccgcagcatcccacccccaaaccaccgactctcattgccgacactgcagcagaatctctccgggtgggagccccattattcattctccctttattgattcatcgaggagaacttggtagatggggagaaaacacagttggtttttttttccacgttatcaaccgtgactgcaagagcgttcgtgcagtgccctgagccacggccgtctctgattctccctttatgaagctgcaggctgacgagagatggtcccttcccattggccttagcccaagacttggagtcgaccccaagcgacagagtgaccagaaacccttttacagtcacattcagagtcgctgctggcctcaggcatttgaattagagctactttgagcctcttaggcagaaaacctaccacattcactactgcaaaatgtgtcctgtctaaaaatgattctctaaactttccctatacttaggcatagtcttctttcttagattctctttgttgttgtccctattgctggtttattacactgtacagaccacaaaatgtaatattcttttgtataactactaaagaaaaatccttgtagatctttgtgccttcaccatggctatctatacctgtacatgaaatgtgtttgtattgtgctgaagagcttaatgtcaacattacctgctgcttactctgaaaaaaggaatgaatggtagctgtagaatttaggatattttatcaggttggcactttataaaatactccctgatttaaaaaattgtaagttatacacgttaatcatccacattctatcgacaatgtaccaacatcacaagctgttgcaaccacctgctgttacttctctgagctgtaaaaacctgaactcaattcaggggtacaaattgcaatctaatcttttcagggaaccagggatttttttctctctctctagacaatatgtttcctcattagtctgctaatgaaacacttcttcaagttccccaagtgggaacaggtccatcattcccttagtcaaaactttggacacaggctacgtcatacaagtaagcaaacagtaagagaaaaacaaaatgtggccaggcgcggtggctcacgcctgtaatcccagcactttgggaggccgaggcaggcggatcacgaggccaggagatcaagaccatcctggctaacatggcgaaaccctgtctctaccaaaaatacaaaaattagccaggcgtggtggcgggcacctgtaatctcagctactcgagaggctgaggcaggagaatctcttgaacctgggaggtggagattgcagtgagccgaggtcgtgccatcgcactccagcctggacatcaaagtgagactcaggccaaaaaaaaaaaaaaaaaaaaccttgacgtgtcaatgtttgtgtctggcctaggagaatgaggatgacagcttcacttgccttttgaagaagaaacattacaaaaccttaatctgaagtataaagtcaaaagatacggctctttctcacacttgcaagacttacaaatacagcctcaaacattatgacacaccaacaatatctagaaagtaagaactggtgtagcaatgatgcttcatattctagctgtagccacagagttgagggtagtttttgtaggtctaaaataataatctataaagatgtccaaagttaaattttcaacaatacaaatctagagaagtgacagcctacattacttcattattactcttcttttagtctttagtctttaatattttaaagtttactctataaatcagcattttgtaatcctttataaactcatccagatttaaatgctactttttcatgaagaaaggataactttatagacagtcagtgcaacacacacattttatctcatcaccgtcttactgcctccccatccactgtctcataaagccctcagctgaactaagataaataatacaatggaaattattttcagttccccttgcactgtcaaagtaaaacaagaaaactgaaaagctgcacccccagcaagaaagggaagtatgctgttgtatgcatcattactcaacaattaccctctaactaaacatcctgtttaagagtttaattcaaacaacagccagactgttaagaaaaaaaacaaaaagaataacttttatctggcttacaattattaaagcatttattttcaggtaccaaaagccatatcccattccactttttaagtttcttttgatcactgacaggcattaacagatgtagcaacgtggtctcctatagagaaaattacacttatctaaaaatctgattccattaattgatcaagtataaaaatctacgaaaacaatatgttctgcacatcacatctgtacttttttttttttaaatatattttttgagacggagtctcactctgttgcccaggctggagtgcagtggcatgatcttggctcactgcaacctccgcctcccgggctcaagggattctcctgcctcagcctcagctggtattataggcacttgctaccatgcttggctaatttttgtatttctagcggagacgaggtttcaccatgttggccaggctggtcttgaactcctgacctcaagtgatccacccgcctcagcctcccaaagtgctgggattacaggtgtgagccactgtgcccggccacatctgtacttttaagggtacagctttacagtacataggaatttgagaaccacttcacaggaagagggaaacagcccaatatttatttatgtatacacataatcccaagtgtgtgctggggccaccaggcccttcctgggggaacaaggactgtcgtgcatgtgagtgacgacattaatagcatttacatactgtacagatgcaacctttgatgatacatatatttgataaaaatgagaaaacagatttgttgtagagtacctgtccacttttatagcatgagaacagtacaatcaactatttattttgcagttactcatttcagtgattgagaatttctgtgctgtgcagagagacggcctgtaattggtctcatcatccacttgattctaacatgatctctgcccaaagttccatttcttgggctttgatatttataatggcgcctgctcttcatcttgtcttacgctttccgagcaagttcaaaccagaaagaaaaggtgaggctagaagcccaaagtgagtgagtgtgaggaccacaaggaagcccaccactccacagtagatgatcaaaaccacatcctcacgtgggaggtagcacttggagagggtgtagtctgtgggcgtgatgctaccctggaaaggagaagggaaagttatgctgagagcaccaggcacacgttgaacaccgcagtcttagaaacagcagagggaagactgccttctcaggtccccctcaggtgaggcagggaacgggccctcctcacctgagaccaagggggcccagccttctccctgcacagctcacccccgaccagcccaggctccagcaggagagacaagtaaggcccaagtgtgcctgagtggaaaatgtctgggacactgacctgtcaaaactggcccctggctcactgggttcccatcaaatatagtgggggatccataacagagattcagagaggcaccgtggagttccagggtcatcggtcagcgaggaacaaggagggaaaggtgtcttcctgccccttgatgctcaactaagcatctgttccctagaaatacatgtgtccaggtcgtctccatgggcttttctttgcagatacttttatgtggaacaacagtggcaaatgttttcatttactttgaatttgaaaatgttagggtttcctccacctttttatgaagtaaaagaacctgtcgtaccagcatcatgagctggatgcaggagcccatggctgaaaggagttaaaacgcccagtggtcattaagtgaaacatcttttatcaacctgcaaaagctgcagcgttctctgccaggtcaaatgggcatgtttagaaaataagagaagatggctgagtatagctaatgaataaatggttgtttctttagaaaattaaacacacacagagtgtaagaggagaggatacggccctccctgaaggataaagtccacctggacggtgccctgccctcgcttctcacattaactgcccaggaatgtcatgctgattggttcccggaagggtgtttggcaaggggcagtgtatggagctacgtgtagaaggagagaaatttgtgtgtggcttttgtaaattttgaccgattgcagcaattaaatagttgattactgtgttgatttaaatacttatgaaagctttcagacaaaaataaactttcacgttaccatgatgaaaaaaaaaaaaaaaaaa

SEQ ID NO: 313 - DNA, 4177 bp, Homo sapiens
ctactccttccctcccgccgttgctccagcagccggctcccagcagcgggcgagcgcgcctccccctccgctccctccctccccctcctctcgctctctgcccgctaactttcccgagccccgaccggcggcgcagagctccggggtagctttgtggccgaacgccgacctcgggcggagagcgcggctgtgcccagtatcccatccccgcgacccccgcgcgctccggagagaacaggactatgcccggggctggggacggaggcaaagccccggcgagatggctgggcactgggcttttggtggaagaagtggacaacacagtgacactcatcatcctggctgtcgtgggcggggtcatcgggctcctcatcctcatcctgctgatcaagaaactcatcatcttcatcctgaagaagactcgggagaagaagaaggagtgtctcgtgagctcctcggggaatgacaacacggagaacggcttgcctggctccaaggcagaggagaaaccaccttcaaaagtgtgagccctgcttcgggctgagcagctgcagggagccccctttctgatgatgaaactgatgcttgagccccgaccgtagaacccacgtgcctgagacatctgctgcttggctcaaactgtagtctttccgggcacaagaaaccagagtcctgcccagcctgcccatccccttcccagtcagggctccccagggacaagggatggccaggggagggggtctgtggaagattcaggagaaagaaaggagaggctagggtggtgtggaggggctggtcccctgacacctgggcagatggggtctccttcagtctccctaccctgcacaagcagggccttgattttcctccaggcttctcttcacaagagactgggaggatccgtaagggatgtcctaagagctgcaccctggagatggggtgtaggaagaagtggcttcctttggaggtgggagtgggctggaggcctctggagaagacctggggtgggggctgatgggggcaggcccacagtgagagactgcctctgcttcataggataccagatcccccacagtcttccaagtaggaaacttcctttcccctgccccgggaccctatctgcctatcccctcccctgctcagagtttttaagccctctcaaccagggctggccaccctggtcttgagggttcctggccacctagcctgctcctctgctctctgggttactgaggggctcaggaaggggcccctcgagccttcctggagtacccgagtgctccctatgcctttccaagcatttctacttggggaattgggccacagaggtagtgagccagtgtcctgggcctctgggatgcccgccccattgctgccaatgctggcagcccctcccctggcatggcaggaccatcgccactctgggcactcctgagcccagctctcccctgcttctccccctcctacctgagaggctgcaccctccaacctcccattggctcgctcccccccccccaccgtgccctccatcacgccctgcccccagggtggttcatttcccagccctgggtcaagggcctgccttcgcctcagggactctcttcctttggatgagggggtccttgggtttcccagctgcttcctgctcagctgggccaccccctcccaccctggggttggggaggagcagggagtgggtgcccacagttttcctttgcttctcccagagctggtttgcacagcccttgtgtgtggggctagaatgtgccttagtcctgaatcctagcccttacccccatcctctctagacggtatgtcctgacataacagcagagtctggtgtggtgctggtgagggttcgccagccctcccctccccagggtcatagagggggccatgaggctggaattggccagtgactgaatcttggagatgtcggccaggtgctcccattggggtttctagcctgccctagggggaggtggtgatgttgggagtgggatctcctgagtccttgttgggcagaattggtgaggccagggatggcagggaaaagtggtaacaagcctctctgcccatctacttccaatccctctctcccttactgattttttgatgccctgtcttctgggcccctaggagggatgagagaggagtagccccctttttcagagagtttggggtctacctcagagctctccctgtcaaaaagcagctgcaagcctcgcaagggtggagtggggggagactgaggaccagtagtacctgcagggtgcccgtggctgtggccagtgtcccttagccaacctgctgggctcaccagttccccgtctgatctgcctgtgcgcctcccattcttctctacccagaacctgtcatgggctggggctcagattttcctggctttgggagcagacagaccagagccaccagccattcagaaaacttcttatagctaccttcatgcaaaactgttttcttcttccttctcaatggtgacatttgaagaggcagagcaccttggggctcctccttctgtcttaagagaaagccaaggcacgtagagtagggagaagaagggcaccatcctctctttcctccccagggtctactgctgatttctagatggatcatgcagcttctctcagctcagctctttccatctaccaaatgggtgtaataatacttacctacctcacaggactgttgtgaggcttggcaagttttgtctaaaaacatctttttggcttggaaagggatctgggaagccaggtattaattgcagggatagttccaagtctgtcctgtcttcatctctgtgtcccatctctacaacccacatacagacacacacactctctctctctttctttccatcccaccccccttggaattatttagtctttgcaatattagaaaccttgactctgatgcttaaagcttcttgtccatggcttttgtttgatggttttcaatagaggtgactgagattgtagggggggcatttttggttgcccccatgcgtgggggcactactaagaatgctaaacttagtccccacaacaaagaatcatcctgtcccatgtcaacattatacccatggagaaacactggcatggatttgcactaggatgtatatgggcaaagctatcttccccaagtggaacctcagtgcatgcaaatctctgatggtggcttccagggcttgtgggctagagagagccacttacaaagtcgatcttgagagacctggccacatgcagctgggctgagtgatgtcagcgagactaaagacaaagttctgagctcctcatcaactacaaaatatgaaatcagcattccaggttctgggcttctccccatgtcgtaattgaacagaaggcagcccgaataaacccctgatgttagagaggcctggggagagcagccgatggggctcagactacatatggcaggccgatcagagctcttgtggagcgagggcttgagagcatgcttgtgagatggcaggaggtggggtgtgcttgtgtggagtgtgcgtgtgcaggcagtgtgggtgcatggcagcgtaactgtggagtggatgggctctgcatgtaaggggtgatgcatgatgggcagatgctggacatttgaggagccgtctttcttggcctgagctatgcctgttgaggcatctggagactgagaaagaatcaaaggcagagaagaccagccgtgctcctgcattccgtcactccatgacttcatctcagtgtcacagacagctgccatcagagggctggcagtagggagttccaggagcggggacttctcgggaaaatcctataacttgctttactttactttgtcccaggttggagtccctaccctcccacctcccacctgatatgcagtgcttttgactatcttatgcatggtttattcctctggcttggatgacaacaatacccatagtcaattttcctatgtaactatagatcaaatgatgcaacaacaggccttgggaggcctcaggtgtgcgagtgcctctgggaggcgcagatgcccacacagccagcactgacttgtgttcgagcacagaacggatataatcagtctggcctctacaacaagttttgcattgtagaattgtatttagctttgccttggatgaaataaaaattatgtttaataa

SEQ ID NO: 314 - DNA, 5828 bp, Homo sapiens
gtcagatcagggatcattttttttccttcctctactccctcccccctacccgcccctccctccctgtttcccttccctccctccctcccctctctgctgggtctgtgcgctggggcgcccgatcccctccgcagctgggacgctccgaactcgaggcaggagtcggctctccggagcctcgtccctcccttccccttccctgcccccttcccccacccccgactcgggcttggcgcggcggccagaggaaccccgagcccgcatttgctgcatcgagcagttggtttagtatcagccaaacttgcagctgttcagaccgcgctccgccgagtcccggcccaggcccctgagctggagggatggaaaactcctctgcagcatcagcctcctcggaggcagggagcagccgctcccaggagatcgaggagctggagcgcttcatcgacagctacgtgctggagtaccaggtgcaggggctgctggctgacaagacggagggtgatggcgagagcgagaggacccagtcccacatctcccagtggacagcggactgcagcgaaccgctggacagcagctgttccttctcccgagggcgagcccccccacagcagaatggcagcaaagacaactctctggacatgctgggcacggacatctgggcggccaacaccttcgattccttcagtggtgccacctgggacctgcagccggaaaagctggacttcacccagttccaccgcaaagtccgacacacgcccaagcagcccctgccacacatcgaccgcgaagggtgtggcaaagggaagctggaagatggggatggcatcaacctgaatgacatcgagaaggtccttccagcctggcagggctaccacccgatgccccatgaagtggagatcgcacacaccaagaagctgttccgcaggaggagaaatgatcgaaggcggcagcagagacctccggggggcaacaagccccaacagcatggtgaccaccagccaggcagtgccaaacacaacagggaccaccagaaatcctaccaggggggctcagcaccccacccctcagggaggcccactcaccatggctacagccagaaccggcgctggcaccatggcaacatgaagcacccaccaggcgacaagggggaggcaggcgcacaccgcaatgccaaagagaccatgaccatcgagaacccaaaactggaggacactgcaggggacaccgggcacagcagccttgaggccccccgcagccctgacaccctggccccggtggcttctgagcggctgcccccacagcagtcaggggggccagaggttgagacaaaacgtaaagacagtattcttcccgagcgcatcggggagcggcccaaaattaccctgctccagtcttccaaagacagactgcggcgaaggctaaaggaaaaggtaccggatgaagtggccgtggagacgaccactccccagcagaacaagatggacaagctgatcgagatcctgaacagcatgcggaacaacagcagcgacgtggacaccaagctcaccaccttcatggaggaggcccagaactccaccaactccgaggagatgctgggcgagatcgtgcgcacaatctaccagaaggctgtgtccgaccgcagcttcgccttcaccgctgccaagctctgcgacaagatggcgctctttatggtggaggggaccaagttccggagcctgctcctcaacatgctgcagaaggacttcacggtgcgcgaggagctgcagcagcaggacgtggagcgctggctgggcttcatcaccttcctgtgcgaggtcttcggcaccatgcgcagcagcacaggcgagcccttccgtgtgctcgtgtgccccatctacacctgcctcagggagctcttgcaatctcaggatgtgaaggaagatgctgtcctttgctgctctatggagctgcagagtacaggccggctgctggaggaacagctgcctgagatgatgacagagctcctggccagcgcacgggacaagatgctgtgcccctcggagtccatgctgacccggtcgctgctcctagaggtcatcgagctccacgctaacagctggaaccctctgacgccccccatcacgcagtactacaacagaaccatccagaaactgacagcctgacagccagggggcctggcaggcggcccacgggcagctggggccctggtgcacagggccagatggacaggcgggaggacaggggtggccctggcgggagaaagaaatggggaggagggcaggcagagtcggtggccagtctggagccagacggggaagggagcaaatccctgagaggagtgcccccgcacaagccccccagcccgagcatgcaagctcacaccaataagggaagcatgtttctttttcctggtggccctggccctccccttcctcactcccgcctctcccctccccatcagacccatcccccacggagctttgtgtgagggatctcatcgctgtgactcctcggagaccttggcagcctcgcacgccggggcaccgcttgggtcagaaaggacctcggaaggctgaaaaagtgggtcggagacgggctcgcattgttcccgcatgctgtcagccgcagtcgccaactggcagcaggcgacgtgtagcagatgtccgggaggacaaaggcaggcacggtccccaccagccgcccgtaattgacggcctttgtcagccatggcagagctgacgctccacctcccacctccaagtcctcctcactgcagcccccacagcctcaggcctagggggtcaggcgcagcgggggagatggagtttgcagttccacttgcactcttttgtttattgtgttttatttttcaaaagtcggttgctttgaagtctctttggccaatgaaaatgcccgtgatgtgatcacacagtcagcactgttgaggacccccggattagtgggagatcaaacccagctcccctctagaagaaggattcgagccacagacagcttgccagtagccaattagggtaattggaaacttctgccccggcggggggtccccgctggaatcctgtgttcctcgccactggcttccagcgcctctgttttctcaaagggctgatactgtcaccactgggaccaagttaaacctggtcctggccccaggggccttgtggcaaacagggcacagaacgagactggcaaattaaaaccaaaattctagatggtgtcttgcgctccacacgcaggtcttactggggaaaaggatgggagtgggggctccccaggactcgattttagctaatgcgctgtgtcactgccccagctcggacgtagaagcccagccctccgtgagctcttgggaaaggggtgaattcactgggtcatggaagggacagtcaggtgaccagcggggtcgccagatgaagcttcccagccgggaaacaagacggggtttcttggcaggccctggtcctggggagcaggccctgttgttggctggagaggaaggtgtggggtggaacaggtgtccacatagctccatctctgggggctggagcacacactttgatgagcccccccggaaatgatgtcagagcctagccgcttccttatttgctcttttattgaggccgggcaggccctgggtcactttggaggcccctcttggtccacactggactggccgggaggtgatgggcggggaaggttctcgtgattgattgattctgagtctgagagtggcgagtggggagaggcttccccagttctctccagctttccctgcagctgcaacctgccctctggtcccaggtgtggagcctttgcctgtctctaaaaagagcctgttggcgacaaggtgtagggggcacaagtttacctgaaacaggtcagtggtctctcccaagaagcgcacgccacctctggtccctggccctgaaccctgccttcttcctccctccacggtttcttcccagactttctcaagctcctcctcactgcccttcctccccagcccagcctgggaacacagatgccccgcgggtaggaggcctcgagggaggagccgggctgatgcggggctgctcagggcaggccccagggcgagcttgccatcgtggccaggcagcctccacctgtgcttcagtggcccctgcccccctgaagcatgtggggtttgtccgctaggaggaggcaaggcccccgaagagaggagagacctgggagtgggagctcaggtcagggaggaggcaggggagtggggtctcccagacccaacggtgagctcagagcaagcttcacgcaggacgctccgaaacactgtgtggagggggctgtgttgtgggcaccttggggcctgattctccttcctccgaacgggctccttgatggcctggccacaggggcagctccccattggctgttaggaccagagtgtgaagaagaagtgaaatataaatatgtatacatatataaatatatttttaattacatgtcgtgtcacggtggctccagacatactgtttgcctagtttattccactgcttgaaagcgcttcctagccaatctgaacaacaacactttaagctgtttttctaaatgcaggttgctgctcctttttcagatatggaaggaaaacgttaagactattttttttttaaagaaacaacagtcaagcctaaaatttgagaccccgaggcagcttcccgagggagactgctcagacaggaactgcaggacagaagtggatgccccacagaccctggccccctccccaagtccatcccctctctgtggcatgaggaaggccgcgtccgagttgacctctgaatgtatgtgatgagaggcagagctggatattgcatttctaaggcttgcattgctttcccctcgcccgcggttcttggcgcatggaagaggcggtccagccatctgatgttgatcctgtctcagtctccccactgcctgtcaggatgagttagtcattgtttttctccgaggcggcctgcttgccacagccctgctccccaaggcctggtggctttgccgaagctctgggaccgcagccccagcgaggcccccaacctcacccagacgaggccaggagccccgccaccctccacgggatgtgcaccctcagaccccattctctctgttcgtccttccttgaccagtctgtaaaccttcactgtttggggatcgtcctgtccatccatgtaaatgtaaatgttggccgagtcggtatttattctgattgatttttattttattctattattttctccgagggatgagggtggggggtgtgggaagggtaccacagatcaggccggggcagctgtaggggcgggggcccagacagccaggccgccaccagagcagccccatggggtgccccagacgcgggcctccaagaagccaagtcccagtctgttttctggcatcagacaccggcccgtgttccttgtcagacagacagactctcaggcctgcctggggagtcgtgtccctcagctgcagggcactgtgttgggaaaccattggctgggcctttgaggacacagatcagaagaaagaaagacaactttcctctgcgcggaacactcacacggaagggctggccgcctccctgagccggctgggagtggacgacaggacctacctccccagagcaagggcctggggcttcccgccaaagctgccgcggaaccccgctagtgcgaccaccctccctccgtcggtatgtcctgctttccagctgaacccaaactacaagtgggtttaaaaaaataaacaccaccaccaaaaacaaaaaaaaaaaa

SEQ ID NO: 315 - DNA, 1199 bp, Homo sapiens
gcacatgcgcgctgtcctggctcgggagatggacggccgccgtgttttgggccggttctggagtggctggcggcggggcctgggtgtccgcccagtgcccgaggacgcaggctttggcaccgaagcccggcatcagaggcaaccccgcggctcctgccaacggtcggggcccctcggggaccagcccttcgcggggctgctgccaaaaaacctcagtcgggaggagctggttgatgcgctgcgggcagccgtggtggaccggaaaggaaaaccaggagagctgacgttgttctcagtgctgccagagctgagccagtccctagggctcagggagcaggagcttcaggttgtccgagcatctgggaaagaaagctctgggcttgtactcctctccagctgtccccagacagctagtcgcctccagaagtacttcacccatgcacggagagcccaaaggcccacagccacctactgtgctgtcactgatgggatcccagctgcttctgaggggaagatccaggctgccctgaaactggaacacattgatggggtcaatctcacagttccagtgaaggccccatcccgaaaggacatcctggaaggtgtcaagaagactctcagtcactttcgtgtggtagccacaggctctggctgtgccctggtccagctgcagccactgacagtgttctccagtcaactacaggtgcacatggtactacagctctgccctgtgcttggggaccacatgtactctgcccgtgtgggcactgtcctgggccagcgatttctgctgccagctgagaacaacaagccccaaagacaggtcctggatgaagccctcctcagacgcctccacctgaccccctcccaggctgcccagctgcccttgcacctccacctacatcggctccttctcccaggcaccagggccagggacacccctgttgagctcctggcaccactgcccccttatttctccaggaccctacagtgcctggggctccgcttacaatagtcctccctctgttcctgaccccctcacacacactggaaagtgagggtgggggctctgcagtcagacaaacctaagatcacatcctggacaggccacttgcttgctgtgtggcattgggcaagtaactttacctctctggacttgtgataataaaagttcctacctcaaaaaaaaaaaaaaaaaa

SEQ ID NO: 316 - DNA, 9037 bp, Homo sapiens
aaaatgagtgttttcagtctctccgggttgcatgtactgtatgtggagcagtgtacagtgaagcggaggcagagcggctccgcgagcttctctccactttcccatagagaaaccctgactggccgctgagggctagctacacacacgccctcacgcccggcgagcccgcgaggtcactatcatatgacaaaggctttgccgcagttcatcttcctccctgtgtactttccatttgccttcctggaatcctgctgcatcacagaagctggaagttctgatgttccactgaaatcacaatggaaagtcttgacttgactggtcacagtaatgaaaggcagtaatagaaataaggatcattcagcagaaggagaaggggttggaaaacgaccaaaacgaaagtgtcttcagtggcatccattgctagcaaagaaacttcttgatttttcagaagaggaagaagaggaagacgaagaggaggatattgataaggttcaacttcttggggccgatggcctagagcaagatgttggtgaaactgaagatgatgaatcaccagagcagcgagcccggagaccaatgaatgcatttcttttattttgcaaacgccatcgctctcttgtacgtcaggaacaccccaggcttgataaccgaggtgctaccaagatactagctgattggtgggctgttcttgatccaaaggaaaagcagaaatacacagacatggccaaggagtataaggatgcatttatgaaagcaaatcctggctacaaatggtgtcctaccacaaacaagcctgtgaaatccccaacacccactgtcaatccacgaaagaaactttgggccttcccatctgactcttcaagagacttgccaagccccaagaaagcaaagactgaagaaatgcctcagcttaactttggaatggctgatcctactcaaatgggaggcctgagtatgctgctgttagctggagaacatgctcttggcacaccagaggtatcctctggcacatgcaggcctgatgtttcagaatctcctgaattacgtcagaagtcaccattgtttcagtttgccgagatatcttcaagtacgtcccactctgatgcttctacaaagcagtgtcaaacatctgccttgtttcagtttgcagagatttcttcaaacacttcgcagttgggtggtgctgagcctgtaaaacgctgtggaaagtctgcactctttcaactggcagagatgtgcctggcatcagaagggatgaaaatggaagaatcaaagctaataaaagcaaaagaatccgatggtggaagaattaaagaattagagaagggaaaggaagaaaaagaaattaaaatggagaaaacagatgaaactaggttacagaaggaagcagaatttgaaaaatcggctaaggaaaatttaagagattctaaggaattgagaaattttgaggcattgcaaatagatgacataatggctataaaaatggaagatcccaaagaaattagaaaggaagagttagaagaagatcacaaatgtagtcattttcctgatttttcttattctgccagtagcaagataataattagtgatgttcccagtagaaaggatcatatgtgccatcctcatggaattatgatcattgaggatcccgcagcattaaacaagccagaaaagctaaaaaagaaaaagaagaaaagcaaaatggatcgacatggaaatgataaatccacacccaagaagacttgcaaaaagaggcagtcttcggaatctgacattgagagcgtcatatataccattgaagccgtcgcaaaaggagactggggcatagagaaacttggagatacccctcgcaagaaggtccgcacatcctcaagtggcaagggaagcattttggatgccaagccaccaaagaaaaaagtgaaatcaagagagaagaaaatgtcaaaggagaaatcctcagacaccaccaaagagtcaagacctccagatttcattagtatttctgctagcaagaacatttctggtgagacaccagagggtataaaagcagaaccattgacccctatggaagatgcactaccacccagcctatcaggacaggccaagcctgaggacagtgactgtcacagaaaaatagaaacttgtggttccaggaaatccgagaggtcttgcaaaggtgctctttataaaaccctggtgtctgagggcatgctcacctctctgcgagctaatgttgacagaggaaaacgaagctcaggaaaaggaaactcctctgatcatgaagggtgttggaatgaagaaagctggacatttagtcagagtgggaccagtgggagcaagaagttcaagaagacaaagccaaaagaagactgtctccttggctccgcaaagctggatgaagaatttgaaaaaaaattcaacagcctccctcaatatagtcctgttacatttgaccggaaatgtgtacctgtcccaagaaaaaagaagaagactggaaatgtgtcctcagaaccgactaaaaccagcaaaggtcctttccagtctcagaaaaagaacttattccacaaaattgtcagcaaatataagcacaaaaaggagaagcccaatgttccggaaaaaggaagtggggataaatggtcaaacaagcaactcttcttggatgccattcaccctacagaagccatattttcagaagacagaaacaccatggagcctgttcataaggttaaaaatatcccatccattttcaacactccagagccaacaacaacgcaagaacctttggtgggcagccaaaagagaaaagcaaggaaaaccaagattacacaccttgtcaggacagcagatggccgggtatcaccagcaggaggtactttggatgacaaaccaaaggaacaactgcagaggagtctccctaaagcaactgagacagactgcaatgacaaatgctcacacaacaccgaggtcggggagacgcggagcagtactccagaaatgcctgccgtgtctgcgttctttagcctcgctgcgctggctgaagtggcagccatggaaaatgtgcacagaggtcagaggtcaactccgctcacccatgatggacagccaaaagaaatgccgcaggctcctgtacttatttcctgcgctgaccagtgaagcgccctttcattgtaaaacattgtgctttacctactaccctagccttgtctttaccgagggatgctagtgagtccaagtggtggaaaatatagactgcaaacaagtgcttgttgccccacacggcccagattcacttgaagcagaagttagcatcctgggccagtttgttctctcagaacccagaatctttgagggtaaggttatctgtctgatactgagcagaaacagaatgatcctggagctttgctttctattgaaggcttttgacggtaataggtggtaacttggtaaaaggctgcctttactgtagctcacccagcatctcttttaccaaccagagagtgtgaaactagtttcatatattacctagttattctttcaaaacaaaacaaaaaaaaaacaaaaactgacgcactgcactagttattattagatattcttagtcttttttgtacatggagatttaagtttaagatggtttatataataggttatacctacatttatattgtagaataaatattaaaaagcctgttccagagactcccaagcagcctgggcaggcagatgtaccattgttagtggtgtatgctcggcctcgtggtccatatattctgcacttttatatttgccaccagaatggtagtttgctggcaaaaaaaaaaaaaaaagagagagagaaaaaattacaactcttacaatctgaatttttttcttagccttgagtgaccaagaagaatttgcttgaggcaaattgtggcaaatattttcccagacaggggaagagtcctgcagattacagattactggtgttttcatgccttgaggattcttttatttttacataggggtctaagtgaccaatggattgttcatacaaacaaaaaaaaagacaaaaatattattcagaagtgaccttagtattacttcactattctaaacacattgaagacactcacttcatgtggacttggagctacagaccttttacatccatcacagattggctggacgggttgcaattgctatgcacagcctgattggcactgcaggtttttagagccattttgagtttgtgttgtttaggaggtactgagtcaatgatgagggaggtatgcctgaccagagtgggactctcagtcatagatccacctgcaagtctctgtttcctttttgtgttttgttgcttttgaacataaaaccaaccatacataagcagcgccaagtggattaactggcttagaacattcaacatattgacttaaccacctgacattcacagtgtcttgtttcctagcaacagatgcaaagtgataaatcaaaattagtctgaggctacagattttacagggtatttgttctatagcacaaagtatttccccactcttgcgtcacagcacaaactaccaaattttaattattggattccagcaataatttttaatggttttcaaactggcggaattttgacagtgctagttcgagtttgaagcttttgaattagatctctaaatggtgacagtttacatggttttatctagctttcttatttatacttgactgaattgtaatgattttttttctaattgtaatttgacgtaatagccatacaaaaaatgactctattcatactaggtttagcttctcatggttgtagatattacttcagttccggtgctggaaaatatgtacaacatactaacaggattgaaaaaaaaatagaggtttttcttcttgtttttttttccaaagcaggtaaagagggtagcaaagcatcggaatgatgtgctcaaaaatgcatattcctggtggggatggaggaagaaggcattagtaaaaggttaatcaaacgttacaacttaaccccattcatgtaggaataaatcaagtgagcagttccagacttttgcataatatttttactatgatgctgttttattaatattttctaaatttcaaaacaaaaagtgaatgtttgaaattgctgggtcccgatgttggtggctgttggagttttggaccactcgctagcagtgatttgaagattataattagctaaaatccaaaacaaaaaaccaacaacaaaaattgtatggtgcggaacatgcaccttgacaatggtactaacttgttattctatagaacacgttagaatagatctatttttgccagagcaccctccttcagtcctccgattacatttcactagagttccttacgagattgctgtatattcctgggaccttttttaaaaaaaaaaaaagcaaaacaaaagattactttttttctatgtgattaatatcttacttgatctgcttttcctaaacctcagtggcttttcccttaggcagggttgggggtgggagggcaacttactggagatgactgttttcagatactttaaaacaaacctttttgtagaaatgcttaatttttaagcggttaggcactgagagtagcagaaatcctgcaaagctttatagttccttagactcaccttgtcgattctctgagtaaagtcttgatttcaataattgtgcttctcatgccctgaaactgctggagaggagtgttgttattttcaggtaacaacattcgttagcacaaatatttcagaccaatattagtgctctccaccccaccttttgttatcattttcatttcatttctctcattcttttttattttggaaaatcatattgctatagtgtgtactttaatctgccagcagataccatctacactaacatttgtcccacagcatcctcaagagaaaaagttgttgcaccttatatatatctcaagcaaaccaaaatatgatgctcttctgctttgttttattctaaattgttgtatcatatctttctgaaaccattctgaatttagttgaaattatcaatatttatgcttttaaccttaatttctggattcaagcctgtatataaatcttttgaaaaaaaattgtcctagcccttctctgcgatgctggaagtagaagattgcgtctcagatggagacgcagtactgttccagttttctttagccttttatttatttagttattctgggtatttcctatgtaattttgaagtgtgtagagtatattatagtaactgaagctgcagctgtaagaagctgagtgaaagaaaaaatactgtaagacatccttaaagtttttatttgtttgggtactgtatatgagatcaggaaaaagaaaaatgtcccacagccacattggaaatacaggttcttgtccccaaattaggttagttcccagattttagatcaaaactgttaattcattaaaaccccttttaaaaggtaaattctactgttgtaattccgatagtctttttcccacaaatatcagaaatatatttatttaattctgtcagatgagctttctaccgatgccatgtcccaaagccatgttaaaataattcccacgttatcattgtgattctacttcctgccactaaaattgctggagaaacaaaataatgatggaacactatgaacaaaaaggagcatctgaactggtctggttatttagaatccaatgtgttcaaatccttttgttttcttattaagtcagatgctactgtaagtcagataaaattttgtttgcactctgcagtctttggctcaatgtatggaaatgtttgcacctatgtaaagtcacaagctaattacaaattgctacagaacaggagtaagctgaaaactgaatgccatgttttgtttataaggtggggaggggagggaaaataccaaaaaactctgttccaagtttggcatttgacattaatgtgaagcagtgggaccatgctgcctgctaaactactgtatgaatcgtaaatgttctgaagacgagcagctggaggctggaggatggcattccatacagcaaaggagaagcacccaccacttcatctgggaaaaggaaggaaattgcaggaggcctggagccatcatttgtaaaggggatgttgcggggtgtgatgctgttgaggagattcaccttcaattgcactgctccacagagccctcatataaggccaatcctaatgggctacctcggctttaaaagttaatttcagtaagtcctgtttcaaaagtttgtctttttttgcttctaccttcagtgccactattttccactgcagtgttttgacttcacaaactgcctcctccagagagaacaatgtattgctgaaaatgggcagtagaagcaaatgctgttgttacatttgacctataaagtattcagagtgactgctaggtagaaattaaaacttagctttcccaaatagctccttattttgcaccttataaaaagtatactaattgttaattagatgttgcttttgtttatacaagcattcccaaagaactagatttggattttgttttgagtttttggatttttaaaaattatcttatttagattgactaacagcatacttacaattttaaaagaagctgttgttcagttcatcttaccagatgtgtctggcgaagtattcagggtttgatggactgctttactttcgtttggaagtgatagctaagtttattatactctatattaaacaactttgttcatttcactgaggaccttatcttccttatatttcagaacaaagaagcaacaagcgtgaataaaaagacaaatgtatttgactccctcataatccccatctgtatgtgctacccttccttcaaatatataaatgtgcatcttttttttaaaaaaaaaaaaaaaaaaggttcctcttctggccaaatttgatctatggtggtatgattcatactgttaaattgagagaggaaaccttgtggttaaaaattatatggctgctgttttctttttgcagtcagtggtcaaaactgatcatgtgcttaaatcgatttttatgcacagaactagttattgtgaacattactgctccctccaaagatttcctgataacttgggccagaggtggttactgagtaacaaggatctaattcaatgcctcaaaactcttccacccacaatgcaaatcttacctcacaagctctaacctaaatcacagagacatgcatgtttcatgcattaacactgatttcgctctgtggcccaccagaggggtgggctcatgtcccctgactcctcacatgagtgcctcagctctaagagccgtggaacggggggtagggaaggtttgcgatctggagctcagcaactggctcagcaacgttttctccatttcattagcactaaacaagtctcttgctctcaggaatttgtcagaaaaaagaataaaatcacctgagactccacataccagattataaactcttctcgtaggtttgaattgcttactcacatgtcataaattaaccacagcttcatttgaccaccaggtctaaagtctgttgacagtttcagcatgactgaatcgctcattttttttttttgctttcagaaattggcttggttctctttagagttggtgtaaacatgccatgtaataaatgatttccacttaatggtacaacagaattattgctttcttagatgtatgtgtagtaaaagtcaatatacacatttatataatttctttcttcaaaatcttatacctaatttgatatttctaaaaattgcacatgtaagtcatgtgtataacatgctaaagtactttaactgtgatcttaaaactgaataaaaatatttaataaaactttgaaatattttaaagatattattcaaatatatttctttatgttcacactactggccgtagagtatgtgcctttaatgtaccattttcactaaaaacagtaggaaaaatactaataaaagtaagatatttcaactattttaaaaaaaaaaaaa

SEQ ID NO: 317 - DNA, 1672 bp, Homo sapiens
aagtgcggaactgcgtttgtttccggcgtgggtccgggcaagaaccgcttgtagtttggtttaaattctgcacgggaggaccttctgagtttacctgttgggctcctggctgcgcaggcacagcagctacacagaagagatgggagaagaggctaatgatgacaagaagccaaccactaaatttgaactagagcgagaaacagaacttcgctttgaggtggaggcatctcagtcagttcagttggagttgttgactggcatggcagagatctttggcacagagctgacccgaaacaagaaattcacctttgatgctggtgccaaggtggctgttttcacttggcatggctgttctgtgcaactgagcggccgcactgaggtggcttatgtctccaaggacactcctatgttgctttacctcaacactcacacagccttggaacagatgcggaggcaagcggaaaaggaagaagagcgaggtccccgagtgatggtagtgggccccactgatgtgggcaagtctacagtgtgtcgccttctgctcaactacgcaattacatctcgtttagcagatgtgttcaaccaaaggtgtgaggtgaaccgaagggcatctgtgagtggctgtgtcattaacacctgtggctgggtcaagggctctggttaccaggctctggtgcatgcagcctcagcttttgaggtggatgtcgttgttgttctggatcaagaacgactgtacaatgaactgaaacgggacctcccccactttgtacgcactgtgctgctccctaaatctgggggtgtggtggagcgctccaaggacttccggcgggaatgtagggatgagcgtatccgtgagtatttttatggattccgaggctgtttctatccccatgccttcaatgtcaaattttcagatgtgaaaatctacaaagttggggcacccaccatcccagactcctgtttacctttgggcatgtctcaagaggataatcagctcaagctagtacctgtcactcctgggcgagatatggtgcaccacctactgagtgttagcactgccgagggtacagaggagaacctgtccgagacaagtgtagctggcttcattgtggtgaccagtgtggacctggagcatcaggtgtttactgttctgtctccagcccctcgcccactgcctaagaacttccttctcatcatggatatccggttcatggatctgaagtagagatcagcaggaagccttgctgcctgggacatagagatcatctggccacccctagaggcagatgggctgagataaaagactgttggggccacctgaccagtaaactgtggactagtagaaagttcatattctacctctaaaaacaggtagtggtaacctgactcttctaatcttgaaccaaaaggaaaaccatgagactgtaattggtttcttagaccacctaagatgccactttgaattctctaagaccctggagaattgcatttctttcactgtgctactatgtggtttttaaaaaatcaatgctttatattccatatgtggttcttacccatttatctaggatgaaagtgtgaattagagggactccttccaataaagttcaaacttaaaaaaaatcattttaataaatatttttgccatatcataaaaaaaaaaaaaaaaaaa

SEQ ID NO: 318 - DNA, 9078 bp, Homo sapiens
gcgcgccccggcgccgcgcccggccgggagccgcctgttgatcgccgcgctcgccccggccacggcgccgcccctgttctcccggccccgctccaccggggctgacggactgacggccagcacagccggctccgggatgagcgcacggacggtattctgaagtctcaggaaactggaccatttaaatgtgcatggcccatgagaaaggcttataagaagccatggcactcccctttcaaaaagagctggagaaatacaagaacattgatgaagatgagcttcttggcaaactctcagaagaggaactgaaacagttggaaaatgttctagatgacctagatcctgagagtgccatgctgccagctggatttcgacagaaagaccagacacagaaggcagccaccggcccctttgaccgcgagcacctcctcatgtacctggagaaggaggctttggaacagaaagacagagaggactttgtgcccttcactggagaaaagaaagggagagtctttatccctaaagaaaagcctatagaaactcgtaaagaagaaaaagtgacccttgacccagaactggaagaagctttggccagtgcctctgacaccgaactctatgatcttgcagctgtccttggagtacacaatttgctcaacaatccaaagttcgatgaagaaacagccaacaataaaggtggcaaaggacctgtcagaaatgttgtcaaaggtgaaaaagtaaagccagtatttgaggaaccaccaaatcccacaaatgtggaaataagcctgcagcagatgaaagccaatgatcctagcttgcaagaagtcaacctcaacaacattaaggcttttgcagacatgctgaaagtaaacaagaccttgacaagtctaaacatagaatccaattttatcactggaactgggatcctggccctggtagaggcactgaaagaaaatgacaccttgacagaaatcaagattgacaaccagaggcagcagttgggaacagctgtagagatggaaattgcccagatgctggaggagaattcaaggatcctcaagtttggataccagtttaccaagcaagggccacgaacaagggtggcagctgccatcacaaagaataatgacctggttcgtaagaagagagttgaagcagaccgaaggtaaacttccttgaggagaagtgaagtttcactgtggtatggccattgaaaaacaaaaactcttcttcttccccatcaggaccattttatcaaagttcgttcatttccgttaaccacataactaataatttaattgttattcttttttagcactacttatttatcttggattttgtaatatatgcaattgttttatttgctcatgggcacttctggcaacttgacaaatggaccgatgcagattttagagagtgacgacatggaaaatgaatttaaccactttcttattgggttgtcttgctttcttacatgaacttgtttttttaatcactgaaaggaatttagtgtataatatgtgtttgtaactgtgattatgatagaggcctatctctgtttacatgcatagctttgagttaggctaaatacatcagaagtgttctactgaccacataagaagttagtattgccaatctttcactgcatgtgaaaatgtgaccaatttagcacaaattctctcttagttccagaaaaatcagtaaatgcacatgccctgttgattggagatcagtagtgtcatcttcataaagcaagacaacattatgacactttaaaacagtagcaaagaagtctatttattaacccacaaatgtagcatcaagccagactcacaggtagcaaaatgaattacacacctacttttactgactattcaacataaattgaatctttaacatgactttaaaggctatttacaaagctgttttaaagtttttcaaacatgatagaaattttctaaattttagtaagagagaagcttttaaaacagtacattcctgaataaaacaacaatattgtatcttaatcaaggctgtctgatgcagatgattgcattttttggcaaattttagaagcatttattgctttgtctttagtgtaacaagatcactggattaaatataaacattcaggttaattatctagatttttgtccacagtatatgatccatccagacatttgcaaacgtcaggagaaaaatgtgaattatttatccagatgcatgtcatctcaaggacaaagcctgtgaaagtacaagtgagatggttgcattgtagtatgcattaatctttcaatgtagtggtgtaaaaatgcagtgctaaactaatgaagcaggtgactgcagcctttggctcaagctcacaactctgataactgtcagtgcctgaggttgtgattggtgacattctgacactgcccaaggcaactcaccctctattcctcctttctcccctccctttcttccaattcattgtcttttttttcctcttttctctgtaatttgttactaaacaaattccagaatttgtttagtagctgagtgttcctgagttgcctagtagcaataaaacaagtgaataggaaaataattaatatattattctatttagcttgtaaaacacatggaatctgtttaagatagcccttgtaaaattgaacatttacctgtattgtaagtacccacatctgtgtctctgaagtcctttgaaacatctcattatcttgaaatttttttaatgtttgagaacaccataagcagaatattctaacacctttggcccctgaaaatcctttaattagtttatggcttcatctccttatctatttaaaaaacatagtaaataatgtttatggttttcagtctgatttttccttccctttcacccatttaggtgtgatgtgttggagtcaacttgtacaggcttgccaactgttatattttcaagaattttgcaaactggttgttcaatacagccattatttaaaattaaatgatgtgcacttacaactgaatgaattatattaaggacagaagtaacaaatactgtactcaaaaatcttacattttactattttctaacctcttagattatttacatctagtaggtatgtatgtagaaatattaccaaacagtatgctactgaacgtatcctctcaactccatgttcactaccttcttgttactacagtggcttgaaattggccatggtagaaatatttacaccacagaaattagcaatatgtaagaaattggggttttctccctctccagattgctggttgataaacattcatcagcacaccactgggtgaaattatacatttttttatacatatgtttcgcttatcatgttgccgaagggaagaacatttctcttagatgtcttttctcctctttggatttgttacaaacctgtttaagtgctgagtccctgacctgcctctccaagtaagcctttttcctttttttttttttttttcttactctcattcttgccttgactcttaaaatcctggaccctatagagcattccttgcagccccacagtgctgtgggctgggggctaaagcagttcttggcaaactctggcagaaagcaagaaaaaaagaatcagaattcaatcatggctgtttcttttgtacaagcagttgttgatagtattaaagcaagataatgggacattatcaaaaatatagcactgtttttaccttatgaaatagttgggttgcatgcaacagagtctatgaaatcaaatgttttttactaatcagtttgttttcttattacctgtgtttttaaagtggcttgaaaggtggcatttccatgagtgtgcacatattgatgataacccttagaaaaacatacacttgaggagcctatccatcatttaattagcctaggacttcatctccctctctgcccaaagtgtggaagtggtagctctttcatgatcatgggcacagttaatcctttgctatccattgtgatggggcataatgtatataaaatatttttctatgtatttgttctgccagatactgtgttgagatatttggcaatatctggataactgactgaagggagataacttctccccaggcctatctccctcccccttttagagttgtgcaggtccactttaagtgtaaaatcactcacctggacttgtgggcttgtatcaccaacatctattatggcacatgtagatgacatttaggagaaaaaccttagaagtctagaaatcatatgattagttcagcactgcagctccccatctgcttatagtgtataactggaagctctttcatcctcatcagcatgattaaatgacttcgtttctttcatctttggagggtataatgtaaataagtgtcgtgtgtgtatgtgtgtgtgtactgtcagatatctaactaggtatttggctacatctggacaactgattgaagggagatgctctctccccagtcctcttcccttgtcctttttagaattgctgcaggcccaggttaaatatgaaattactccctaggctttgcagtttatgttaccaaccaccacattttatagctatgtagaggatgactcttaggaaataaatattagaagcctagaaatcatttagttgttctagcaccaaatctatccatttgcctaatgtatttaacattccatcctcatcaacatgatgaagcccctttcttccatctttgtagggcacattgtatataaatattttgtacataaagatcatcaaataccataatggggtatttggcttcatctggaaaattgactggagggagatgctgtctcccagccctgcttccctcgtccctgtccaagttgctgcaggcccaggttagaagattaccaacctggaggggcatgcagttcatcttacaataaaagcccattcatttaaaaactcagaaatcatcccagtgcctgtactcctcaaaccaatttccctaagggaagactggcacaccagcccaaagagcaggtgcttctcttccaacagaaacatggcccctgacagggcaccagcattagggaaaccaatgtcctccgaatagctgccatgagaacatttcagatgctcaaactgaaaattcttaaaaccaatattaagcatcagcatgctttaagtgtaagatagccctttggaatttacaaacacatgtgcagctatttccttcttcacagatatgatgtactcagccccctcctaggcactacgaagaagacagaggaagcataaaaattctggactaatataattttatatgtgtttctgagattggggagtagactgagtgccttttttacaaagaagatcccatatttaattcaagtatttatagcatcagcaaaaatgggcagagggcgggaagttgagaacactaggttctgtgctatgttacctgtattcagtagaagtgtttctggagtcaggttttaagtcatgatcctgaagcttccttcccctcttccactaatgatgcaataatagctgttttcattttaacgagcagagaactaagaggaaaggtcctagctctgccttccacttgcagcttccctttacctcctcttattgctttcatctcaaatatccctgctactcaaccaatcctaaagctaaagtactgagatgcacacaaaggaaaggtgtgagagtgcttggaagcatccagctgagcccactggatgaaaatcagacgatagggcctcctgttgtaatatactagccagagaaaagcgccaagaacttcagggatattattcactgctttattgctccctaaccctagatcagattggattttactttgtagttcaggagttaagaagtcaaattgctgaccgaggtggggaaggatgatggaaattaaaggtttacatttgtttaatggcagaactgagatttgctcagcttatctctttcccatctgtctgtaatagcaatgactgaataatcagtagaccaatggaagaggagttgcaagtttaaatttgtaacctgactctgggttctgttctaggaatagtgcatgttttagaggctttgccagttgggatacattgttgacttgggggaggatgaaggagagaactgatgacctagacatagaaaagagtagttaactaactagatgttcttctgatctcttccatggtagacattctgagcacattggcccagttagttggtatggtgaaggggcaccgtactaacagatttggagactgaaacctaatcccatcaccaacacttagcaggtatatgatcatgggcaattcattcaattgcctgccaattatagactatatagggggaagagcactggatttggagtcaagaaacctggacacttggctccacacttccttagctgggtaactttgggcaaaccgcttggtctctcaagcctaaggttcttcagctataaaatgggaataatacttcactaactacctcacagagttgtggtaagaatataatcagataactggataaaaacactatataaactggaaagcgccgtacaaatgtgagagatcagttttattatcaaatcactgttttccactgcctcttgaatcggctttattctaaccaaccattacatctttctcatcttttggagtatgggtaattgaggcttgggtgtgtcatcagggactggagttatttcagctcccatgtagaggtgggagaggtggttgatggggcagtggaagttagataccagcgatgtatatggtaggacattttcctgggtcactttgacagtaccttgggaaattgtcagtccttgcagagggcctaggctgggcacaagggagaaagcgaacagttgactaagaattgaggggagggtctggagcgctactgccctcctgtcattgctgtgggtgggagaggctaagacttcaggtttgactggaggcctaggagagaagagtgtccttagggtttcaagaattttaatgcctagcagctgagtaacaggcattagttctgatagatagtgaaggggagaaagtgccacctgttgtgagatcacctctccagggcagcagctgccttgttatcaccagcaaccttagccctggtcagtaatatttctgctaagaaaggttttgaagcatggcctccaatgactttcataagcccttggaggcaggactgtgtctcatccatctttgtatcttcagtaccatcttgtaaggtgccttgtacatagtaggtgcttaatgaacaaatgttgcttgaatttagctgtcgtccagccccacagagttatgctccatttgccaccatgtgatatttttgagaaacaatagtgatttggatgccagctctatgtgactttgggcaagactctccatctatcttgtcttcatttcatctgtaaaatgaagtgagtagattcaatgctccctaaggtcccttccagctccaatacttgacaagcttgtgattctaaatcgtttccgttgcctctgaacatgggtgagtaatgcctccactgcagctgtttctctccaggaggctttgttcagaggaggtctgactattgcacagccagttttttcttcctcttcagcagttctttactgtcttcagaatggttctggataagcggccttttctgaaaggatatttaaaaatatatactatttaggctgggcccagtggctcatgcctgtaatcccagcactttgggaggtgaaggtgggtggatcacctgaggtcaggagttcaagaccagcctggccaacatggtgaaaccccgtctctactaaaaatacagaaattagctgggccctgtggcaagagcctgttatcccagctactggggaggctgaggcaggaaaatcgcttgaacccaggaggtggaggttgtagtgagccgagatcacaccactgcactccagcctgggtgacaagaacgaaactccatctcaaaaaataaaataaaatatatactatcttgctcctcagaaccagtggggaagaagagggaaggcaaagaaagaaactgagcatagtaaacacagcatttttttgtaggctcttatttaaaatgtgtgtgtgtgtgtgtatgtgtgtgtttctgagtaagtattgactgggaaaaagagagaagtcaatcaaaagtatactgtgcaattgagagaggctggcccaagatttaaaacttcctgtgggtaatctaactgtgagtagataggaatcggccatatgacgaaatgagatcaataggaaatgtgctttttgaggaaattttattttagtaccaaatgttgccagtgacaatcttcagttaagaagtaagttattctgacctaaaattcttatctctgccactttggtttaaaaacaaaaacccttatatacatggaatagttatattttaattaagcatttattttagttgttttcatccattcaagcaaaatgaataagcagcatttttcattgcacttaaaaatgtaaaatacctgcatgccactaatctgtaacattttaccagttcagatgcctgtaatgtgtgactttatgtgtgtctgtgttgttttgaagagaataaaggaaataatactttgcaaactgtttaaacaagtgtttaaacttctattggcaacatttattgggctaagcagttattgaaaactccgcatagttttattttccatttgaaacttcaatcaaatcaagactattatattcattagggaattaaagactaatttgctttttaaatgtgaagttgaacactgtgtggaaagtaaatgtgtgatgaagcaaaatgtataaagtatgaaatattatacttttaccctggataattattcaggaccccagttggcccaaataggtgcaatttttaatcctttgaaattagccagccagacctaatgctaaggtaaatgtaaactgttttaattaattaagatctttctgctttcgaaggtataatgtatctatttctgtcaggaatgatatttccaaatgaaaatgtaaagaacattgggaaataataaactttcctttcaaagtaaaa

SEQ ID NO: 319 - DNA, 2981 bp, Homo sapiens
ctggcctcccgaaggcgggaggaggggagccgggggctgggctgagacaggaccctgggtagggagcagtgcgagggagacagcgccctcagagggaggactattgggaggcggcaggagggacagcgaacgtttcctcctctgctcctgaatcggaggaagccctaggggacctctttctcctggacattgaagatatggccctttggaggtgacccaggagagaagggatgaaggcctttggtcctccacatgagggccccctccaaggactcgtggcctcccgcattgagacttatgggggccggcatcgagcctctgctcagagcactgctggcagactctatccccgaggataccctgtgctggatcccagtcgccgacgcctccagcagtatgtcccctttgccaggggttctggccaggcccgaggcctgtcacccatgagactgcgagatccagagcccgagaagaggcacgggggccatgtgggggctggcctgcttcactcccccaaactcaaggaactcaccaaggcccatgagctggaggtgaggctgcacactttcagcatgtttgggatgccccggctgccccctgaggaccggcggcactgggagataggagagggtggcgacagtggcctgaccatcgagaagtcctggagggagctggtgcctgggcacaaggagatgagccaggagctctgccaccaacaggaggccctgtgggagctcctgaccaccgagctgatctacgtgagaaagctcaagatcatgactgatctgctagccgccggcctgctgaacctgcagcgagtgggactgctgatggaagtgtcagctgagaccctgtttggaaatgtccccagcctgattcgaacccaccggagcttttgggatgaggtgctggggcccaccctggaggagactcgggcctcgggccagcctctggaccccattggtctgcaaagtggcttcctgacgtttggccagcggttccacccctatgtccagtactgcctccgagtgaagcagaccatggcttacgcccgagaacagcaagaaactaaccctctcttccatgccttcgtgcagtggtgtgagaagcacaagcgctctgggaggcagatgctctgtgacttgcttatcaagccccaccagcgcatcaccaagtacccactgctgctccatgctgtgctcaagaggagccccgaggcacgagcccaagaggccctgaatgccatgattgaagccgtggagtcattcctgcgacacatcaatgggcaggtccgccagggcgaagagcaagagagcttggcggctgcagcacaacgcatcgggccctacgaggtgctggagccacccagtgatgaggtggagaagaacctgcgcccattctccaccctggacctgacgtcccccatgctgggggttgcatctgagcacaccagacagctgctgctggaggggcctgtgcgagtgaaggagggacgagaagggaagctggacgtgtacctgttcctcttctctgatgtgctccttgtgaccaagccccagcgcaaggcggacaaagccaaggtcatccgaccccctctcatgctggagaagctcgtgtgccaacccctgcgagaccccaacagcttcctgctgatccacctcactgaattccagtgtgtctccagcgccctccttgtgcactgtcccagtcctacagaccgtgcccagtggctggagaagacccagcaggcccaggccgccctacagaagctgaaggcagaggagtatgttcaacagaagagggagctcctgaccctctatcgggaccaggacagggagtcccccagcaccaggccctccacgccttccctggagggctctcagagcagcgcagaggggaggactcctgagttctcgaccattatcccccacctggtggtgacagaagacacagatgaagatgctccccttgtgccagatgatacctcagactctggctacggcactttgatcccaggcacccccacggggtcccgctccccactgagccgtctacgccaaagagcccttcggcgggaccctcgcctcaccttctccaccctggaactccgggacatccctctgcgtccccaccctcccgacccccaagctcctcaacgccgaagcgcccccgaactgccggaaggaatcctaaaaggaggcagtcttccccaggaagacccaccaacctggtctgaggaagaagatggggcctccgagcgagggaatgtggtggtggaaacactccacagggcccggcttcggggccagcttccctcctccccaacccatgctgactctgccggggaaagcccctgggagtcctcaggggaggaggaagaagaggggcctctgttcctgaaagctggccacacatccctgcgcccaatgcgggctgaggacatgctcagagagatccgggaggagctggccagccaaaggattgagggggccgaggagccccgggacagcaggccacggaagctgactcgggcccagctgcagaggatgcgggggccccacatcattcagctggacacccctctgtccgcatcagaggtatgaggaatgcagaggacctttggcatgcatctctcccagaggagatctctccccagtagtgctggtcaccctccggcatctgtgactctacctcaaggaccacatttcccaaaggaagcctggcccaggcaccctgcctcctgctctgtttggggatcaagaactgtaaatttatgtatcataggtgcacctgagccccacagaaagttgtgcataaaaatgactgccctggctgggcatggctgcctgtaatcccagcactttgggaggctgaggtgggaggatcccttgagcccaggagttccagaccagcctgggcaatatagggaaaccctgtctttacaaaaaaaaattttaaaaattaaaaaaaaaaaaaaaaaa

SEQ ID NO: 320 - DNA, 960 bp, Homo sapiens
gggcacgatgcggcaacccgccgttcggttggtgcgcctgggtcgggtgccgtacgccgagctactggggctgcaggaccgctggctgcggcggctgcaggccgagccaggcattgaggccccgtcggggactgaggcgggcgcgctcctgctctgcgagcccgcggggcccgtgtatacggccgggctgcgcggcggcctgacgcccgaggaaactgcgcggctacgggccttgggcgccgaggtgcgcgtcacaggccgcggtggcctggccaccttccacggcccgggccagctgctttgccacccggtactcgacctgcggcgtctcggcctgcgcttgcgcatgcacgtagcgtcgctggaggcgtgcgccgtgcgcctgtgcgagctccagggcctgcaggacgcccgcgcgcggcccccgccctacactggcgtctggctagacgatcgcaagatctgcgcgatcggagtccgctgtggaaggcacatcacatcccacggcctggctctcaactgctctaccgacctcacgtggtttgagcacatcgtgccctgtggactggttgggacaggcgtcacttccttgagtaaggagctccagaggcacgtcaccgtggaagaagtaatgccacctttccttgtggcctttaaggagatctacaagtgcacactgatctcagaggacagccccaactgaagagtactcataacagccaggatgctcctgccttgggaagcatgaagtctgacttgagtcacctactgaaacccagattttagacctggcctgtcattcactgatcatgaaactaaggacataccatgagctctgagccactattttcatatgtatcctgttttatttatatcttccccacctacctcagagatactagatgtgacaatactgtgaaaagcaacacatgctatataaaacattagcactgctattga

SEQ ID NO: 321 - DNA, 7918 bp, Homo sapiens
gcgcggcccgggccggaagtaagcgaattcccgggtgtgtgtctgtgtctgtctgtgtctcgcagcggcgcgcggccccggacaagcgctggggattcccgtttgaggcgtcactactgtcactgccatcaccccacggagccacttctagaggggagtagacccggcccttcgccgggcagagaagatgttgcccctgtccatcaaagacgatgaatacaaaccacccaagttcaatttgttcggcaagatctcgggctggtttaggtctatactgtccgacaagacttcccggaacctgtttttcttcctgtgcctgaacctctctttcgcttttgtggaactactctacggcatctggagcaactgcttaggcttgatttccgactcttttcacatgtttttcgatagcactgccattttggctggactggcagcttctgttatttcaaaatggagagataatgatgctttctcctatgggtatgttagagcggaagttctggctggctttgtcaatggcctatttttgatcttcactgctttttttattttctcagaaggagttgagagagcattagcccctccagatgtccaccatgagagactgcttcttgtttccattcttgggtttgtggtaaacctaataggaatatttgttttcaaacatggaggtcatggacattctcatggctctggccacggacacagtcattccctctttaatggtgctctagatcaggcacatggccatgtcgatcattgccatagccatgaagtgaaacatggtgctgcacatagccatgatcatgctcatggacatggacactttcattctcatgatggcccgtccttaaaagaaacaacaggacccagcagacagattttacaaggtgtatttttacatatcctagcagatacacttggaagtattggtgtaattgcttctgccatcatgatgcaaaattttggtctgatgatagcagatcctatctgttcaattcttatagccattcttatagttgtaagtgttattcctcttttaagagaatctgttggaatattaatgcagagaactcctcccctattagaaaatagtctgcctcagtgctatcagagggtacagcagttgcaaggagtttacagtttacaggaacagcacttctggactttatgttctgacgtttatgttgggaccttgaaattaatagtagcacctgatgctgatgctaggtggattttaagccaaacacataatatttttactcaggctggagtgagacagctctacgtacagattgactttgcagccatgtagtgaatggaaagaaattatgcaccttttatggaccaaatttttctgccagtaagaatttcagttgtgggcctccagtcttctggaatgtcttcactgcagctgctggaaatcactgctttcattcccacaaaaccagtattacttttttttaaaaaaagaaagaaattggaaatctgtgctatacgtaatgtcataattgttgacgttcttcagtataatcatgtttgttaaattgtttgtaccttgcaaacttatgaaccaaaccatattgggttttcaaagtgcctttgtatccaaaaatgtatttgccagcatagaaatgtaccatcaagagtcatgtatgttttatttttgtttttattttttattttttgagatggagtctcgctctgtagccaggctggagtgcagtggcataatctcagctcactgcaacctctgcttcccgggttcaagctattctcctgcctcagccttctgagtagctgcgactatgggcgtgtgccaccatgcccagctaatttttgcatttttagtagagatggggtttcaccatgttggccaggatggtcttgatctcttgacctcgtgatccgtccacctcagcctcccaaagtgctgggattacaggtgtgagccaccacgcccggctatgtttttttttttttttttttttttttttaacaatggatattctgtaaaatatcctgtacaaaacaagactattgccagtaatgtatacaaattgtctttttgtgtacttccagcataggtttggatatatgaacatttttcttttattgttttatcttcacagaaaataaaaggtgttaatttgctttttaaaacaaatttaattatcacattttaaattactttgtggactgtgttttcaaaactttgcaaattcatctgttacacagaaaattttgacttaaaacatctgctgaattccaaatttctgtaatagctactgtatctgtgataaactttcctatatctttccttgccatttctatggattttataatgaaagaaaaaggcattggagactgaaggcagaaatggttgtgacagtgctgtttggctttttcattcttcaaatgccaagtcatccactttgttttcctgtttaggctttgcacaaatacaattgctttcaggaatcctaaagcagcattttattgagtttgaattattaaaggtacagaggaaatgtggtgatgtagaacttttcctaacacaggtatctaggaagtaagtgctgagttgattttctaggttcttacgtatttgaaaaataaaattgcaattcgagataagtgcttgagcactctacttaagtattctctgtgttttatgaagagaaaatgatctgattttcccttatacttcattttacaatacatattcccttttaacttaaaaaaattgtaaatgtgggagaaaaaaccctgcaggatggaaacaattattaagaatgtagatcaataagtactttttagtgatgtggcagaaatccctgttgattctaagttttagagtgtcttttcccctatttctgacctacaactataaactactctctattaggagaactagaccactttcttcattcttttctaaactgctgcagattgccgtgaactctatcaatagtctcttttccgcaggcaaagtggcattttctaaacatgtttgcttactgccaggtggtttgaaatctatgatttactgcagtagtatgtgcttaaaacaactgttgaggtcttttaagcaggaaagttcaaaaggaagtgtcctgataatggtactggtttttctacaaatataagtagtcattagaagtttgcaaccaccaccaagtctgagagaactctgggatattctgtgggttttggcatattagatagagaaaatgacagatctagatgaagggagcttttggatgtgtgcctttaaaaactgattatgtataaatactgatatttcacatacggagatatttgaagacccaagtctgcctttcacagagccctccattccaagtttagtttttgtcaaaatatgaatcattttatttgactgtactatcagtacacaaatgcatgagtatgtttatacagtgttagactgatgtgaatttgcatttgttacattacattgccagcgcatatcatttagcaagttggcattaacatttatgctttaattaaatgccagtatacctatgtgtgcagcagtaaaaaattagtgagaaaaagcaactttttgtcactcttaggaaatattttgtcttattagtgttcttggcacatgtatattactaaagtagataattccaatgagaaatactaccagattattgttataaaattaatttacaatgtccctgatattgagctaactcttaaaaaaaccaaacaaaactcgtatctgagtgtaactttgccaatattttaaaagccaaaatattctctggacaacaaatttgtattgctcagggacagtttaccttgcctggtaaaccttcccaaacagaaatatagctatactatctttggttttgtttttttgttttttttgtttgtttgtattagatggaatttcactcttgtcgcccaggctggagtgtagtggcgcagtctcagctcactgcaacctccacctcccgggttcaagtgattctcctgtctcagctccctgagtaactggaattacaggtgcacgccaccacgcccggctaatttttgtgtttttagcagagacagggtttcaccacgttggccagggtggtcttggactcctgacctcaggtcatcctcctgcctcggcctcccaaagtgctgagactacaggtgtgagccaccgtgctcagccactagctttggttttttaaacatagattatattcctcaagatgaagggcttaacatatccacagcttcctcagtttgctaactccccatgcatctttgtgaaggacagtatctagtttatctgtaggtcagtgttccttgtgctgtcatttcccttatatctggaatttgtcagcattcctgaaaacctacacgtgtatatcagtaaccaaaatgctatgccttttttgcacctttgtacagcagccaaatcatgaactcaaaatgtatttgatcacagttctataatgtttttacctacctattatggaataatcagtttttacagagattattaatatggtagaaccctgttatgtaattccaaaacttaagaaccatatttacattgcttaacacagaattttacatctaagcaaggactggctttagaagcagtgtagttctacctctcattttacagatgagaaaaccgaagcccagaaaaactctcatttgctcaaagtcacagagaaaattagtggcaaagccaaaaagattcagatcttctgactcgaagttgagagttctttatactctattatgctgcctctccagtgtaatatttgcctttctgtaaatgggattaaatatgatttgtaaataaaggacatctgacctccttttttggtacattaaggcactttataaatggacttttattgtctcatttttcgtatataattatttccatcatattctttatggaagatgcaattaattttaacttttttactcttataaaaccagttcctgacattttaaaaaacaatatctgtaaaatggatccttttatgagtgaatttttctgctaattgcccaaggctaaatccaatttaaggattgcttagtttctttattttgtttatggtctctgaactggtatttttttataaaccaggctaattcacaggtcataccatttcattcttgtcgtgttggcttccagtcactggaaaagcttttgcattttaaagatttttagagccatgcaaaactgggcattaaatgttgcataaagcaaatcttttaagtaaggtaaaatgttgaagtcttaaccagaattcctacaactaattactaaaactgctatttctaactcttcatgaaagcattacctttggaaagttaaactttttttttcctttcatcaccgtctttgaaacaaattattttccaattcataagaactttggtaaaaaaaaaaataaaaggaaattatatgtttttctttggacattcattggaaggcttgttgaagacatgatcccccagaagccttagtgacccagatctcaaccagagactcaagatagcctcaaatacagtgaaagattatgtatccaaaaaaaaaaaaaaaaaaaaaagaaaaggagcagggaaggacagttctagttaaagccaaatggatgtgagtctgacaagggtgtctttgatttatatttcctaactgcaaattacacagaaagtgagaatggggaataacttttattaagtatttatgtgccaggcggttagtgtggccttcatgttattacatttaatcctcaaatttctacaaaggaataattttgcatgattttatgattgacggagcattttcaaatctcctctaattctcataacatctctgtgaggaaggaatttttatccttattttacagatgaggaagctgtttggagataatttaagtgacttgcctggggaatctagccagtagtagagtactgattaatcaggtgctgacatctgctctgctttgtgtatgtaattcagcagtgcttcaaagatccaagaagctgtagcagatctcaatacactctcctataaaattagtgaataatcaccatgacaaaattggtatggcggaacagtcattatacattatttagactcattccttcttccagtgcccttatgattatttcctacctttaccattgatcttaaactgtgcaggctaaaaagaggaaccagaactcccttaagcacttttaagactatttaaaaaataaagttttgttggcattgaagagtaagctgcttaagggactgaatgaaaagatagtaccctttgtggctgtatgaagagagaaactgaatttctatccaagagaccttaatttagtttattagggaattatcttccccaaaagtacaagtaattttgcactgcaggagaaggataagtagatttgatttacatcacattttatacacacctttcaaaaggaagaaatctgtttcataaatagtagtaatctatgcttaaacttaacatttaatgttgacttcttacaacagccttgaaaattatttgtaattttgatcatgatgttggaaagcttgtaataaagaatatctttctcttctgcatccttttatcctcaaacttagcatggattcacatgctgagtaaatgtttggttaactagtgaacattttagatagttgtgtcaaaaataagggttagggataggtaaaaccagtaatttactgttttttacagaagacatctcagcatttctttggcatttttgcacaaataaatgactatatattcaccttggccatttttttttttaagtagccctatgagctgctcattctttttcatatacagtggaagtatacagatgttatccattttacaaattgttggatcggaatttgacagaattgggactgtggaacctgggtcacttgaattttctatattttgtatggccaaatcaggaaccagacagtctccatagtctcctttgtttttatggaaaattgccatattcacatatttcatttatcctaatgtattgtcatccaaaatgaaagaggtctttcttgaaggtgctttaaagacatcactacatgtattcaattactgatttaaatattcccagaattattttttacctttctctttttcctctcaaacacaaaattttagtagtacctccctctatttcttcactgatttttcatctgttttcattgttatttccactatagaacttctactttatactagcggggaaaatttttttatttagaattttaatatttgaattttgtttatgtatcacatactgtgctacagttagcctcaatgaagattctattttgaactagacatcctgtcaatagtttgtcaagtaacttcattgcttcctttgatagcaattcagtgaaattttttcccaagtgatattttcccccaacttttgtgagtttgataaataggatgagtcttttatattggaaatactgtgaatggaaaattgccaaatcccttcttagtatattttaagcaccctacaacactttacctccctgcctttagtggtatttaaacatatggccaagttagtatttgggtttgattcctttggtgaagattaaggcatcaaaacatttcttaaaatgtttgagtacaaggctaagttataatgtcaactttcaaagactatgttgtgattcggtttgaatatgctgaagtgagcaattatgatttgcccaagtgcaatacaacaaatctataatgtatatttcacattttctacttgaacacattcatgtatatattttgttaaacttcatatgtatttaaaaagaatcatgaactgtatcaaaattctttcaataaaatttctatttaaaaatctcaaaaaaaaaaaaaaaaaa

SEQ ID NO: 322 - DNA, 8436 bp, Homo sapiens
attttgaccgctatttagaagagtgacctcataaatcttttagcaaagtagacacacatacctaccacatttcttaaaagtagattcgtattttgatttgagattgttgaaaagcatggtatgtttggagtgcacttagttatgtcccatctcataaagactgttgagctctctgcactgctgatgatgaagcattgcatgaacccagaaaacggggatgccaaagcacagggcttaggtgctgttccttgcgtcatcagcagaggtctgtccactttgtagaagggagagtcccgtattctcagagtaaaagttgtttctggaattgatctcgccaaaaaggacatctttggagccagtgatccgtatgtgaaactttcattgtacgtagcggatgagaatagagaacttgctttggtccagacaaaaacaattaaaaagacactgaacccaaaatggaatgaagaattttatttcagggtaaacccatctaatcacagactcctatttgaagtatttgacgaaaatagactgacacgagacgacttcctgggccaggtggacgtgccccttagtcaccttccgacagaagatccaaccatggagcgaccctatacatttaaggactttctcctcagaccaagaagtcataagtctcgagttaagggatttttgcgattgaaaatggcctatatgccaaaaaatggaggtcaagatgaagaaaacagtgaccagagggatgacatggagcatggatgggaagttgttgactcaaatgactcggcttctcagcaccaagaggaacttcctcctcctcctctgcctcccgggtgggaagaaaaagtggacaatttaggccgaacttactatgtcaaccacaacaaccggaccactcagtggcacagaccaagcctgatggacgtgtcctcggagtcggacaataacatcagacagatcaaccaggaggcagcacaccggcgcttccgctcccgcaggcacatcagcgaagacttggagcccgagccctcggagggcggggatgtccccgagccttgggagaccatttcagaggaagtgaatatcgctggagactctctcggtctggctctgcccccaccaccggcctccccaggatctcggaccagccctcaggagctgtcagaggaactaagcagaaggcttcagatcactccagactccaatggggaacagttcagctctttgattcaaagagaaccctcctcaaggttgaggtcatgcagtgtcaccgacgcagttgcagaacagggccatctaccaccgcccagtgccccagctgggagagcgcgttcatcaactgtcacgggtggtgaggaaccaacgccatcagtggcctatgtacataccacgccgggtctgccttcaggctgggaagaaagaaaagatgctaaggggcgcacatactatgtcaatcataacaatcgaaccacaacttggactcgacctatcatgcagcttgcagaagatggtgcgtccggatcagccacaaacagtaacaaccatctaatcgagcctcagatccgccggcctcgtagcctcagctcgccaacagtaactttatctgccccgctggagggtgccaaggactcacccgtacgtcgggctgtgaaagacaccctttccaacccacagtccccacagccatcaccttacaactcccccaaaccacaacacaaagtcacacagagcttcttgccacccggctgggaaatgaggatagcgccaaacggccggcccttcttcattgatcataacacaaagactacaacctgggaagatccacgtttgaaatttccagtacatatgcggtcaaagacatctttaaaccccaatgaccttggcccccttcctcctggctgggaagaaagaattcacttggatggccgaacgttttatattgatcataatagcaaaattactcagtgggaagacccaagactgcagaacccagctattactggtccggctgtcccttactccagagaatttaagcagaaatatgactacttcaggaagaaattaaagaaacctgctgatatccccaataggtttgaaatgaaacttcacagaaataacatatttgaagagtcctatcggagaattatgtccgtgaaaagaccagatgtcctaaaagctagactgtggattgagtttgaatcagagaaaggtcttgactatgggggtgtggccagagaatggttcttcttactgtccaaagagatgttcaacccctactacggcctctttgagtactctgccacggacaactacacccttcagatcaaccctaattcaggcctctgtaatgaggatcatttgtcctacttcacttttattggaagagttgctggtctggccgtatttcatgggaagctcttagatggtttcttcattagaccattttacaagatgatgttgggaaagcagataaccctgaatgacatggaatctgtggatagtgaatattacaactctttgaaatggatcctggagaatgaccctactgagctggacctcatgttctgcatagacgaagaaaactttggacagacatatcaagtggatttgaagcccaatgggtcagaaataatggtcacaaatgaaaacaaaagggaatatatcgacttagtcatccagtggagatttgtgaacagggtccagaagcagatgaacgccttcttggagggattcacagaactacttcctattgatttgattaaaatttttgatgaaaatgagctggagttgctcatgtgcggcctcggtgatgtggatgtgaatgactggagacagcattctatttacaagaacggctactgcccaaaccaccccgtcattcagtggttctggaaggctgtgctactcatggacgccgaaaagcgtatccggttactgcagtttgtcacagggacatcgcgagtacctatgaatggatttgccgaactttatggttccaatggtcctcagctgtttacaatagagcaatggggcagtcctgagaaactgcccagagctcacacatgctttaatcgccttgacttacctccatatgaaacctttgaagatttacgagagaaacttctcatggccgtggaaaatgctcaaggatttgaaggggtggattaagcaccctgtgcctcgggggtggttgttcttcaagcaagttctgcttgcacttttgcatttgcctaacagacttttgcagaggcgatggcagagagcagctgcaggcatggtccctggagccgagccttcaccacgcactcgtccaagttcggatgcgggaacctggtcccagcttgagttcctgcctttcccaccacaaattatcaactggttgatgtgtacactaattacatttcaggaggacttaatgctatttatgttgtgcctctgcaggcaaagcccttaataaatattttacatcctttctaatgacaatgaatggaattaatcactcaacaggtatagtattacgactcatgtttactttttaaaatgatttagaccgattttcagattttatttcgttatgattaaagatgtctcatgtacttggaaaagtgagcattttttttttttttgtatttcactttcataccaggcttaatgtcaatgacatttttatttttgaagtactctgacacctccaccctctactttattagaattggaaggcaaatttttgtccaaaaacctacagacaagtactttgagagaatttccaatataatattagacataatgataattttttccatactcagaatgaaaaactggatattacgtttttgttttggggtttttttgtacaaatttagctaatagctacaggctgagagaattgtaacatagcatgacaaattttgtgttgacttgaaaggaatcacaccattattccttagaagtaattacatgtgttctaacacatttgagacagggttggactcccatttctcatccgagaaattacttaacccttcctggcgctgtacagtcatcttttattctatttcctctttgctgtttgtagtagagacattttgaatgaaacttggcactgcttgattcaaaactgtggaaaccagatctgtttagtctcctgtttgtatgcgtttgctaatggtagctaaataaccagtttttgttgtaaatgcaccaattctgaaggcactttatgtactacatggaggtcatatctggttttgtttttatttttttatcatgaacattaaatgtgatgatgatttcttttccctgcacacatctttccggtgcaatatctatcaattgtgaatctggctgctggtgtataaaaacctggatgtaaagctgagcctacagacctgtcctcaccaactgttttgtgatttctactcaactacaaagatttatttaatgtactcttaatctaactgagttttgttaccaatgacctgttgcatgcttcaataccgtgtactgcctgagttgtgcctcttgtgtgctagattaaaagtgagacagagacttgacttgatcctctgagctcaagctattgagctggtagtggcagaggactgagggtacctgcacagtttgattcttttccacgtgtaagtctccattgcagaattgtcgtgctttgagaaaacacctgaggcagtgtgggagttgaacgaccctgctgtcctttttaacctgtgttgtcctagaccctgtcggggcagtcaggggacactagagatttgatctcatgcgagtcatcaataggacaaaaaagttgtggtttggggaggtctgtttgttacataaaaaggacctttcggtgtaagaaattgccgtttttaccctgccctggctggcatgtgagaagccatggaaggttgtggttgtaaatgagttgtctaaaggggtgcagaggcctgaggtttctaaaagaaggtagatttctacagagctgagtgttggttcctttttcttattggttgaaaattacctggtagtgatcagaaaacttagatgctatgtaactaaaaaaaaaaaaaaaaaaaaaaaaaaaaaaaaaaaaattcccgctcatgagttttgactattggtgagatgttttccgctacagttaacatgacaaatgtctcagtggcaaaaatcccctttttgtaagcccccatagtctagaggcagttttctttttaagaatcatgccagagcctgagtcgagcagtatgctttcttggtttttgagagtaattgtgtaattgtagagggagaaatccaattctaacctaagaactgggattcttctgtcatcttgtaaaccgtatattgaaaaaaacagaatgtcactaaatgcatattaagtcaagtattggaaagtataaaagaaaaatcattctgacaatttctaagccagaagcaaacaagaattactgaaatctaccccatgaatacttggaaggcagtaattgtgagtgacacctcagttcatcaaccccttaataatatcagcttaattttaatgacaactaaatatgctgaagtgaggatttagtattttttaaaaaagcaaaacaaggttcagtagtcctcagcaattctccaagtttctctctttgcctaaaatggtcatagatcttgatttctctgaatcgtgatgaccacacccagtcatcttcacagcataattgcaggtggcagtaaagagagtgtgctgggtaaggagcagttgctgggtcattccttgggccccgacctgcccggggagtagccctgggggagagagggcagtgttgcctatcccagaggtcccagcagtcacactgctctgcaggccgggctctctttatagccagagaaatcaccttaatgcagtctctttagttgtctgctgaagctgtagttattatgggccacttacatgaggctgagaagtacgtgccggagctcacacactgcctgttgcggttctcttaacatcagttatcacagctgcctgtgggtcccgggtatttccattcctgccccttgttggcccgaggaaggatgtggaaagagcacctggtgggatgaaggtccaacagcctgtgcctctccactgctggccctggagccggcagcagtgaggcattcattgtctgtgttgcggtgtattcccagcttcagtgctcttttcctttttgcctgaaatgtttatgcttctctgcagccagtcctctaacaaatctcaagaacaaaggtaagacacttggtttttgtttccaggacccttcagaaggtgacatcagatattccctaaattcagacaatgagggatacagagcgacttggcatgtattatttctcccatgtaaggacaaagggacagattattattgttatttctgagacagagtcttgctctgtagctcaggctggagtgcagtggctcaatctcagctcaccacaacctctgcctcctggcttcaagcgattcttctgcctcagcctccccgaatagttgggattacaggcacccaccaccacgcctggctaatttttgtatttttagtagagatggtttcaccatgctggccaggctggtcttgaactcctgacctcaggtgatcctcccgcctcagccttccaaagtgctgggattacaagcatgagccaccgcacccggcctcacagtgacagattctgagaaacagcatgcaaaacatttgaaccattttctacatctcccattgttgcatagagagtgtgcaccgctgctatcttgccagatccacactggtcctcccgaaagccaggttcatacacagcaactttttaattattctaacagttacccattaacagtcgactcctgtatttctgagagtcttgtactcacctctgaaatttaaaaacgtataaagagagcctgggttaatcagttctgcagcccctacgtgacactgtgctagttctccttcttctgtctcctccttaccctggccctgcacccctgtacttaagagggagaggtgggaggtgctgtctggtatcatttgctgcctcgccagtagagggtgccgctgtgcagggtaactgcccgcctgctcccttcctgacctcccctgaccccgaagatcactacctctgtcattcaggcattggggtacatcctgataagtcgtgtcagaactgccaatttcaggactgagatgtgtttttaaaaaacaaatccttataaactccactttgtactttagattttaaaactggggaaaaatgtgatattctttggaccacttttttaatttatataagccttaatgaacagtgtctatacatttgcatacacacacccccaccccagagtgttctcagtatgtcagagaaagtgccacagcattaggacgggagcttggagaacgttttctagaaaagggttagcttcctgttggcatgaaattttccaagcaaacctcattaaacatctgttgtttgttaaagatgttccactgaaagcaacgcatgtttcaaaggcacgtctttccgttcgttggttttctgtgtgtaaggagtagcattgctgttggcgcctaacctcgcgtgcactgcattctcaaccccgtaccagtgcatcatcagaagccttcctcgtgaccataactctgtgtctgcagatatgtgttcccgtgtaagccagttttccccttttactcagactgatttcacctagattgtcacggtttccttcatgttaactttgcgtgactttgttcttcctttactactctgtatgtaatatatatacatatatacgtacatatgctgtccaaatatatttgtatatatttgtatagcatttttacacctttattgagtaatctggtttcgaaaggaggtgagagtttagtcccttctgcagttttctccaagctgtgtcctgtgaatttcaacccttggagcctaagaaaaccctaggaagatgatgttaatttgctgtcatttcctaattcaggatctatcatcaaatgaaacatgaaaaaaacagtgacttttaaggtgaaaagagtttcaagcattccaaataaattatcaatgtttcataactttttattataaacccacctcctaataggaagccaagtactatttgatacagtggtaaaaaccaaactaccttgaatttttttaaggcaacttatgaataatgctcattttcacagtcagaatagctttaaaatatggttgaatttgatacacacaggaagttttcttgaagaacaatcctttcgcttttcttttttcttgagagatctaaagagaaactgtagattgttttcctgacagcaaaagactaatgtgacaaaatgaagtcattgtaaagaagcgatgcaacttgtcaaatatttaataaagaattatggaagctggaacattttctac

SEQ ID NO: 323 - DNA, 2260 bp, Homo sapiens
atggcggagagctccctctaccggcagcggctagaagtcatcgctgagaagcggcggctgcaggaggagatccgcgccgcgcgccgggaggtggaggaggagaaactccgcgtggagcgtctcaagaggaagtctctccgggaacgttggctaatggatggggcagctgcagtgccagagccatccgaagaccccacctcgaaggacccccagtcacccgagggccaggctcaggcccgaatccggaacctggaagacagtttgttcacactccagtcccagctgcaactgttgcaaagtgcttccacaggtgcccagcacaagccctcaggcaggcccagctggcgcagacagggtcaccgtcctctctcccagtccattgtcgaggcaggttctgtaggccagactgatctgaacaagagagcctccctgccggctggactagtgggcacgcctccagagtccccctctgagcccagggaggatgtcttggggtttctgccaggcccgaggcaggtccccggggcagcaggagactcctcagaagccaatggcccatgccccagccccatccccactccagagcaggggctaagtcagagggcagtgccatccgaagggcgggtgggtgaggccaaaggagggggcgtggtgagtgtggtgtgggaagggctgagggccacagaggactgtgccacaggggccacgggccccgagctggaggctaaggtggaggaagtggtgctggaagccatcggagacaggaagggagctggtagcctggagctcccggcctgggtgaaggaggacaggggcatcgtggaggtggtctgggagggggtgggtggcagtgatgcagaggccatgggggagataggcagggtccctgaggtcgtgcagactagctcgcctaggctccaggagagattagaggcagcagcttccatagaaggggaagatgtgccccagggcagccctgagggtgatgggcagggaggctctggaggagaggagggatccttcatttgggtggagagagtgaccctcagtgaagagtgggaggagctgctggtggaggggttggaagggcccgaggtggcagggagggagagaggagatgaaagcccgctgggggccgagggggccaagacgggaggaggcgaggagacctgggaggcagagaagagaaaagcggaagaatccatgggaataggaagtgaggaaaagccagggacagggagggatgaagcggagatgtcaccagtggtagagaggaaaggaggagagaagaagttggagctggagagcagaggaagtgcagaaaagctgggaacagagagggaaggaggtgaggaaccactgggcatagagagaaaagttgagggacatttgagggcagagaaggaaggagatgaggaaaagcgaggggcagaggaggaggaggtagaagaaccattgggagtagagaagaaaggaggtgaggaagagccagaggcaaccaaagaaccactggaggcagagagaaagggaggggaggagacactggaggcagagaaaaggggaggtgaggaatcattggagacagagaagacccaagggacggagggagatctgaatctagaacaagggtctagggaaggaagtgaatcccaggcagaggagatgaatgaggcagggcctccccttgaggctaacacggagacaaggccagagaaggaaggaccccagccccaggagaagccagtaggagccctggaggaggaaggagtgaagccccaaaccgctgctgagggccaaggccccttgggggatgccacacctcttctggcagagaccccagccccagagcagcccgccgaatgccagccactgcttcagggggaggggcccagcgccaaccccagtgcccaccctgtgcccacctacgcgcctgcccggcagcctgagccatctgcccccaccgagggtgaagaggcaagtggccctaagcaaaagacgtgccagtgttgtgcggtcatgtgaacccatgcccctccaccccatgtccagctcctctcacagctacctcggcctcttggcacccagaagagggtcccaggcacagacagggaccacaggactggccatggcacctgggagccagctagcctgcacgtccacctaaacctgggcttccagaccccttgcccactgcctgtaaccctggcctccttctgcgatgaagcctttatacttgaaaataaaatgtgaaagcactcaa

SEQ ID NO: 324 - DNA, 2230 bp, Homo sapiens
cgcggcgcgcggcggcggtgccccaagtgggtgcctcctcccggccccgcacggcccccctcccggcgcgggggaaggccggggcggggggcccgggggccggcgcggctccggcaccgtcggggcggctggggggcggccggggcggggcgatgcctggcggtggcagtggcggcggccccggccggggcccgtgaccatgggcatcgccgagtccacgccggatgagctgccgtcggacgcagaggagcagctgcgcagcggcgaccagcagctggagctgagcgggcggcggttgcggcggctgcccagcgcagtgtgcgcgctgagccgcctgcagaagctgtatgtgagcggcacggggctgcgcgagctgccggaggagatcgaggagctgcgcgagctgcgcatcctggcgctggacttcaacaagctcgagcgactgcctgacggcctgtgccgcctgccgcgcctcacgcgcctctatctgggcggcaaccggctgctggcgctgcccgccgacttcgcgcagttgcagagcctgcgctgcctctggatcgagggcaacttcttgcggcgcttcccgcggccgctgctgcgcctggtggcgctgcagtcgctccagatgggcgacaaccggctgcgcgcgctgccggccgagctgccgcgcatgacgggcttgcgcggcctctggctctacggcaaccgcttcgaggagttcccgcccgcgctgctgcgcatgggccgcctgcacatcctcgacctcgaccgcaaccgcctgggcggcttccccgacctgcacccgctgcgcgcgctgcgcgtcttctcctacgaccacaaccccgtcaccgggcccccgcgcgtcgcggacaccgtgttcctcgtgggcgagggcgccgtcgagcgcatggcggagcgcgacgagcccacgccccggcctccgccccggcgcccagcgcgggcctttgaggatgaggaggaggaagacctgctcataggcggcgctggttcccgggctctgggcgcccccgggggcagcttccgcgccctggaagccgctccaggactgggcacctgagcctatgttctggctgatgggcttcagccactctgagaggaggggctctaggaagctttggctggttaggcctgcgggactggtgggtccctacttaggtcaatggaacggctacttttggcgagttgccgggcacaggcagggctggggctcatcttcagacactcctaggtagtaagaggactgactataccctggctgatctgtgggcaattgtcagaccaagaagtctgggctgggtccagtccccgatggagccactgataacagaggcaccagcttcctcctggaaccagggtctctgagggccacagaattgtcacgtctccctgagtctggatgcagggcacccaacaccctccctctttctggggtttgggtctcctaggcccaccctttctaggacaggagccgctacctctgggatggactgcgtgcctgtgtggggcaggactgcccttgcgaggagggcctggcccaggagcaggggcttggagtggggctggtgcccgggacagaagtgggaaatagatgggggccccaacaccgaagctgccctcacccctccatcagggctgatcgtacatacctccctcctcggccccctgagattggtatggggcacagaaggcagggggtcacccccaccctattctgttctcttctcccagcctcccagcatgtgcctggaaccttgctgggaagagagagctccccctccactccccaccccatagcctgagccttccagctgtcaagtttgaaaagaagccaccgtgcctccagggcctcctgcaccgcagagaggggctctctgctctgggaggctgctcagcgcctctcccacggcctgcactctcctttcccttaaatgggcacagccagggtggctggcatgggactggcactctgtacctccactccgtcaccagggacagccccgagggggtgaggagaggggccttgctctgcaattcccagagccagatcttcctcatccaagcaataacgggacgagggagccagggccaaggacactcagggacactgttggggcagcggccccacatggtaatgttttctttagagagaagaaaaaacaactggctgtaaacgtaaattatatttcttggagaaagaaaaaaaaaaaaa

SEQ ID NO: 325 - DNA, 4632 bp, Homo sapiens
atggccaccactgccacgccggccacgaaccagggctggccagaggactttggcttccggctaggtggctctggcccctgcttcgtcctggaggtggccaaggggagcagcgcgcatgccggaggactgcggccaggagaccagatcctggaggtggaggggctggcggtgggcggtctgagccgcgagcgcctcgtgcgcctggcacggcgctgcccacgtgtgccgcccagtctgggcgtgctcccggctcccgacggtggccccggcccaggatccggccccgcggccccgaccacagtcttgcgggccccgcggtgcggccgcggcctagctctgggccgtgagctgcttcgcctggccggccgcaagcgcccggacgcggtgcaccgagagcgcaggcgcaaggcccaagagttcagccgcaaggtggatgaaatcttgggggaccagccaactgccaaggagcaggtgttcgctgcactgaagcagtttgcagctgagcagcgggtggatgatctggtgtggactctcaccctggcgctgccccgagaggcctgcgggccactcctggacaacctcaggatcttcatccccaagaagcaccgggcgcgcttcgacgaggtggtgtctcagggcctcctgggcaagctgtgccgcgcacgccgggcccagggcgcgcagcgactgcgccggagccgcagcgaggagcggccggagcgcctcctggtgtccacgcgcgccagcgccccgccgcgccgccccgatgagccgcccccgcgcagggcctccttgctggtgggcggcctcgccggccccgggggcgcgcgcaggactgtccgagtctacaaaggcaacaagagcttcggcttcacacttcgcggccacgggcctgtctggatcgagtctgtcctgcctgggagcccagctgacaatgctgccctcaagtcaggtgaccggatcctcttcctcaatggactggacatgaggaactgctcccacgacaaggtggtgtccatgctgcagggcagtggtgccatgcccacgctggtggtggaggaagggctcgtcccatttgccagtgactccgattctctggactcacccaacccgtcgtcggcgctcacctccctgcagtgggtggcggagatcctgccgtccagcatccgggtccaagggaggaccttcagccagcagctggagcacctactcacacctcctgagcgctatggggtctgccgggccctcgagagcttcttccagcacaggaacatcgacaccctcatcgttgacgtctaccctgtgctggacacccctgccaagcaggtcctgtggcagttcatctaccagctgctgacctatgaggagcaggagctctgtcaggagaaaatcgcatgcttcctgggctacacggccatgacagcagagccggagcctgagctggacctggagtccgagcccacgcctgagccccagccgcggagctccctgcgggcttcctccatgtgccgccgcagcctccggtcccagggcctggaggccggcctcagctgcggtcccagcgagtgccctgagatgcctcttcccctgatcccaggcgagcgccaggcaggcgacggcacgtccctccctgagacccccaaccccaagatgatgtcagccgtctatgcagagcttgagtctcgactgaacagcagcttcaaagggaagatggggaccgtgtccaaatcccgggcttcccctccaggccccagcccagcagtcaccacagggcccaggaccctgtccggcgtctcatggcccagcgagcgactcttgccctccccctgctaccacccgctgtgttcggggggtctggcctcccccagcagctctgagtcccacccctacgccagcctggacagcagcagggcaccctccccacagccaggccccgggcccatctgccccgacagccccccaagcccggaccccacccgcccgcccagccgcaggaagctcttcaccttctcccaccctgtgcgaagccgcgatactgaccgcttcctggacgtgctgagcgagcagctgggcccccgggtcaccatcgtggatgatttcctgaccccggagaacgactacgaggagatgagcttccatgatgaccagggcagcttcgtaaccaatgagcggagcagcgccagcgactgcatcagcagcagtgaagaaggcagctccctgacctactcctccatctctgaccacatccccccacccccgctcagccccccaccaccgccacccctgcctttccatgacgctaagcccagctcccgcagctctgatggttcccggggccctgctcaggcgctggccaagcccctcacccaactcagccacccagtccctccaccacccccaccgcccctgcccccacccgtgccctgtgcaccccccatgctgtcccggggcctgggccaccggcgcagtgagaccagccacatgagcgtcaagcgcttgcggtgggaacaggtggagaactcagaaggcaccatctggggtcagctcggggaagactctgactacgataagctgagtgacatggtgaaatacctcgacctggagctccacttcggcacccagaaacctgctaaaccggtgccggggccggagcccttccggaagaaggaggtggtggagatcctgtcccataagaaggcctacaacacctccatcctcttggcacacctgaagctgagccccgcggagctgcgccaggtgctgatgagcatggagccccggcgcctggagcccgcacatctcgcgcagctgctgctcttcgcgcccgacgccgacgaggagcagcgctaccaggccttccgcgaggcgcccggccgcctcagcgagccggaccagttcgtcctgcagatgctgtcagttcccgaatacaagacacgcctgcgcagcctccacttccaggccaccctccaggagaagacagaggagatccgaggcagccttgaatgcttgcgccaggcctccctggagctcaaaaacagtcggaagctcgccaagatcctggagtttgtgttggccatgggcaactatctcaacgatggacagcccaaaaccaacaagactacgggcttcaagatcaactttctgacagagctgaactccaccaagacagtggatgggaagtccaccttcctgcacatccttgccaaatcgctgagccagcacttccctgaactcctgggctttgctcaggacctgcccaccgtgcccctggctgccaaagtgaaccaacgggccctgaccagtgacctggctgacctccatggcactatcagcgagatacaggatgcctgccagagcatttccccctctagcgaggacaagtttgcaatggtcatgtcgtccttcctggagacggcccagccagcacttcgggcgctcgacgggctgcagcgcgaggccatggaggagctgggcaaggcgctggccttctttggggaggattccaaggccaccacctctgaggctttcttcggcatctttgcagagttcatgagcaaattcgagcgagcgctgagtgacctgcaggccggggagggcctgcgcagctccgggatggtttcacccctggcctggtgacagtggccacaccgcgtcctctgcggcctgagcagggagatggaggccgagagggcagcccagacactgccgaggtccggggccactgtgccccgggctctgagcacaccgccagcctctcctgcagctacctcagccgccgagctgtggtcgggccctcctctgccagcccttgttcctacccccaggcccagagccagatgctgtaggagcaggtgctgagtgtgcctgcacatggaggaccgtgctctgtcggcttcttgggcccacttcccacttcgctcccaggctgtcaggggggcctggagggtggattacaaagtggccacattcctgggacatgtggaccttttttctgatcctgctcctagtgggtccctgtgagggggccgacacccttgagcacgaccctgcaggcaggcgcgagacgcgagagggcagaaagccggatgtagaggggccctggggatgtgcacgcccagcctgggccttggaagctggcttcagggacacaggaagagagaagcctgggagagacgcagggaaggaaggactggagaaggaagaccccctatgtcagactgcggaattgaggtttcatgcagtggacaaacccaaacctgtgtagaggtggcccaattggaagtggggagcctgggagtggaataggtgtggtcaaggtagagcagacagaatggggaggtgttgaggcaggaggtgagcaggatctggtggccaactgccagacttctcacctggacggatggtgatgttccctggagcaagtcatgagaccggggcaggtgtgggggcagatgacacaatctgggatgtgtttgggacccaaatggtcattttacatgtgcctaggcatatagcaggagttacctggataccaggagcaggagcaggtggcgtggtgggcagggagggagggtgtgtgaactgtttcaccttttttaaaattctctgattgacagatccttggatcagaca

SEQ ID NO: 326 - DNA, 11733 bp, Homo sapiens
cgccgctgtgcccaccccctcgccggagagagtgctggtaactccttccccagagtctgattacctgctccgcgaggccgcggacacgtgcggagagccgactgacactcgcagccccctcgggaggcccgacgcgactgggcccctcaggtgcaatgattctggactgagacgcgcttgggcagaggctatgtaatcgtgtctgtgttgaggacttcgcttcgaggagggaagaggagggatcggctcgctcctccggcggcggcggcggcggcgactctgcaggcggagtttcgcggcggcggcaccagggttacgccagccccgcggggaggtctctccatccagcttctgcagcggcgaaagccccagcgcccgagcgcctgagccggcggggagcaagtaaagctagaccgatctccggggagccccggagtaggcgagcggcggccgccagctagttgagcgcaccccccgcccgccccagcggcgccgcggcgggcggcgtccaggcggcatggagaaggacggcctgtgccgcgctgaccagcagtacgaatgcgtggcggagatcggggagggcgcctatgggaaggtgttcaaggcccgcgacttgaagaacggaggccgtttcgtggcgttgaagcgcgtgcgggtgcagaccggcgaggagggcatgccgctctccaccatccgcgaggtggcggtgctgaggcacctggagaccttcgagcaccccaacgtggtcaggttgtttgatgtgtgcacagtgtcacgaacagacagagaaaccaaactaactttagtgtttgaacatgtcgatcaagacttgaccacttacttggataaagttccagagcctggagtgcccactgaaaccataaaggatatgatgtttcagcttctccgaggtctggactttcttcattcacaccgagtagtgcatcgcgatctaaaaccacagaacattctggtgaccagcagcggacaaataaaactcgctgacttcggccttgcccgcatctatagtttccagatggctctaacctcagtggtcgtcacgctgtggtacagagcacccgaagtcttgctccagtccagctacgccacccccgtggatctctggagtgttggctgcatatttgcagaaatgtttcgtagaaagcctctttttcgtggaagttcagatgttgatcaactaggaaaaatcttggacgtgattggactcccaggagaagaagactggcctagagatgttgcccttcccaggcaggcttttcattcaaaatctgcccaaccaattgagaagtttgtaacagatatcgatgaactaggcaaagacctacttctgaagtgtttgacatttaacccagccaaaagaatatctgcctacagtgccctgtctcacccatacttccaggacctggaaaggtgcaaagaaaacctggattcccacctgccgcccagccagaacacctcggagctgaatacagcctgaggcctcagcagccgccttaagctgatcctgcggagaacacccttggtggcttatgggtccccctcagcaagccctacagagctgtggaggattgctatctggaggccttccagctgctgtcttctggacaggctctgcttctccaaggaaaccgcctagtttactgttttgaaatcaatgcaagagtgattgcagctttatgttcatttgtttgtttgtttgtctgtttgtttcaagaacctggaaaaattccagaagaagagaagctgctgaccaattgtgctgccatttgatttttctaaccttgaatgctgccagtgtggagtgggtaatccaggcacagctgagttatgatgtaatctctctgcagctgccgggcctgatttggtacttttgagtgtgtgtgtgcatgtgtgtgtgtgtgtgtgtgtgtgtgtgtgtgtatgtgagagattctgtgatcttttaaagtgttactttttgtaaacgacaagaataattcaattttaaagactcaaggtggtcagtaaataacaggcatttgttcactgaaggtgattcaccaaaatagtcttctcaaattagaaagttaaccccatgtcctcagcatttcttttctggccaaaagcagtaaatttgctagcagtaaaagatgaagttttatacacacagcaaaaaggagaaaaaattctagtatattttaagagatgtgcatgcattctatttagtcttcagaatgctgaatttacttgttgtaagtctattttaaccttctgtatgacatcatgctttatcatttcttttggaaaatagcctgtaagctttttattacttgctataggtttagggagtgtacctcagatagattttaaaaaaaagaatagaaagcctttatttcctggtttgaaattcctttcttccctttttttgttgttgttattgttgtttgttgttgttattttgtttttgtttttaggaatttgtcagaaactctttcctgttttggtttggagagtagttctctctaactagagacaggagtggccttgaaattttcctcatctattacactgtactttctgccacacactgccttgttggcaaagtatccatcttgtctatctcccggcacttctgaaatatattgctaccattgtataactaataacagattgcttaagctgttcccatgcaccacctgtttgcttgctttcaatgaacctttcataaattcgcagtctcagcttatggtttatggcctcgattctgcaaacctaacagggtcacatatgttctctaatgcagtccttctacctggtgtttacttttgttacctaaataatgagtaggatcttgttttgttttatcaccagcacacagattgctataaactgttactttgtgaattacatttttatagaagatattttcagtgtctttacctgagggtatgtctttagctatgttttagggccatacatttactctatcaaatgatcttttctccatcccccaggctgtgcttatttctagtgccttgtgctcactcctgctctctacagagccagcctggcctgggcattgtaaacagcttttcctttttctcttactgttttctctacagtcctttatatttcataccatctctgccttataagtggtttagtgctcagttggctctagtaaccagaggacacagaaagtatcttttggaaagtttagccacctgtgctttctgactcagagtgcatgcaacagttagatcatgcaacagttagattatgtttagggttaggattttcaaagaatggaggttgctgcactcagaaaataattcagatcatgtttatgcattattaagttgtactgaattctttgcagcttaatgtgatatatgactatcttgaacaagagaaaaaactaggagatgtttctcctgaagagcttttggggttgggaactattcttttttaattgctgtactacttaacattgttctaattcagtagcttgaggaacaggaacattgttttctagagcaagataataaaggagatgggccatacaaatgttttctactttcgttgtgacaacattgattaggtgttgtcagtactataaatgcttgagatataatgaatccacagcattcaaggtcaggtctactcaaagtctcacatggaaaagtgagttctgcctttcctttgatcgagggtcaaaatacaaagacatttttgctagggcctacaaattgaatttaaaaactcactgcactgattcatctgagctttttggttagtattcatggctagagtgaacatagctttagtttttgctgttgtaaaagtgttttcataagttcactcaagaaaaatgcagctgttctgaactggaatttttcagcattctttagaattttaaatgagtagagagctcaacttttattcctagcatctgcttttgactcatttctaggcagtgcttatgaagaaaaattaaagcacaaacattctggcattcaatcgttggcagattatcttctgatgacacagaatgaaagggcatctcagcctctctgaactttgtaaaaatctgtccccagttcttccatcggtgtagttgttgcatttgagtgaatactctcttgatttatgtattttatgtccagattcgccatttctgaaatccagatccaacacaagcagtcttgccgttagggcattttgaagcagatagtagagtaagaacttagtgactacagcttattcttctgtaacatatggtttcaaacatctttgccaaaagctaagcagtggtgaactgaaaagggcatattgccccaaggttacactgaagcagctcatagcaagttaaaatattgtgacagatttgaaatcatgtttgaatttcatagtaggaccagtacaagaatgtccctgctagtttctgtttgatgtttggttctggcggctcaggcattttgggaactgttgcacagggtggagtcaaaacaacctacatataaaaagagaaaaagagaaacttgtccatttagctttcataagaaatcccatggcaaagggtaataaaaaggacctaatcttaaaaatacaatttctaagcacttgtaagaacccagtgggttggagcctcccactttgtccctcctttgaagtggatgggaactcaaggtgcaaagaacctgttttggaagaaagcttggggccatttcagccccctgtattctcatgattttctctcaggaagcacacactgtgaatggcagacttttcatttagccccaggtgacttactaaaaatagttgaaaattattcacctaagaatagaatctcagcattgtgttaaataaaaatgaaagctttagaaggcatgagatgttcctatcttaaataaagcatgtttcttttctatagagaaatgtatagtttgactctccagaatgtactatccatcttgatgagaaaactcttaaatagtaccaaacattttgaactttaaattatgtatttaaagtgagtgtttaagaaactgtagctgcttcttttacaagtggtgcctattaaagtcagtaatggccattattgttccattgtggaaattaaattatgtaagcttcctaatatcataaacatattaaaattcttctaaaatattgcttttcttttaagtgacaatttgactattcttatgataagcacatgagagtgtcttacattttccaaaagcaggctttaattgcatagttgagtctaggaaaaaataatgttaaaagtgaatatgccaccataattacttaattatgttagtatagaaactacagaatatttaccctggaaagaaaatattggaatgttattataaactcttagatatttatataattcaaaagaatgcatgtttcacattgtgacagataaagatgtatgatttctaaggctttaaaaattattcataaaacagtgggcaatagataaaggaaattctggagaaaatgaaggtatttaaagggtagtttcaaagctatatatattttgaaggatatattctttatgaacaaatatattgtaaaaatttatactaaggtcatctggtaactgtgggattaatatggtcgaaaacaaatgttatggagaagctgtcccaagcaaactaaattacctgtacttttttcccatttcaagggaagaggcaaccacatgaagcaatacttcttacacatgcctaagaacgttcattgaaaaaataaatttttaaaaggcatgtgtttcctatgccaccaatacttttgaaaaattgtgaaccttacccaaaaccatttatcatgtccattaagtatatttgggtatataattaggaagatatttacatgttccatctccacagtggaaaaacttattgaggctaccaaagtgtgccaagaaatgtaagtccttagagtaattagaaatgctgttttcctcaaaagcatgagaaactagcattttcatttcttatttactccctttctatatcaatgcaattcacaacccaattttaatacatccctatatctcaagcatttctatcttgtactttttcagaaaataaaccaaaaataatcctttggtctctctatcttctgacctttgtaagcaacagaaatgtaaaaacagaaggggtccaatttttacacgtttttttctcaagtagcctttctggggatttttattttcttaatgaagtgccaatcagcttttcaaaatgttttctatttctcagcatttccaggaagtgataacgtttagctaaatgagtagaagtggacttccttcaacatattgttaccttgtctagccttaggaagaaaacaagagccacctgaaaataaatacaggctcttttcgagcatctgctgaaatactgttacagcaatttgaagttgatgtggtaggaaaggaaggtgacttttcttgcaaaagtctttctaaacattcacactgtcctaagagatgagctttcttgttttattccggtatattccacaaggtggcacttttagagaaaaacaaatctgatgaagactaaagaggtacttctaaaagagatttcattctaactttatttttctgcgcatatttaactctttcctagcacttgttttttgggatgattaatagtctctataatgttctgtaacttcaatattttacttgttacctaggttctgaacaattgtctgcaaataaattgttcttaaggatggataatacacccattttgatcatttaagtaaagaaagcctagtcattcattcagtcaagaaaaaatttttgaagtacccagttaccttacttttctagattaaaacaggcttagttactaaaaaggcagtcctcatctgtgaacaggatagtttcgttagaagtataaaactcctttagtggccccagttaaaacacacataccctctctgctgctttcaaattccctagcatggtggcctttcaacattgattaaattttaaaatcctaatttaaagatcaggtgagcaaaatgagtagcacatcagtaattcagtagacaaaacttttgtctgaaaaattgctgtattgaaacagagccctaaaataccaaaagaccaggtaattttaacatttgtggaatcacaaatgtaaattcataagaagctctaattaaaaaaaaaaagtctgaagtatatgagcataacaacttaggagtgtgtctacatacttaacttttgaagttttttggcaactttatatactttttttaaatttacaagtctacttaaagacttcttataccccaaatgattaagttaattttagaggtcacctttctcacagcagtgtcacttgaaatttagtagggaaggatattgcagtatttttcagtttccttagcacagcaccacagaaagcagcttattccttttgagtggcagacactcgacggtgcctgcccaactttcctcctgagtggcaagcagatgagtctcagtaattcatactgaaccaaaatgccacatacactaggggcagtcagaaactggctgagaaatcccccgcctcattcgcccctctgctcccaggaactagagtccagttaaagcccctatgcgaaaggccgaattccaccccagggtttgttataacagtggccagtctgaaccccatttgctcgtgctcaaaacttgattcccacttgaaagccttccgggcgcgctgcctcgttgccccgcccctttggcaggagagaggcagtgggcgaggccgggctggggccccgcctcccactcacctgccggtgcctgaaattatgtgcggccccgcgggctgctttccgaggtcagagtgccctgctgctgtctcagaggcatctgttctgcaaatcttaggaagaaaaatgtccctagtagcaaacgggtgtcttctgtgcataaataagtacaacacaattctccgaaagttcgggtaaaaagagatgcggtagcagctgccctgtgtgaagctgtctaccccgcatctctcaggcgctaagctcagtttttgtttttgtttttgtttttttaaagaaaagatgtataattgcaggaatttttttttatttttttattttccatcattctatatatgtgatggtgaaagatatgcctggaaaagttttgttttgaaaagtttattttctgcttcgtcttcagttggcaaaagctctcaattctttagcttccagtttcttttctctctttttctttgttaggtaattaaaggtatgtaaacaaattatctcatgtagcaggggattttcatgttgagaggaatcttccgtgtgagttgtttggtcacacaaataaccctttctcaattttaggagtttggattgtcaaatgtaggtttttctcaaagggggcatataactacatattgactgccaagaactatgactgtagcactaatcagcacacatagagccacacaattatttaatttctaactctctgtggtccctagaaaaattccgttgatgtgcttaggttaaagttctgaagatacccgttgtacccttacttgaaagtttctaatcttaagttttatgaaatgcaataatatgtatcagctagcaatatttctgtgatcaccaacaactctcagtttgatcttaaagtctgaataataaaacaaatcccagcagtaatacatttcttaaacctcacagtgcatgatatatcttttcattctgatcctgtgtttgcaaaaatatacacatgtatatcatagttcctcactttttattcatttgttttcctattacctgtagtaaatatattagttagtacatggaatttatagcatcagctacccccaggaacagcacctgacaggcgggggattttttttcaagttgttctacatttgcataaattatttctattattattcatgtatgttatttatttctgaatcacactagtcctgtgaaagtacaactgaaggcagaaagtgttaggattttgcatctaatgttcattatcatggtattgatggacctaagaaaataaaaattagactaagcccccaaataagctgcatgcatttgtaacatgattagtagatttgaatatatagatgtagtattttgggtatctaggtgttttatcattatgtaaaggaattaaagtaaaggactttgtagttgtttttattaaatatgcatatagtagagtgcaaaaatatagcaaaaataaaaactaaaggtagaaaagcattttagatatgccttaatttagaaactgtgccaggtggccctcggaatagatgccaggcagagaccagtgcctgggtggtgcctcctcttgtctgccctcatgaagaagcttccctcacgtgatgtagtgccctcgtaggtgtcatgtggagtagtgggaacaggcagtactgttgagaggagagcagtgtgagagtttttctgtagaagcagaactgtcagcttgtgccttgaggcttccagaacgtgtcagatggagaagtccaagtttccatgcttcaggcaacttagctgtgtacagaagcaatccagtgtggtaataaaaagcaaggattgcctgtataatttattataaaataaaagggattttaacaaccaacaattcccaacacctcaaaagcttgttgcattttttggtatttgaggtttttatctgaaggttaaagggcaagtgtttggtatagaagagcagtatgtgttaagaaaagaaaaatattggttcacgtagagtgcaaattagaactagaaagttttatacgattatcattttgagatgtgttaaagtaggttttcactgtaaaatgtattagtgtttctgcattgccatagggcctggttaaaactttctcttaggtttcaggaagactgtcacatacagtaagcttttttccttctgacttataatagaaaatgttttgaaagtaaaaaaaaaaaatctaatttggaaatttgacttgttagtttctgtgtttgaaatcatggttctagaaatgtagaaattgtgtatatcagatactcatctaggctgtgtgaaccagcccaagatgaccaacatccccacacctctacatctctgtcccctgtatctcttcctttctaccactaaagtgttccctgctaccatcctggcttgtccacatggtgctctccatcttcctccacatcatggaccacaggtgtgcctgtctaggcctggccaccactcccaacttgacctagccacattcatctagagatggttcctgatgctgggcacagactgtgctcatggcacccattagaaatgcctctagcatctttgtatgcatcttgatttttaaaccaagtcattgtacagagcattcagttttggctgtggtaccaagagaaaaactaatcaagaatataaaccacattccaggctgctgttttctctccatctacaggccacacttttactgtatttcttcatacttgaaattcattctgctattttcatatcagggtacagacttataagggtgcatgttccttaaaggtgcataattattcttattccgtttgcttatattgctacagaatgctctgttttggtgctttgagttctgcagacccaagaagcagtgtggaaattcactgcctgggacacagtcttataagaatgttggcaggtgactttgtatcagatgttgcttctcttttctctgtacacagattgagagttaccacagtggcctgtcgggtccaccctgtgggtgcagcacagctctctgaaagcaagaaccttcctacctattctaacgtttttgccctctaagaaaaatggcctcaggtatggtatagacatagcaagaggggaagggctgtctcactctagcaaccatccctccattacacacagaaagccctcttgaagcaaaagaagaagaaagaaagaaagcttatctctaaggctactgtcttcagaatgctctgagctgaatgctcttgctcctttcccaagaggcagatgaaaatatagccagtttatctatacccttcctatctgaggaggagaatagaaaagtagggtaaatatgtaacgtaaaatatgtcattcaaggaccaccaaaactttaagtaccctatcattaaaaatctggttttaaaagtagctcaagtaagggatgctttgtgacccagggtttctgaagtcagatagccattcttacctgccccttactctgacttattgggaaagggagaactgcagtggtgtttctgttgcagtggcaaaggtaacatgtcagaaaattcagagggttgcataccaataatcctttggaaactggatgtcttactgggtgctagaatgaaaatgtaggtatttattgtcagatgatgaagttcattgtttttttcaaaattggtgttgaaatatcactgtccaatgtgttcacttatgtgaaagctaaattgaatgaggcaaaaagagcaaatagtttgtatatttgtaataccttttgtatttcttacaataaaaatattggtagcaaataaaaataataaaaacaataactttaaactgctttctggagatgaattactctcctggctattttcttttttactttaatgtaaaatgagtataactgtagtgagtaaaattcattaaattccaagttttagcagaaaaaaaaaaaaaaaaaa

SEQ ID NO: 327 - DNA, 5253 bp, Homo sapiens
acgcgctggcgggaccctcagggctttaccagcaactaccccagtgccggggagggttctgctgcttcgaaagctgctctacccttctccaaaagaagagccaagagaaggtccttttctacaaatatcagagccatggctcaggagtcagtgatgttcagtgatgtgtccgtagacttctctcaggaggagtgggaatgcctgaatgatgatcagagagatttatacagagatgtgatgttggagaattacagcaacctggtttcaatggcagggcattctatttctaaaccaaatgtgatctcctacttggagcaagggaaggagccctggttggctgacagagagctaacaagaggccagtggccagtcctggaatcaagatgtgagaccaagaaattatttctgaagaaagaaatttatgaaatagaatcaacccagtgggaaataatggaaaaactcacaagacgtgattttcagtgctccagtttcagagatgattgggaatgtaatcggcagtttaagaaagaactcggctctcaggggggacatttcaatcaattggtattcactcatgaagatctgcccactttgagtcaccatccatccttcacattacagcaaatcattaacagtaaaaagaaattctgtgcatctaaagaatataggaaaacctttagacatggctcacagtttgctacacatgagataattcataccattgagaagccttatgaatgtaaggaatgtggaaagtcctttagacatccctcaagactcactcatcatcagaaaattcatactggcaagaaaccctttgaatgtaaggaatgtggaaaaacctttatttgtggctcagaccttactcgacatcacagaattcacactggtgagaaaccctatgaatgtaaggaatgtgggaaagcctttagtagtggttcaaacttcactcgacatcagagaattcacacaggtgagaagccttatgaatgcaaagaatgcgggaaggcctttagtagtggctcaaactttactcaacatcagagaattcatactggggaaaaaccctatgaatgtaaggaatgtggcaatgcctttagtcagagctcacaacttattaaacatcaaagaatccatacaggtgagaaaccttacgaatgtaaggaatgtgaaaaggcttttcgttctggctcagaccttactagacatcagagaattcatactggggagaaaccctatgaatgtaagatatgtgggaaggcttattctcagagttcacagcttattagtcatcatagaattcatactagtgagaaaccctatgaatatagggaatgtggaaagaactttaattatgacccacaacttattcagcatcaaaatttgtactggtgatgaaacagaatatatgaaatgtgtagggaggcttttaattatggctcaaaacagaatttatcttgttaataattcctctagatagaataatgtagaaacattttatttgtggactacagcttattcagcctgggaaaaataatgttggagaaatactctatgaatagaatatactttggaagcccttaactaaacgcttacttctcttgacatcagataattcagtctagcaatatgatagataattcagtctgtcatactgaaaatgacagcacttttaacacctttctaaccttcttaacgtcagagaatttttgtagaaatgtagtcctgtgattgtcattttttcccctaatttctctaattgttacattcttagtattttaatccatattaaatttatatggctataaatttcatctgtttacatcctgatttgtatactattttaaaaatacctttagtacctgggagaagtgacctctttatttttgaagatggcttattctttttgttctttataacattaaggctttcttattgtaaaaatgttcatgaacgacattttactcaatagagattcttcattatcttcatggtgttttgttgtgttactgtaatatcacttatgaaatcctattggtggatatcgtagtctcctctagatattttgccataatacatgccaaaatacaagtccctgctggacattctccctaagcacatctttgtatcatatcttttaattgcagaagtaatgtgtgaatatattttccttataaaagatgcaaacattacaaaaaggcaaatgtaccctttgaccatatcccaaaggatagtctttatcagttcattatttattgctgatcatttttctgttcatatatacatgcgtgtctcagtaaaaattataaaatgggggataattataatacctacctcataatgctttgtgaggattaaatgaattaagatcgataaagtgcttagaattgtgcctgacatgataaatacatactcactgaatgttagtcatcgttattatattcatcatcatcagtattattatttgtagaaaggctttttaacttctgcagaacttagtcaccattaggcagggtgtttgactgaagaaagaccctttgaaggtaacaagttaagaaaatttcccatcatcatgtacttactattgaacatgaaataatcctaggtgttgggggggaaagtactgtgaataatgtgtgtgaaggactttattccgactaatactctttttgtcgcattatatacccagtaaaaaagaaaagagaacataagcaaaatattggtgcactaatgaggaaaaaaagtatgaaaagagaaacagcatcatatttaaaaaatggacagagatagaaacatagttacagatttaaaaggttctgttgaatattatgcttttttctaatatgtttgaaaatttaaacaaaatggtttttaaggaaaatatacatcaatattgactccaagaaaattaggactcttcaaagactctcataaacacagagaacagggaaaaattagcatgtgatcagttaactattactaatgaagcaccaaatccagtttctttctaaggaaaactttatcaaatgttcaaggaactatttcagttatatagaagtacacatcttggctcacgcctgtaatcccagcactttgggaggctgagatggaaggatcatttgaggccaggagcttgagaccagcctggccaacatgttgaaaccccatttttactcaaaaatacaaaacttagccaggcatggtggcacatgcctgtaatcccagctactggggaggctgaggcaggagaatcacttgaatgcaggaggtggaggttgcagtgagccaagatcacgccatggcacttcagcctgagcgacagaatgagactattaaaaaaaaaaaaaaaaagtccacagtgtagctttgtttggggttaagttagtgttttgaaatgggccttccctgtgctcaaaacatgctcagcaagcagctccccacgctggacagatcgcatatgtggaaggatgaagtttatgtctgtagaactgttattttatgccccacttccttttttcttagatcctgtgtagacgggtctctctgaacattgtgttactttactttactggcataaggaagtaaaatatttcataataaatttgagaaaagtagagtgagcaaaaatacctgcaaatgagagaattactaaaaatggactgttgtaatgttttgcgttatcaaaatgaaaactgccaaatgagattttgtttactttcttttcttgtgtgcttatgtcttttataaagttcttcatctaaaattatagagatagtgcatttgcacccaaattaatgaaacaataccattaaagagaaagaaaaggggctgggcacagtggcttacgcctgtaatcccagtgctttgggaggccaaggcagggggcagcctggccaatatagtgaaaccccatctctactaaaaatacaaaaattagctgggcgtggtggcatgtgcctgtagtcccagctgctcggaaggctgaggcaggagaatcgcttgaacccgggaggcggaggttgcagtgagctgagatcctgactgcactccagcctgcatgacagagtctcaaaaaatctgtctcaaaaaaaaaaaaaaaaaagaaagaaaaaatgattatctttgcccttctccgttcctcattccctcccctctgtcaattttcttctgaataatatttaaaggttgtgtatattacccatatatttcttcatgctaaaacattaacacacaattattttattatgtttttacagaaaaatggataactatacatttccctgaaatttgcttttttacattcaactgtacattttggattttccttcaatagatgatgatctaacagtctttctgatggttacagtatgttccacagtgttatttaccaatgccttttcaaccactttcccaattgtgatattatggattgtttgcgcttttttgccatctaaaagtaatgctgcaacaaacactttgtattcttgtctgttttatttctataaaataagcttcccaagtcatttccagtgtttttgctttgttttgttttgagacagagtttcactcttgtttcccaggctggagtgcaatggcgcaatcttggcttactgcaatctccgcctcccgggttcaagagattctcctgcctcagcctcccaagtagctggggttacaggtatatgccactacgcctggaaaattttgtatttttagtagagacggcatttttccatgttggtcaggctggtctcgaactcctgacctcaggtgatccaccctcctcggcctcccaaagtgctggcattataggcatgagccaccgcacccggcgtcatttccagtgttttctatgtttcctaggaaggttttgcttctggaagatttcagagggcaagagaataaaggagtggagtgcagtttttcatatatgtgattctgtgagtgtgtatacacagagatttaatattttaatacatcaggaattgattatacgatctaatgcaggatgtcagacttgtttctatccaggaataaaaccagttatgccagaagtaactattattcacctttctcctactgaattaaaatactatcagttgtatattaaatgctcacatctatttctgttctccatattctagcaatccttgacacttttcaatagcttttattacttggaaataaagatgtatgtatatattattaatatatagtttattatttggaaataaagatgtttcttcatgagaa

SEQ ID NO: 328 - DNA, 11492 bp, Homo sapiens
agcggcggccacgtagcgctgcggcggcagcggcagcggccgaggccgggtctgaggagcggccctgaggacagacgttgggcagggggggaggggctggcccagccggcggttgtgactcgagcgccgcggctgcaggcccccgccgcagggatggaccgccgaggcggcggccggggcggcggaggcggaggcggccggcccggataagatgctcccaagtcccttgcagctctcttcagaagaaaaatcactagtgctctgctcttgccataataccaaacctttttgactcatgctttggtgctgcaacactggaagaattgcacacagtttccaggaatatctttttttcatttgagtgattctttgtggatgagaaaagatttgagtcttaataattaccttgttttaaagctatttctttatagtctgaactgtttaataaattgggccacttaccaatgagccacacagccagttcttgtcaggagctggttgaaaactgtgctgtgcatgtagcaggaatggcacaagaagatagccgtcgtggtcaagtgccatcttccttttatcatggtgccaaccaagaacttgacctgtccaccaaagtgtacaaaagggaatcaggaagtccttattctgtgttagtggacaccaagatgagcaaaccgcatctccatgaaacagaagaacagccatatttcagggagacaagagcagtgtctgacgtgcatgctgttaaggaagaccgggagaattctgatgacacagaggaggaagaggaagaagtctcttacaaaagggagcagatcatagtggaggtaaaccttaataatcaaacattaaatgtatctaaaggggaaaagggtgtctcttctcagtccaaagagactcctgttcttaagacaagcagtgaggaggaagaggaagagagtgaggaagaggccacagatgacagcaatgactatggagagaatgaaaagcagaagaaaaaggagaagatagtagagaaagtcagcgttacacaaaggagaaccaggagagctgcctctgttgccgcagctaccacttcccctactcccagaactacaagaggtcgtaggaagagtgtagagccacctaagcgtaagaagcgggccacaaaggagcccaaagcaccagtccagaaagctaagtgtgaagagaaagagactctgacctgtgagaagtgccccagggtatttaacactcgctggtacctggagaagcacatgaacgttactcataggcgcatgcagatttgtgataaatgtggcaagaagtttgtcctggaaagtgagctgtcccttcaccagcaaacagactgtgaaaaaaacattcagtgtgtttcctgtaacaaatcgttcaagaaactctggtcccttcatgaacatatcaagatcgtccatggatatgcagaaaagaaattttcctgtgaaatttgtgagaagaaattctataccatggctcatgtgcggaaacacatggttgcacacacaaaagacatgccatttacatgcgaaacctgtggaaaatcattcaaacgcagtatgtcactcaaggtgcactccttgcagcattctggagagaagccctttagatgcgagaactgtgacgaaaggtttcagtacaagtaccagctacgctcccacatgagcattcatattgggcacaaacagttcatgtgccagtggtgtggcaaggatttcaacatgaagcagtacttcgacgaacacatgaaaacacacactggagagaaaccctttatctgtgaaatctgtggcaaaagcttcaccagccgccccaacatgaagagacaccgcagaactcacacaggcgagaagccctatccatgtgatgtgtgtggccagcggttccgcttctcgaacatgcttaaggcccacaaggagaagtgctttcgggtgaccagccccgtgaatgtgccacctgctgtccagatcccacttacaacttccccagccaccccagttccttctgtggtgaacacagccacaaccccaacccctccaatcaatatgaatcctgtaagcactcttccccctcggcccatcccccaccccttctcacacctgcacatccacccacaccctcaccacccacaccaccttcccatccctccagtccctcacctcccgccacctccagctctctttaagagtgagcctttaaatcatagaggccagagtgaggacaactttctgcggcacctggcagagaagaacagttcagcacagcatcattaacatccgtctccttagtgtgttctccaggagacacgtccccatgtgtgagcgtgcacagagggagtcggtgagcatttccttagttctcagactctcctccgcctctaccaagagcttcgccagtgtcactgaatcaacagatccaagggaatgaacaagaagactaccttgagctcacagagggactgtcatctaaaccaggggaaccactgaactaaagcccaatttgcttgcattttctgatgacttttataagtttcaaatactcagacttgtggaattttataatttcatatcagctgatgaggtatgcttgcttttatatcccagacttctcctcaaagaggggataggcctggtttcctttgtactaatcgggaaggctgtgagattaatccagagcattaattgtatcactgtgtatggtaaggaattcttttcagcttttggtgccagctacagagttgagctggccatgtttcacagtatatcaagcattatagagaaagacagaaattttcttctttgtgtagctctcctaacgcactctttattttactacagaaattattttagagtttttgtatagacttctttggtagtctgtttctaaaatgaaatgtatttcaataagcagtgtaattttttcagtgtagctgaacctatgttgtaaaatagaaaaaaatttttataatcatcaaaatgtgattcttaaagatgcatataacttctataattcaaagctattcttacatccgtacaactcaaaaggtgcttcagagactagatgtatctgagagggtctccagaccaggttactgcaaaaatgaggttttgctttcaggatttggcgtaaatacttggtagttttgacatctctgcttaacactcaagagaggctccctaatgtgctcctgtcctccatgttctgcttggcttcgttagtgcattacatgaaatgatttgcaggggatggggccttttccagggaagtcacctaaagcttgcatgttttgaaaatttgaataaggctgtttgctgacaggaggaggaagtagtggagatcatttcatctcagtcacgtctgtttctcacttcccttaggaattgtgttgatgtttaacttttatgggatgacaaattgaaatcgctcattttgaggttgctttatttttctagaattgttataagaagctaaaatagtaaacttaaaatcacaaacatgacattgctgatagtggctgagaaattcagatgagaagacaaattggttatgaattttgaaatatctattatatgtaaaatgtggatatgttcacaaccttgagctattttaacacagtttaaatatagtgagggaaaactcctaagttttactgccctgtcctctgcaaattatgtaataccagcattcttaggcgataaagagagcagcacctctagtacctttaggcagattactttttcaagtttggggaacttcaaaagaccataatcaaccaggagcttattataggaaaggctgaacagaagggctagtgtattgattacacttaacagatcatatttatccagactcagtatagcttaaaattttgtatttctttatctgagagaactgagttcccaggctaaatcacttacctcccaccccctctccaattttttttttaagagacaaggtcttgctatgttgcccaggctagagtgcagtggctattcacaggtgcagttatagcacactacagcctccaactcttgggttcaagcaaccctgcctcagctaaccaagtagctgggactacaggtgcatgctaccatgcccagtccattttttaatcttgaaatttcttcatttttctttcttcggtttcttaaaatctttgcctgaatcagaacgctggcttttatttatttttttatttttaatattaaatgtgcagatatgcttcgagcacttttctaactaatgagctctgtggtaagaaaaaatgaactctttcaattgagattaagtccatatttttcaaacatcacgttctctattggctttttggtttagtgtttctaaattttctccttctgattttgcctgtcttatataatgagcataggaaaattttggaatgaggcagaaaagtatatcaagacatacttcctggttttggatgtaagttttaaagaatggtatttttaatatttgtacacattctttgagcacccaggtacccaagccaataaggaaagttaattccttgcatatgactgttatatctttagtggttgtctccctctccctccacagtctccttggcattccatgacaagtttgtcaacctacacttttatatagacatatcattatttcatggtcaagcctgtagtattaaaatgatttttttaaaagatgtaaactgtgcttagttaattggttatattttgttctgttttttttttttttttttttttttttttgaggcagagtcttgttctgttgcctgggctggagtgcagtggcgtgatcttggctcactgcaacccccgccccccgggttcaagtgattctcctgcctcagcctcccgagtagctggaattacaggcatgcgccagcacgcccggctaagttttgtatttttggcagagatggggtttcaccatattggccaggctggtctcaaactcctgaccttgtgatccgcccacctcagcctccgaaagtgctgggattacaggcgtgagccaccacgtccaactgccttattttgttctgaataaatttacagtattgggcagcaattctggattctagacttgagaccacagaatcaaccatttcatgaggttgtactgtaattatacactggaatattcaggtagtcatctttgatttttcattcaagtaaatatagccataagaaaatatctgctatacaggaaaaccagtattaagcaaataccaccatccttaacagaaacaaaaatatatatatatattatttttaaaaattagcattgtcatacagtacaattcttagtgaagtgtattgtggaacaatttagaaacttcctttttttcccctagattaaggatactttccttgacttgagacttgtggtcttcaggaaaactactcagaatataatgactcctcatcagtatcatattgtatataaataatgaaatgcattaagaatattcacaacattgaacccaggaggcggagcttgcagtgagccgagattgcgccactgcgctccagcctgggcaacagagcgagactccatctcaaaaaaaaaaaaaaaaagaatattcacaacattaatgcttctgaatagaagaactgcaggattaagccttaaacatatatgtgcaacacgtttaacatgcttaagactcaaactcagggttgaaaatttggttggggtcctctttgtaagataaaagttgcattatgtggtatgttctcttccatatatgctacagcaccccatgaattcttcaaaactttttacctacttgttatctgtttatgaaaaaaagaattatggagaagtttgagttctcagcccttatctgtacatgtctgttaaagacaacaaaggctgcatttaagcattatatagataacaaattgaggctgtctctcgttacttagttttactgtcttcaaaggcttgtatcattgctagggttaagacttatttgaggatgagttggcattgtattttttgtgtgtgtgggttggtttgtatttgtttcgtttttatttttctattttctctcatagatttatcagtaaaatataaactcttccttagccttaataaaggctgctgctttctcaaattgagtcagataggctcattcggagttagatttttaaatttgaatgaagaaaagacaacaatttaaaggcatgtggcttcatttccacatatatttgtgactggattcttatttttagcaagaggggagatcgccacaaaaaaaactttagttcaaagaagactgtgcaaatcagttacctgtactttcatagtctaccatttacattaactgttctagattaatgactaagcatggccattaccataattacatcatttttttaaaaccacatttgttcgaagtatccttttctagtggttagaactgtccctataatttgattgtccctcatatactaaccgaaagcaaaatgctctgatgagatgcttataaactatgaattttttaattcttgaaatttttttcagtttttatgattgttgaatagatatgtatgtttagttccattattatttcactggaagttttaaattttgagaagatgaagcagagatagaaatccattgcagatatatgtatatttaccccatcttgcaggtttcagttagtaaaacacagaatgataggtcggttttaatgttttaaaaaaaaactaaaaaactaaagttagagaaacctttctgtttgagctactgtatagaaaagacaacttttattgcattgctggtccacatgataaatatttcaatgctgttctagactgtatgagaagtacttaatgaaaaaagggatacattacatttaagaattgtatcagctaattactgttttaaaaaaatcaactcatttggaattcttcggactataaaattgagcaagtaaagtttgggttttaattttcctttgcctgaaccaagataggaaattacttaagagttttttttttttttttttttttttttttttaggaatgaaaggtcataagccattagaaatagtggcattattatgcaataacaacaccctagctaacctgcttttgtcatctgtagcacttacaataaagaatgatgaccttccaaccctggacactacctcgataaagcaaaccagagatcctctctacactttctatggaagccataaaagttgccatcaatatatccactttcatagttctatacttttatactttctagacttttttatagactttatgatcagatctttttgtctcagaggataggttttgcaagattcaaaggaaaatcaaactccttggttgttccagctttgaagcttttgcttcagtaaatttgtttaaagaaccagatcacataccatttatcaaattctttacttaagtcagaatactttgcagacatacatatttggaaaacaaactgtttcttgttcactagatagaatctgtattgtagtaagaaactacttacaaggtggctttctttctgctttgttactctatgtattactcaataatatatgtatggtcacaggttcctggagttgttttatttctttatgacagacacatgagtatgcacctctctctaatcctctgatgtcactgcagcttcagtctctctcactctgtttttgagtgccttcaaaatgccagcatcctggaacattcttttcctgatctaaatcctacctctgactatttcattatccatgaatattggaattcacccatattccaatgggcttaactctacaaactagctaaaaccttggacaagaattttgaccgtatttctgttttgttcctccatgtcatttttaggttatatttttaacttttatttatatcttatttcttcacatatttcgtctctctgttgaaagattttatccttatttgactcttcactttttttactttcaccagaaatttgacgttcctttaaaattaaaggtcattgaatgtcttttgaacacctttttctcaactgaagtcttcctgaatgcctcccctttctgatgaaaggatcctgagtgctgctgttgctctgccctgttcccatgtgcccactcccttccgtacacattttgcaagactatactctttattttagtcaaattaatttaaaattgctccctgggtttctgctctctcatggccctgtccctcaaaaacttctgtttactttttctagctgttttcatctaatttgtttaaaatgtatgatggatccataatatatgaaggatgtaatgaaaaggaggttgcagtgttttatataatatgatcgagcacctccgtgatgaaacatttagcaattggctagtccttcacagccagagtggaagtttgtgctgtggacaggtctttttactcccttccagttctcctccaaaactggagaaaaaggaaaaaaaaaaagaactctttcaaatgaggagatttgattgcatttttttaggtgaatgaaagcttggagttgagcatttgggccttagtcagcatttttcctttctgacttaaaatctcatgtccttttccttaaagttaatagtactcaggtttttaagactaataaccacacaaggtgggtatctaagaaggcagctgttaatacattctccatctttcctgtctggcaacaggaaagatattattggtgagatagtgcaaaattgtgagaattggttatgtttgatgatgaataaattcaagatttttgaaggcttcactgctatttgggatgggaaggtgagtttacaaaatgaaaaaggtagatttttatgttacagaaatcagtaacgggtttcttgttgtgttaattacctttcacttgatttgccatgatgtttcttcctcattattgatctagaagtttgcctcttggatagtaactagtaacttagtatctactttaaaatttgtggcttttctcttcagggtcccaggccataaaacaacggagagctgtacttgcttgtcacttggaggaaccacatccttgagacagcctgctgtcttgtatgtcttcagtaggaaacttctgacacacacattcaagggagttcctgcccctgagaagtgttcccatagctttccagtcgcaggttactttcacactacgtcagcttctctggtgagatcagggatgttacatattacttgaaaatgatttcataggaagtgaggatggggcaagaaaggaggtagaagctgaattttgcttaacttcagaaggaaatctgatacttgccttggctagttctgatcaactaaagagcctgtgtctgtactggatgtgccaaagagtcaagttgtttctggaatatccagctcctctgaatgaacacagcttcctccctacctgtcttttatgggtgaaaagggaccgtctgatgagcatgatagacatcctgtacaggactcaagactgtttcattgcatttgaaagttggtgggaagtattttattctgctagagctcctaaccctcctagaaatatcttttcatgctctattaattcaattcattagtttaaaaagaaacagtgtgacataattttggtgtttacttcttaagttgtctccccaagggcatatatgtagcctctgaaaatgggatgatttcttctcaatcttccataaatttgaatatgcattttattcatttcttgacatgggctgtgtgactgttttccatcagcagttctggctttgtccacaagggagcaataaagtacgttagctttattctcaaccttctaaagaaagatcccacttttaaatctcttctggaatagcctcttagctcaaagcttattcatgtattttgattatttaagaaattttcccttattacaaagtccagtcgtcgttcatccctcatgatgccaagcaatgattgatgtgtgggtgtggagtccttgtgggtcaggcatcttaattaattagactttttacatattgatgatccccagattgaaagccaggaccttcccataggggcgcctttgtgtgctaaaggcagagcaggcaggcttctccactcctatctcctccgcaggccaccaccatcacatctataggaggaacaagagcactgggggaactctggagtatgagtaaggaaatgcttctcaccttctctgctccaaagagatatctgttacatcagggaacaagtcctctaggtcaggcacttcctcctgaccagtgcaacgggcactccaggttagaaactgtgtgtgctccctctctgtcagttacttgtctaagggctcctatccgtggtcatcagctctctggccatgagttctgtttgtgcttattgcagcagcatcttcacaacaaacaggtcagtaatcaacctgggaagggaaaagacgacagtaaatattaccccctgtagagccgggaggcatttacacctggaatggccttcttaactgatttctgcctggccacctcacccccagccaagtctgaacctgagcaataccaggcacagagaggtgtctacttgtaactccaacacttgacaaaaaacaaaactgaagctgtgattggtttaggcagcaagtggccaggtgcaacttgtttgtttttatttttgttttccccaacagtactgagatcacttgcacttttcctcatttcttaagaaaatccagtttgcttgccatgacttgtttagcgttaggtttacaaagcttgttgttgaatgttgaatatttgtccaaaggagtttgacaaaatagaagctgcttggtccctgttctgcctgctaggtcataaggatgaaggccatgtggctggggtacttatgtcaagtccagaatggggcagtgtccctctcctacctctctgcggagacgcaattgaaggtcaagtagactcagtgtagggcaggcagctgtcatgctgcaaagaagtttagaggagtctttgggttggggaggtgacaggtaggtaggacaggatctcttaagatgggaaagatactggggagaggagggctgcttggccccagggaactgcagtgaggtggaactgagctccgctcctgaatctccaaaggagcccatgctgcccggcttccctgagtcattttttccagcatcctgtcagatccctcaatgtactgatttcccccttgtgttaactataccgatattatttttttagcaattgaaatgcacttttttatttcaactcaatcatgattttaagtataaaaaatttatagattgttaaaactacttttttgtgtatttttaaccactcaatgtagcattgtatattttattcttgtgagactctggtacaggtgtgccgcctaatgatttttctgagatgctgggcctttggatgtgtacggtaaccaacttaatgctaatgttcaaagtaaaaaaaaaaaaaaaaagcagccata

SEQ ID NO: 329 - DNA, 6666 bp, Homo sapiens
ggtagacgcgatctgctggctactaccggcctcccctggctgttaaaagcagatggtggctgaggctggttcaatgccggctgcctcctctgtgaagaagccatttggtctcagaagcaagatgggcaagtggtgccgccactgcttcccctggtgcagggggagcggcaagagcaacgtgggcacttctggagaccacgatgattctgctatgaagacactcaggagcaagatgggcaagtggtgccgccactgcttcccctggtgcagggggagcggcaagagcaacgtgggcacttctggagaccacgacgactctgctatgaagacactcaggagcaagatgggcaagtggtgctgccactgcttcccctgctgcagggggagcggcaagagcaaagtgggcccctggggagactacgacgacagcgctttcatggagccgaggtaccacgtccgtcgagaagatctggacaagctccacagagctgcctggtggggtaaagtccccagaaaggatctcatcgtcatgctcaaggacactgacatgaacaagaaggacaagcaaaagaggactgctctacatctggcctctgccaatggaaattcagaagtagtaaaactcctgctggacagacgatgtcaacttaatatccttgacaacaaaaagaggacagctctgacaaaggccgtacaatgccaggaagatgaatgtgcgttaatgttgctggaacatggcactgatccgaatattccagatgagtatggaaataccgctctacactatgctatctacaatgaagataaattaatggccaaagcactgctcttatacggtgctgatatcgaatcaaaaaacaagcatggcctcacaccactgttacttggtgtacatgagcaaaaacagcaagtggtgaaattcttaatcaagaaaaaagcaaatttaaatgcactggatagatatggaagaactgttctcatacttgctgtatgttgtggatcggcaagtatagtcagccttctacttgagcaaaacattgatgtatcttctcaagatctatctggacagacggccagagagtatgctgtttctagtcgtcataatgtaatttgccagttactttctgactacaaagaaaaacagatactaaaagtctcttctgaaaacagcaatccagaacaagacttaaagctgacatcagaggaagagtcacaaaggcttaaaggaagtgaaaatagccagccagaggaaatgtctcaagaaccagaaataaataagggtggtgatagaaaggttgaagaagaaatgaagaagcacggaagtactcatatgggattcccagaaaacctgcctaacggtgccactgctgacaatggtgatgatggattaattccaccaaggaaaagcagaacacctgaaagccagcaatttcctgacactgagaatgaacagtatcacagtgatgaacaaaatgatactcagaagcaactttctgaagaacagaacactggaatattacaagatgagattctgattcatgaagaaaagcagatagaagtggctgaaaatgaattctgagctttctcttagttataagaaagaaaaagacctcttgcatgaaaatagtacgttgcaggaagaaattgtcatgctaagactggaactagacgtaatgaaacatcagagccagctaagagaaaagaaatatttggaggaaattgaaagtgtggaaaaaaagaatgataatcttttaaagggtctacaactgaatgagctcaccatggatgatgatactgccgtgctcgtcattgacaacggctctggcatgtgcaaggccggctttgcaggtgacgatgccccccgggctgtcttcccttccatcgtggggtgccccaggcaccagaacatgatggggggcatgcgtcagatggagtcctatgtgggcaatgaggcccagagcaagagaggcatcctgaccctgaagtaccccatggagcacggcatcatcaccaactgggacgacatggagaagatctggcaccacaccttctacaatgagctgcgtgtggctcccgaggagcaccccatcctgctgaccgaggcacccctgaaccccaaggccaaccgtgagaagatgacccagatcatgtttgagaccttcaacaccccagccatgtacgtggccatccaagccgtgctgtccttgtacacctctggccgtactactggcattgtgatggactctggtgacggggtcacccacactgtgcccatctatgaggggaatgccctcccccatgccaccctgcgcctagacctggctggccgggaactgactgactacctcatgaagatcctcaccgagcgtggctatagtttcaccaccatggccgagcaggaaatcgtgcgtgacatcacagagaagctgtgctatgttgccctggacttcgagcaggagatggccacagcggcctccagctcctccctagagaacagctatgagctgcccaacggccaggtcatcaccattagcaacgagcggttccgctgccccgaggtgctcttccagccttgcttcctgggcatggaatcctgtggcatccacgaaactaccttcaactctatcatgaagtctgatgtggacatccacaaagacctgtacaccaacacagtgctatctggtggcaccaccatgtaccctggcattgcccacaggatgcagaaggagatcgctgccctggcgcctagcacgatgaagatcaagattgttgctcctcccaagcgcaagtactccgtgtgggtcggtggctccatcctggcctcgctgtccaccttccagcagatgtggatcagcaagcaggagtatgatgagtcaggcccctccattgtccaccgcaaatgcttctaggtggacgctgacttagttgcattacaccctttcttgacaaaaccaaacttcgcagaaagccacatgagattggtatggctttaattgttttcttatttcattttttgttttgttttttattggcttgactcaggatttaaaaactggaatggtgaaggcgagagcagttggttggagtgagcttcccccaaagttctacaatgtggctgaggactttgatcgtacattgtttttcttttcaatagtcattccaaatattgtgagatgcattgtttcaggaagccccttgcccttctaaaagccaccccacttctctctaaggagaatggcccagtcctctccctaattcacacaggggaggtgatggcattgctttcatgcaaattacgtaatgcagaattttttgaatctttgcctaaatactttttaattttgttttatttagaatgatcagccttcgcggccccccttttttgtaccccaacttggggtgtatgaaggcttttggtctccctgagagtggctggaggcagccagggcttacctgtactctgacttaaggagagttggaaaaaagtgcacaccttaaaaaaaattcaatgaggaagcattaacaaaaacagtatttctgtacagtggacagcttagcatgttgacaactgagaataaaatgctcagttctgaactggacaatgtaagacacaacgacgaaacactggaaatggaaattcaattacatcattgtagactggctactgctctacatgattgtgaccaaagtcagagagctgaaagagacttctttccagagaacaagacatgaacaggtttatttacagaagacaatgaattctcatttgtctaacctaaaagattacagaatctttctcaacaagtctaatgtagacagtaaaatcaacaggctaaaaattaagttccatgaaacaagataaaactctgagagaaaagatggggcaggccgccatctttcccgttcgggcaacttagtcattccagcctgagggctttggagagtacaaactgaccagggaaagaagagatcccagagcacagcatagctgctttaccaaatcatggccagactgcttctgtaagcaggcccctgatcctgttccacctcactggacaggacctcccaactggggcctccagctacccccaccagcatcccttggccaatggaaatttgaaatgttcctgggacagagctcctggagagaggggcaggccaccacctttgctgtttgggtgactagccgttctggcctgcaggctttggagagcccaagctgacaaggggtagaagaggtgcctcagcacagcacagccacgctacgaaaacatggccagactcttgtttaagtcagtccccgaacacatttctagtcagtgggtgaagtctttcaaccagggtctctggctaccttgactgctgttctctggccgacagaggtctcaggcctccctgagtcagagctcccggggggaggaccagattgtcatctttgctgtttgggtgacccagccatttcagccttagggcttcagagtgtctgaggtagccaggggctgaagtgaacccccagcacagcacagctgctctataaaaacgtggccagactttttctttaagcaagtccctgttcttattcctcctgactaggtaagacttctcaacttgcctccagccacatcttattggtgtgttcagattggcaacaggttcgtacctcagtggtacagagctcccagaggaaggggtaggctatcatcttccctggaaaatacgagtcaattagggacttgaggggacccccagcattccacagcagcccttcagaaaagtggccagactctgtacttgatgggcagatcctcctggcctgtgtctctagccagcccaccactggagctatcaagccagtagcaactcagcagttccttggacagagcttccaggagcaaatgaaatcctttctgccactgcctttgcagtgaactgcccttgctatcctcagaagatatatcacgggagcaaagaccctaagtgccatatcaacacctccaataagctgcagttgacccaaagaacaagccaatccatctcccataggtaccacacacactccactactcatcaccagacagggaaccctggcttgggcccacagcacagaccctccatcctgggccgattacactgagtgattgctaactcacatgtctctgggatggagcacccaggagacaagcaaagtggtggagcagcaagtcaggtgatgtggagcccagagggcagggacagctatctctctaggctccacttgcccttgtgagacactttgtcccagcactttaggaatgctgaggtcagaccagccacatctcatgtgcaagattgcccagcagacatcaggtctgagagttccccttttaaaaaaggggacttgcttaaaaaagaagtctagccacgattgtgtagagcagctgtgctgtgctggagattcacttttgagagagttctcctctgagacctgatctttagaggctgggcagtcttgcacatgagatggggctggtctgatctcagcactccttagtctgcttgcctctcccagggccccagcctggccacacctgcttacagggcactctcagatgcccataccatagtttctgtgctagtggaccgtaccatatcagtggagagctgcagcaaggtggcccctacggccacgcaccagcctgcacattacctctccatactgcagccctttatatggaaacttcctacatcactttgctgtgtgtgtttacacaggtggattttgctttacttgcactgacagcacacaggagggcagcacacaccccaacccacatcaactgccattaaagaaaagaaatttcagcccataatttcatgtccagcaaaattaggcatcataagtgaaggagaaataagatccttttcagacaagcaaatgctgagggaattcaatatcaccagatctaccttacaagagctcctgaaggaagcactaaatatggaaagaaaaaaccatcaccagccactacaaaaatgcagtgaagaacgcagtgaattacgcagtccagtgatgctaaaaaccaaccacatacgttaagtctgcaaaataaccagctgacagcatgacgacaggataaaatccacacataccattactaaccttaaatgaaaatgggctaaatgctcccattgaaagacacggggcaagctggataaagaaccaagacccactggagtatgctgtcttcaagaaacccatctcacatgcggtggcatacataggctcaaaataaaggaatggagaaaaatatttcaagcaaatggaaaacagaaaaaagcaggtgttgcactcctactttctgacaaaacagactatgcgaataaagataaaaaagagaaggacattacaaaggtggtcctgacctttgataaatctcattgcttgataccaacctgggctgttttaattgcccaaaccaataggataatttgctgaggttgtggagcttctcccctgcagagagtccctgatctcccaaaatttggttgagatgtaaggttgattttgctgtacaactccttttctgaagttttactcatttccaaaaaggaaggcaagttttcctgcttccatgacgatggagagcaggcatctcctttcctgagtttcagcttgcttctgacagg

SEQ ID NO: 330 - DNA, 3179 bp, Homo sapiens
atttcccagcaggccctggggttagactggccgcagctggagaggtgccagcccgtcgtggatgactagagccaaccacctgccttccgtcttccaggcagaaccacagagaggctacagccgtcctggcctccctccggccctgagagctcctctggcctgtctcaagtcttaacgtctcaagcgcagactgccggctccgaacggggagaccaggcttctgcaccggaaacaaggcaccggttgtgacgtcacagccgcagagcgcccgacttcccagaaggcaccgagtccctgccgttctcctcaactggcggcggcgcgaacgaatagtcgccggcgacctcttggctctctggcagatttcctctagtaagaggtggctctggaggccccgcgaaacgagtgtggtgtgtggttgcaaggcatgatggctgcaaaagtggttcctatgcccccaaagccaaagcagtcctttatactgagagttccgccagactccaagctgggccaagacctacttcgagatgccactaacgggcccaagaccatccaccagctagtgctggagcacttcctcaccttcttgcccaagccaagcctggtccagcccagtcagaaagtcaaggagaccttggttattatgaaagatgtgagctcaagccttcagaacagagtgcatcctcgtcccttggtgaagcttctgcccaaaggagtccaaaaggaacaagagacagtgtctctgtatttgaaagctaaccctgaggagctggtggtctttgaggatttgaatgtatttcactgccaggaagaatgtgtgagcttggatcctactcaacaactcacgtcagagaaggaagatgacagcagtgtcggggaaatgatgttactggtcaatggcagtaatcctgaaggtgaagatcctgagagggaacctgtagaaaatgaagattatagagaaaagtcttcagatgatgatgaaatggattcttccttggtctctcagcagcctcccgataaccaggaaaaggaacgactaaatacatccattccacaaaaaaggaaaatgagaaatctgttagttaccattgagaatgatactcctctagaggaactctcaaaatatgtagacatcagtattattgcccttactcgaaatcggaggacaaggagatggtacacttgtccactgtgtgggaaacagtttaatgaaagttcttacctcatttcccaccagaggacccacactggagaaaaaccctatgactgtaatcactgtgggaaaagcttcaatcataaaacaaacctcaataaacatgagcgaattcatacaggagagaaaccttattcctgttctcagtgtggaaaaaacttccgtcagaattctcatcggagtcgtcatgaaggaatccatataagggagaagatatttaagtgtccagaatgtgggaaaaccttcccaaagaatgaggagtttgtgcttcatctgcagagtcatgaggctgagagaccatatggttgcaaaaaatgtgggagaagatttggtcggctgtcaaactgtacccggcatgagaaaacccactcagcctgtaagacccgaaagcagaagtaatactgggaaccctttctgggtctgatggtgctgcctcaacctgagagctttcataagtagttctgaattcccaagctgcctaaaaaggtataaatgtgtaaaaatctcattattgccaaaattggataaatgcccatcttagctaaaacctcaaattgctagaaaattcacagggaagaaaacatttcaagggctatacctcagcatctaggctttttggactaaggagctttcctttttgaagttatatgataatgtacaggtcacagatcccctttcccaacactttgaagatgaatctggagtctgcttacttggaaggcaaagagtgacttgtgtctattgaaagtatatccgttttccccccacatggggattcatacttgagaaatagtgcaaagatgcttatctggaactgtgttctggtgaaagaaccaaattactggcttgttagccaacagcttctgatagcaattcatataaccctctaagaatacctgtttaagtcttgagtgttgaaaggaattgtttactttggaatataggaaaacagttgaatgtcagactctcatttgtatgtgatctaaatttgcaatcaatttcaataatatttacaatttgtgataaaactgacttttacagattccttttcacaacataatttaggtgtctactgttcttattgtattttgttctgctgttgatctctccagcagccgtctcatgcttctcccttgctaaaagaagtttggattactcaggcagggccatccagccccaccactagaaaagctcttcagaatcttgtccctctgttgagcccagatctcatgtgctacgaaggaaaccccaagacccagagaggaagggtcaacctggaggcaggaaaaagttggcttggatccatgtctcatcaataaccttaccatatgcttaggtcccctctatgctgtcatcagacctttggcaatggggtggtcactacctcacaaggcaaagtgttgtatgattagaaattacgtctccagtggttagctcacattgcctctcaagagacaggtttccaggtgtcttcattgtagtgggtattaattgtcttcagcctcttgatatccataccttcctgtcctctgcctagaagcaaggccagcggtgcctttacggactgatcgtgtggtgcgatttagggattcttcagttttgcttgctttaggtttccaaaagttatacattggtgttttgattggaataaagaaatcctataagctatttgggaaaaattatagtgtatgtttcccatccagaaacatgcctttctatttattagagtattatattcctgtgaaaatttttctaattttcttcacttgttttacacaattttgttattgtagttttttccattatatttttatagttgattattgcttttacatgggaaagttatttttaattatatatttgtatagtcatctcactgttgttaattttcaatagtttgttggtttagttctgttaacttttggtaaaatgacaccatctacaaagaatagtttttgtttcttgc

SEQ ID NO: 331 - DNA, 8957 bp, Homo sapiens
ccttggggttagttttagtcatatttttatctctataaaacatcaggctgggaggtggtgtgtgcctgtagtctcaactgctagggagcctgaggcaggaagactccttgagcacaggagttcaaggccagcctgtgcaacatagtgagaccctatcactctggaaaaaaaaaaaaaatctgcggagaagaatgtcttccaagcaagccacctctccatttgcctgtgcagctgatggagaggatgcaatgacccaggatttaacctcaagggaaaaggaagagggcagtgatcaacatgtggcctcccatctgcctctgcaccccataatgcacaacaaacctcactctgaggagctaccaacacttgtcagtaccattcaacaagatgctgactgggacagcgttctgtcatctcagcaaagaatggaatcagagaataataagttatgttccctatattccttccgaaatacctctacctcaccacataagcctgacgaagggagtcgggaccgtgagataatgaccagtgttacttttggaaccccagagcgccgcaaagggagtcttgccgatgtggtggacacactgaaacagaagaagcttgaggaaatgactcggactgaacaagaggattcctcctgcatggaaaaactactttcaaaagattggaaggaaaaaatggaaagactaaataccagtgaacttcttggagaaattaaaggtacacctgagagcctggcagaaaaagaacggcagctctccaccatgattacccagctgatcagtttacgggagcagctactggcagcgcatgatgaacagaaaaaactggcagcgtcacaaattgagaaacaacggcagcaaatggaccttgctcgccaacagcaagaacagattgcgagacaacagcagcaacttctgcaacagcagcacaaaattaatctcctgcagcaacagatccaggttcagggtcacatgcctccgctcatgatcccaatttttccacatgaccagcggactctggcagcagctgctgctgcccaacagggattcctcttcccccctggaataacatacaaaccaggtgataactaccccgtacagttcattccatcaacaatggcagctgctgctgcttctggactcagccctttacagctccagcagctctatgccgctcagctggccagcatgcaggtgtcacctggagcaaagatgccatcaactccacagccaccaaacacagcagggacggtctcacctactgggataaaaaatgaaaagagagggaccagccctgtaactcaagttaaggatgaagcagcagcacagcctctgaatctctcatcccgacccaagacagcagagcctgtaaagtccccaacgtctcccacccagaacctcttcccagccagcaaaaccagccctgtcaatctgccaaacaaaagcagcatccctagccccattggaggaagcctgggaagaggatcctctttaggtaaatggaaaagtcaacaccaggaagagacttacgaattagatatcctatctagtctcaactcccctgccctttttggggatcaggatacagtgatgaaagccattcaggaggcgcggaagatgcgagagcagatccagcgggagcaacagcagcaacagccacatggtgttgacgggaaactgtcctccataaataatatggggctgaacagctgcaggaatgaaaaggaaagaacgcgctttgagaatttggggccccagttaacgggaaagtcaaatgaagatggaaaactgggcccaggtgtcatcgaccttactcggccagaagatgcagagggaagtaaagcaatgaatggctctgcagctaaactacagcagtattattgttggccaacaggaggtgccactgtggctgaagcacgagtctacagggacgcccgcggccgtgccagcagcgagccacacattaagcgaccaatgaatgcattcatggtttgggcaaaggatgagaggagaaaaatccttcaggccttccccgacatgcataactccaacattagcaaaatcttaggatctcgctggaaatcaatgtccaaccaggagaagcaaccttattatgaagagcaggcccggctaagcaagatccacttagagaagtacccaaactataaatacaaaccccgaccgaaacgcacctgcattgttgatggcaaaaagcttcggattggggagtataagcaactgatgaggtctcggagacaggagatgaggcagttctttactgtggggcaacagcctcagattccaatcaccacaggaacaggtgttgtgtatcctggtgctatcactatggcaactaccacaccatcgcctcagatgacatctgactgctctagcacctcggccagcccggagcccagcctcccggtcatccagagcacttatggtatgaagacagatggcggaagcctagctggaaatgaaatgatcaatggagaggatgaaatggaaatgtatgatgactatgaagatgaccccaaatcagactatagcagtgaaaatgaagccccggaggctgtcagtgccaactgaggagtttttgtttgctgaattaaagtactctgacatttcacccccctccccaacaaagagttattaaagagcccgcatgcatttgtggctccacaattacatcagcagaatggtcttaattgtttcgtaaagtgtgagacagattaagttttccctgatttttcatgaacttgagttttttgttgttattgttattgttgttgttgttgtttttttaatttaggtgaagacatattaaatatgagacaccaggacttgaaacttatctcaacccgtagatgtcttacaagtcttatatttttgtcttactttttttttcttttggatgttgataaaggtttaagttactgttttagatggggttaaacattctcactcaggtatgctgtgccggcctacaggttgtgaatgtgtttttattctgaattattttagaaaacaactgaggatttcatattgtgaaacagaacaagtccacggcgtgtgcagctgcatgtagagcatattcaaaaggcctcggaattccaattttccatttgtagagttaaactttgaatgtgccaaactttttcgtaacttttgaatcttaatattttgaaagtcttaaaggagacactgcaaagtcttagacaatctttggcatcttaaaataaaatagcaaaccaacatttttttttccagaaaatggtaaggtactcaggaatctggagacaagatattgtaaggaatgaacaaggttgccacagtgcatggacccaattgtgtttgcctgttgacgtgccatcagtgcgtgatgtggtatgacatacacacaccagagcaaccgccacaccagatatcgacagagtggtcttctctgcctgagaccacctctcactacatccattatccctttgcctttaaccctgacattcagtcttaacacattttatcttaaataatttattcattccagaatgtcaagggtccacttgctatttattttttttcaattgttggtggcattaatttaataattcttgtttttcaccttccttccccgaagaacttttccgtccttttcacctccttctcctgtgtacatagtgattttatgtccccagaacgcctggaagcatttctgaaaccaagatattattaaaaacctattattgtttttaatcatgagtatgtatctggctgcagggctgtgtattgggatataggtatatagtcttacacttaaacaggtatgcccctgaggttcactgtgacctcaagtcttttgccagaattttcccctaattcagttcacaagtggtagggtctgcatcagtggcatttccccctgaattccattcagcagcaaggttcaacagtggtgactgccaggcaggagagtcctgcggccaaacctgaagcccaaggctcgtgggccatgcaggaatctcagtgaagctgtcatgggctggcacctttacactgagttgccttgtcccagctggcacatctagggagttcattgcaaaatccccaggatgcaaaaagccacatgacagcctcagagcaaagatggtggcaaatagtcatgatacatctagagaatgaaagaaaactgtaagggaggagaaggaggggaatacattccctatatgggatgttcctactgttaactctggggaacagatagctccgggggcagcagatgagttcctctggctgactctatctgtagccacatggggacctgcctacgtgtgaacaaaatgaactgcacttatcacacaaggatttctttgaagacatgctactggggtgggaagcagtgaggttttattccccatctcctaactacagggagctctgccatgtcattttggccttcctgaaactaggacaggttgtctatcggggggcttcccccagagaggtttagtgggagaatgtcagtgaatgggatagttcacctcatgggacaacccagaatctgatcaccaggacataggaatggccccatcagatttcttgagccattttgtcacttggaagaaaatagtgtacctttgtatttatttaagagtgctcaaggcctaatagcaataaacaggtctagccaagaaattacaagctattctgttagctgggagtgctctctataagctgattaaggtactgataggaactctttgttattcatgttggttggggattagaaatttgtttttgtacatttatttcaaatgaggaggaggtcattttttctctcaaaaaatgagtatttattattgtcttactgatttctttgattatatacctctcctcctcagttcactcttgttttttttctttctctttggcttttgcttttgctctctctcacttctttcttattttgttgcattggtagagtgttgtatggctagcattgtattgtatgtaattaattttgcacaaaagcaaacatttagcatagtaggttaattttgtttgtttttatgaccatgccaaaataatattctgggctggtggagaacaaaggactgttctttaggactgaaacttgattttgctcatagtaagtaaaaaaaaacaaaaaacacacacactcacagatgttgtttcgtaagtgttataagcactggatataaatggtattttttatcacttctgactaatgtgaaactgttgtacgaaaactacatgaacaaaagtcatctgtttcgactcgtgtgggcttgcctcacagttgccggatttgagtcatttttatgtcttgttatttcatttatttatgcaaaatacatgtgtgtatgaacactttgttttagctccagctctgcctcagtactggggttcatttacttttagccatgttcttaaaaatgaaaggctattcaggaatgatctgattgtaaacgtctttttcattggatcaaacagtaatgctgtatttgaatctaaattttgtgtataagcagtttatttattagccaagtttggctctaaatatccatggaaattaagaatgacaatcatagggatcaattcattttattttcagtggggcttaaacaaagtttatatgactttaccatctcattttagatttttctaattgtgtaaatataacatagaaatagaatttatttttggttcatgaatacttagtgagatataagttatgtatttcctttttgttctctatccatagatgttggtccaaactgaaagttgatgagtcactgtgcctctcggggtagtgagttatcagctacagtgagagagcagtgtttggcctgcagctgggacagcaaaacgtttcaccagggttctcatgcagttcagaacccactgtccacagatccagacatttcccttttttcttacagaaagttgatgattggacatactaaatttccactacagttaggagacagtcagtttgctttgggagtctacataaatcttctaagatagttctgtgaccatttaatagcaagaagcatgaatgccactacaaaggcaaaaatccacctctgagatcggccgttaataaacgtcccgtcatgtcagtttagattcaagaatgttaagcaactttgtttttgcggtgctccctatttcatagtatcttcaaatcaaaaataaaaattatctccattttgttaaagaacttacagggtcagggttctccttgtcacttagaattgggacactgccaggcaatcctctcccaaaaaaaaaaaaaaaaaaaaatagccatatggaatggaaggaaaaggagaaaagaaggaagaaaggaaaaaagtaggaagggagagagaaaaaaaaggtcgctttgcggatacgagccgctaggctgacaacttttctatttcattggcagatatgaagcagtgtcttttccagtaaggtacggaagctttgttgttttcatgtgtacccagctcagccttttagaagcacctcggtttgcttcattaggtatttgatactctccagccttgtcctcaggcctgatttgatttgccagggtcctgacaccaaagcccaggccaagttctaaattcaggtgtgggctcacagtgctattgagcttgtcgaattctggcctcccctgaacattagccccacgggagcctgagggtgtttgaaaagggcgtgatcactctagggctgaaattaaaggctgctttcttttccttctgaagccaggctgcttcttcggagtacaccctcctgagccaggagcacaagcactagcagaaagcagggattgtttcaggaaagcccatttaccctcagtaggaaggcagcctggtcacttgaacagcacagctgaggctgcttctctcaatttactcattttgcaaagaattgacctctaccaactcattagggagaggaaaaagaatcacttagtaattttaaatcatatgagaagtcctgtaccaagtgccaacaactgcaaagaaatgcagctagaggaatgtattgaaattactactgggtcttcctttttaatgagaaaatgacaaaaatggttgctgtagccctgcctgattttgtacacgtttgtctaagaattgagttggcacttaagctcacttctcaaagtataataatattgtatgacctcatttgtcctttcacaaaagcacttgcatcatttccttaagtcatctgctccctgacatgttttcttccctaataaacaacttctgtctgttattcctgccaatgatgttctgtttctgatgccatatcctattgagcgtgcccctgtactaatatcattgaaaatattgatatgcaaacacatttccttttcatccccattctatctttccctttggggacagattgctttccaaaagctcatgaacaaatatttggaatgctggtacctttggggcagaggtaagggtgggcggggtgggggcagaaaggtaatgcttaatgcagataactcttctaatcagtgtccatggcaatatgaacgcttgaagaaaactcagtgacatatcttgctcagtagtttcttattcctgaagaaccacaagcataaagtgaggcctcagtgctggtgctcttggagtatggggaatgtgcaaatatttaactgttttgtatgctgcacattgcaggtctgctcatgtgcattctccctttgtcttcctttgtcatatgtgtttttgcttttttgaaagtgcagtctttattgtaccctcctccagcttgtagcaaattagaatgcttagcatttatgttcattcattattgtatttgccatgtaaaatttttattaccttagacaagcttataagctgttactacataacttatcttactgtaactcttttatttcccccgacgttgtaatttgtttgtgatgtatattgtgaaattgtattctatgttaatttaatcagcacaattcactgacatgctggactgacatgctggctgctgtttcaaagtgtaaagtttgtgtagggctgttgggacaactgcaactctgttgtcaaggtactgtgctttggttcctatagcaacactgggtgtggcccttgaattgctaagggcatttaatacatcctggagcaaattttaactgcagattttctttgtagaaattctatgtataatgcaggtacctacttggcccatggctggtaactatttgggcaattagaaaaaaagaaaaaaacataaaaactagtgtctattgctgctttgaatatgtttgaaagtctgaaaatgtaaatagtttatcaaaaaaaaatcttgtacagtccagtgtaaagtttttaaatgaccttaagggttgccatcacatctttctcacactctcctcttgataataataataataaaaagtttgctaaggattaaagaaatgggaaaaataaaaaaaatctcttcaaatttacaggaatgaatcattgttcttagctttgttgcatacacaaacttcttggattttgttgtgcagtattgacgtgagataaagctcaacattgaataatctttcagtggtacttttcaaagtcttcccctcctctgcctcataattaagggaaaagacaaaattgaaagacacactgtctttatctatcctggtgtatgttggcaccttagctactttttttttttcctttttgcacaaggtgctttcctgatatgttcaacatgccatctttgggtgataatgtatatgccgtgatggggctcaggccccttaggggagtgtctataagaactgcctatttatgctcatttacctcaagactgtcctctctaccctaatctagttgtcatcactccatcttttgtactgctgttgacacttacaaattaaagataaattttgttttatga

SEQ ID NO: 332 - DNA, 3751 bp, Homo sapiens
agacaatgagggagagtctccgccgaccgcctgctgcttattgttccgggactggagactgcagccggctgctgcctagtcctccggggctccgctcctgactagctcctccgtccctctagggacggttcggggtcacctaaccctggtccccggggcgctgggacgctagccccaagccgcagccgctcttcgctgaccgccctctttctgctttgcaggtcggcagcttcactcccgagggtgccgcgagcccaggcggcgaacacccggtacccctggcgcagcgaggtgggatgctgtacggacagcagcgctaagtgcccccccacccccggcgcagggtgcactcgctcctggccgcgggcccagcggcggcggcggcggcggcggcggaggggatgagcccgggacgcgcgaggcgcctgcctcaagctaccgcccggagagggacgccgagtagggctcatcgcagtaccgcgcggacccctgccccctgtggcacgcggctgcggagccttgaagccgtgtctgtgatcaggatgcactgggcgcctcgcagctggtgaggatgccctgctgcgcggccctgcgcccccagccccagtcccaggtgggcaagactgactgggcccggcttcggcccctcgtgccggtggatgaaacgtgccggagtgcttgggtgccatcagctatcaaatctgaattctaagcgccatggacgaaggcactggactgcagcccggggcgggagagcagctggaggcgccggccactgcagaagctgtccaagagaggtgcgagccggagaccctcaggtctaagagtttaccggtcctcagcagcgcctcctgccggccaagcctcagtcccactagtggagacgccaacccggcctttggctgtgtggattcttcgggccaccaggagttgaagcaaggcccgaacccgttggcccccagtccctctgccccgtccacttcggcggggctcggggactgtaaccacagggtggacctcagcaaaaccttctcggtgtcctccgccttggccatgctccaggagagaaggtgcctctacgtggtcctcacggattcccgttgcttcctggtgtgcatgtgctttctgaccttcatccaggcgttaatggtctctgggtacctgagcagcgtaattaccaccattgaaaggcgctacagtctgaagagttccgagtcggggctgctggtcagctgctttgacatcgggaacctggtggtggtggtgttcgtcagctacttcggcggccggggtcggcggcccctgtggctggccgtgggtggactcctcatcgccttcggggcagccctcttcgccttacctcacttcatctcgcccccctaccagatccaagagttgaacgcctcggcccccaacgacggcctgtgtcagggtggcaactccaccgccactttggagcctccggcctgtccgaaggactcgggaggaaataatcactgggtctacgtggctttattcatttgcgcgcagattctcattggaatgggctccacacctatttataccctgggaccaacctacttagatgacaatgtcaagaaagaaaactcctccttgtacctagccatcatgtatgtcatgggagcacttggccctgcagtgggatatttattaggtggacttcttattggtttttatgttgatcccagaaatcctgttcaccttgaccagaatgaccctcgtttcattggaaactggtggagtggattcctcctttgtgccattgcaatgtttcttgtgatattcccaatgtttactttcccaaaaaagcttccacctcgacacaagaaaaagaaaaagaaaaaattttctgttgatgctgttagtgatgacgatgttctgaaggagaaatcaaacaacagtgaacaagcggacaaaaaagtttcttcgatgggatttggaaaggatgtcagagacctaccaagagcagctgtcaggatcttaagcaacatgacattcctttttgtgagtttgtcatacacagctgagagtgccattgtaactgctttcattaccttcattcccaagttcatcgagtcacagtttggtatcccagcctccaatgccagcatctacactggggttattatcgtccccagtgctggtgttggtattgtcctcggaggctacattataaaaaaattgaaacttggtgccagagaatctgcaaaactagcaatgatctgcagtggtgtgtctttactatgtttttcaaccctatttattgttggatgtgaaagcattaatctagggggcataaacatcccttatacaacaggaccttctctcaccatgccccataggaatctgacaggaagctgcaacgttaattgtggttgtaaaatacacgagtatgagccagtctgtggatcagatggaattacatactttaacccttgtctggctggctgtgttaatagtggtaatcttagcactgggatacggaattatacagaatgcacctgtgtccaaagtcgccaagtgatcactccacccaccgtgggacagcgaagtcagctccgtgtggttattgtcaagacttatctcaatgagaacggctatgctgtgtctgggaaatgtaaacggacctgcaatactcttatcccattcttagtttttcttttcatagtcaccttcatcacagcatgtgcccaaccatcagctatcatagtaacactcagcatacattcctactccaatctactttggagcagtcattgacaccacctgcatgctctggcaacaggaatgtggtgtgcagggttcttgctgggagtacaacgtgacgtcgtttcgttttgtgtattttggtttggctgccggcctcaaattcgttgggtttatttttatttttctggcctggtactccataaaatacaaggaggatggactgcagaggcggaggcagagagaatttcccctgagcaccgtgagtgagagagtgggacaccccgacaatgcccggactagatcttgcccagctttcagcacccagggagaattccacgaagagactggcctgcaaaaagggatccagtgcgcagcacagacctacccggggcccttcccagaagcaataagttcctctgcggacccggggctggaagagagccccgctgccttggagccgccctcctgaagcttgaaaatggaagaatttagttttgttggttgaattgaaaatggcgacttgagaaacaactgtgccttcttttctttctttcttttttttaacctctacagacacaatcctcaaaccaacaaaactcagtatacacagccgctattcattgagggctggatacctcaacaagactgagagcctttccccgcttctctccaagaaggagacgttcagctagatttgttcccatttccgttgtgttaattcaaagctcatgctcccctacggtacaggctgaggtacacggttagcaaaaccatgggaaggggaatggcggtgcatatcattaactaacactccaaacaaaggtgagcttgcccaggacttggcatttccaaatcaaagtttttagatatgaacacctactgtgagttctgctacaaagcacaaatgaatttgtctcaactatgcaatttgattggaaaaatgtatgtgcagcatgttacatttactttcacggaataaagcagatatgtttctgaaaagaggaaaaaaaaaaaaaaaaaa

SEQ ID NO: 333 - DNA, 2345 bp, Homo sapiens
cacatagctagtaagttctagctagcactgagtgctgtgcccgtgaaatttatctacataggctttcacttaacctgcagacagaactcagttagtcggggacaatttccctcaatgttaacagcactgttccaccgcaacgtggaacaacagctttaaaacgtgctcttcgtaggcccggctactccaagaacagtgcctcccgccagacccaggcggcttccttcacccgcaacccgagagacgacccgccgggcccgccccgcggaagccgccggttgccaggccaaggagtggactagggtcgccggggaagcggtttgggagagcccatggtgactgcgtgagtggagcccagctgtgtggatgccccagcatggatgactacatggtcctgagaatgattggggagggctccttcggcagagctcttttggttcagcatgaaagcagtaatcagatgtttgccatgaaagaaataaggcttcccaagtctttctctaatacacagaattctaggaaggaggctgttcttttagccaaaatgaaacaccctaatattgttgccttcaaagaatcatttgaagctgaaggacacttgtatattgtgatggaatactgtgatggaggggatctaatgcaaaagattaaacagcagaaaggaaagttatttcctgaagacatgatacttaattggtttacccaaatgtgccttggagtaaatcacattcacaagaaacgtgtgctacacagagatatcaagtccaagaatatcttcctcactcagaatggaaaagtgaaattgggagactttggatctgcccgtcttctctccaatccgatggcatttgcttgtacctatgtgggaactccttattatgtgcctccagaaatttgggaaaacctgccttataacaataaaagtgacatctggtccttgggttgcatcctgtatgaactctgtacccttaagcatccatttcaggcaaatagttggaaaaatcttatcctcaaagtatgtcaagggtgcatcagtccactgccgtctcattactcctatgaacttcagttcctagtcaagcagatgtttaaaaggaatccctcacatcgcccctcggctacaacgcttctctctcgaggcatcgtagctcggcttgtccagaagtgcttaccccccgagatcatcatggaatatggtgaggaagtattagaagaaataaaaaattcgaagcataacacaccaagaaaaaaacaagaggaagaacaagatagaaagggtagccatactgatttggaaagcattaatgaaaatttagttgaaagtgcattgagaagagtaaacagagaagaaaaaggtaataagtcagtccatctgaggaaagccagttcaccaaatcttcatagacgacagtgggagaaaaatgtacccaatacagctcttacagctttggaaaatgcatccatactcacctccagtttaacagcagaggacgatagaggtggttctgtaataaagtacagcaaaaatactactcgtaagcagtggctcaaagagacccctgacactttgttgaacatccttaagaatgctgatctcagcttggcttttcaaacatacacaatatatagaccaggttcagaagggttcttgaaaggccccctgtctgaagaaacagaagcatcggacagtgttgatggaggtcacgattctgtcattttggatccagagcgacttgagcctgggctagatgaggaggacacggactttgaggaggaagatgacaaccccgactgggtgtcagagctgaagaagcgagctggatggcaaggcctgtgcgacagataatgcctgaggaaatgttcctgagtcacgctgaggagaggcttcactcaggagttcatgctgagatgatcatgagttcatgcgacgtatattttcctttggaaacagaatgaagcagaggaaactcttaatacttaaaatcgttcttgattagtatcgtgagtttgaaaagtctagaactcctgtaagtttttgaactcaagggagaaggtatagtggaatgagtgtgagcatcgggctttgcagtcccatagaacagaaatgggatgctagcgtgccactacctacttgtgtgattgtgggaaattacttaacctcttcaagccccaatttcctcaaccataaaatgaagataataatgcctacctcagagggatgctgaccacagacctttatagcagcccgtatgatattattcacattatgatatgtgtttattattatgtgactctttttacatttcctaaaggtttgagaattaaatatatttaattatgattta

SEQ ID NO: 334 - DNA, 4364 bp, Homo sapiens
acatacacacacgcgcgcgcgcacacacacatacgcatgtacacgcgcacccgcacccgcgcgcctgtatcccgtgctgtttccctggcagacacacaggcgctcacgagtctctccttgccagcctgcagggcggcgacccccaaaacccagctccgggtcccaacctaggcaagaagctgcttctctgccaacagctcctcttcggcctccgtcacagccacctggaccctaccctttcgcgactgctgctgctgctgcccggacgtggaagcagcaagaggcgcttggtcaagacacactgacggtgcatatcttttaccatatttaatactacttatggtaataggtattcccctttttttcttggaactctctgtgggtcaaagaattcggcgaggcagcattggtgtatggaattacataagccctaaactgggcgggattggatttgcaagttgtgtagtgtgctattttgtagctctctactacaacgtcatcattggctggagtttgttttatttttctcagtcttttcagcaacccctgccttgggatcagtgtcctttggtgaaaaatgcttcacacacttttgtagaaccagaatgtgaacaaagttctgccaccacctattactggtacagggaagcactgaatatttcaagttccatttctgaaagtgggggcttaaactggaagatgaccatctgcttgttggctgcctgggtcatggtttgcttggctatgatcaaaggcattcagtcttctggaaaaatcatatattttagttctctgtttccatatgtggtacttatttgcttcctcatcagagcattccttttaaatggttcaattgatggcattcgccacatgtttacccctaagcttgaaataatgctggagcccaaggtctggagagaagctgctactcaagtgttctttgccttaggtctgggatttggtggtgtcattgccttttcaagctacaacaagagagacaacaactgccactttgatgctgtcctggtgtccttcatcaattttttcacttctgtcctggcaacattggtggtgtttgcagttctgggcttcaaagcaaatgtcataaatgagaaatgcattacacaaaattcagagacgatcatgaaatttttgaaaatggggaacattagtcaggatattattccccatcatatcaacctttcaactgttactgcagaagattatcatttagtttatgacatcattcaaaaagtgaaagaagaagagtttcctgctcttcatctcaattcctgtaaaattgaagaagagctaaataaagctgttcaggggaccggcttagcttttattgcctttacagaagcgatgacacattttcctgcatctcccttctggtcagtgatgtttttcctcatgctggtcaatctaggccttggcagtatgtttggaaccattgaagggattgtcacgcctattgtggacactttcaaagtgaggaaagaaattcttactgttatctgttgtcttctggcattttgtattggcctgatatttgtgcaacgctctggaaattactttgttacaatgtttgatgattattctgctacactgcctctgctaattgtagtcattttggagaatattgctgtatgctttgtttatggcatagataagtttatggaagacctaaaagatatgctgggctttgctcccagcagatattactactatatgtggaaatatatttctcctctaatgctattatcattgctaatagctagtgttgtgaatatgggattaagtcctcctggctataacgcatggattgaagataaggcatctgaagaatttctgagctatccaacatggggactggttgtttgtgtctctctggttgtctttgcaatactcccagtccctgtagttttcattgttcgtcgcttcaaccttatagatgatagttctggtaatttagcatctgtgacctataagagaggaagggtcctgaaagagcctgtgaacttagagggcgatgatacaagcctcattcacggaaaaataccgagcgagatgccatctccaaattttggtaaaaatatttatcgaaaacagagtggatccccaactctggatactgctcccaatggacggtatggaatagggtacttgatggcagatattatgccagatatgccagaatctgatttgtagctgggggaaaagtcagtgggttttatttggttcatttttaccaatgaacattggccctagtaggagaagcattaggcttcacttatcagagggcaatctcaggtgttccgtggctgtgatctttaatcctaacagtatatgtcagttcaacttgagcattcttttggattctttggtttacatttgtgcagaaaggattgcagacaaatcttaggagggctgaggtacatgtttgccaggatttttttttaagtacctttggtgtattttcaaatatttctatctcttaaaaaaatggtattacctcagtttctaataatttctgggtttagtagtgttgacaattaaaaatggtatacattaaaatttataagtttgccttcagggtaacttccagtgtcacaatgagcagttctgtaagtgggtgcctctcagcacatttctatgaatatattatgtagataggctgtattgattttggtagcattgacaccttcttaggcaattagttgaagaaaactgcaaaatattttcttatgtaatagctgtatagagcaatagcaatcaaagcatgagaaggcactaacgctgggatgaaagatgagattcagaggtgactgagaatcatgtgagtgatggctgtatattttgtgtaaaatatatgtgtgaaaatgaactaagagtgagttactcagcactctcaagaattatgcagattctgcatttttcttatgccgtgtgcctaaaaacctacttgatatttattgtggtttcaagattattcatagtatatttatacaatatacttgcaatgcatttaagtacttaaagtactaatttgaaaacttgaagcaagatggcattttaattaatatatttctgttttgcttctgttttatgcaaatataaatcatttttaagtgattgttaaaattgtaatgcattacattttaatctacaaataaacaaagtttaaaaatgatgtttgtttttcacattgattttctttgtatcacctgaactggattgtctttcatttcagtcagcacttagacatttcataataactaaacatcacattccaagtgggatgaattacattaattgaatagagttaccaccgcttcagagtctaaggaaaaatagagtattatggttcaatggtgttcttatgtagtcttatgattcttgaaaaagtacttacagcctcccaagaaaccatgtgtacaattgactgcttgctgattcaatattgtctgcaaagtataaaagactatgatttttaaataaaactgttgtatatatgaaattggatagagcagaggaacctcactgagtgtcctctagttaaaaatctttcatttatcctaccaccagatcagttacatttttaaaacaatgatggatatagcagcaaaataagtgaggtaatacacatgccatatcaattgatttatttcagccagtattctcgctctgctatagatagatgttaataaatggtatcacagcatttaaagtattaaatccactggtgcataaatttttagtcttttaaaatatattcatgaatattgtgtttgtatccctttaaaatgtttaatattttataaataggcagtatatgcacattatacaaaactaaaaaattatgacaattcagtgtgaagtaagttctcatccaacatttctcctggccatccattctccatctttaaaggcaatcaccattgccagtttcttctgtatccttctggaaatacaatatattacataaatgacagcattctatattctctcttctatatcttacctatttctgtgaataatttattttggacagcattttatgtatgaatattcacaaatgtgcttccttatttcagaggctgaactaataaaaattttgtttatttttgtgttgaggcaatatttttatatggtaccctaatctttaatacttaacctgccagactttaaccgtaacacaataatgtattgccaaatagcaccattcttcttctctcactctcttgccatgggggctcttaaaaaaaaaagtatacatctaaggtgtacaacatgctgttttgatgtatataaatatagtgaaagcaaataaagtatatatctaaggtgtacaaaaaaaaaaa

SEQ ID NO: 335 - DNA, 4420 bp, Homo sapiens
ggcggccccctagcgtcgcgcagggtcggggactgcgcggcggtgccaggccgggcgtgggcgagagcacgaacgggctgcctgcgggctgagagcgtcgagctgtcaccatgggtgatcacgcttggagcttcctaaaggacttcctggccgggggcgtcgccgctgccgtctccaagaccgcggtcgcccccatcgagagggtcaaactgctgctgcaggtccagcatgccagcaaacagatcagtgctgagaagcagtacaaagggatcattgattgtgtggtgagaatccctaaggagcagggcttcctctccttctggaggggtaacctggccaacgtgatccgttacttccccacccaagctctcaacttcgccttcaaggacaagtacaagcagctcttcttagggggtgtggatcggcataagcagttctggcgctactttgctggtaacctggcgtccggtggggccgctggggccacctccctttgctttgtctacccgctggactttgctaggaccaggttggctgctgatgtgggcaagggcgccgcccagcgtgagttccatggtctgggcgactgtatcatcaagatcttcaagtctgatggcctgagggggctctaccagggtttcaacgtctctgtccaaggcatcattatctatagagctgcctacttcggagtctatgatactgccaaggggatgctgcctgaccccaagaacgtgcacatttttgtgagctggatgattgcccagagtgtgacggcagtcgcagggctggtgtcctacccctttgacactgttcgtcgtagaatgatgatgcagtccggccggaaaggggccgatattatgtacacggggacagttgactgctggaggaagattgcaaaagacgaaggagccaaggccttcttcaaaggtgcctggtccaatgtgctgagaggcatgggcggtgcttttgtattggtgttgtatgatgagatcaaaaaatatgtctaatgtaattaaaacacaagttcacagatttacagtgaacttgatctacaagttcacagatccattgtgtggtttaatagactattcctaggggaagtaaaaagatctgggataaaaccagactgaaaggaatacctcagaagagatgcttcattgagtgttcattaaaccacacatgtattttgtatttattttacatttaaattcccacagcaaatagaaaataatttatcatacttgtacaattaactgaagaattgataataactgaatgtgaaacatcaataaagaccacttaatgcacgctttctattttattgaactcttattaactgtaaaatgcatttttaaaagatcaaaaatgcatattttctagcatgattcatgtatcagtcagcagccaagcttctaaatgccagatattatattgagaatgtattatatgagaacgtacaatgcttaaagttccggttttcaaacttaggcaggtcatattctatctatcttatccagcattactgtaggctagaaagtgataatggctttcataatcctgccttgtcttaggcactttcctgcagtctttagaaattctaagattctgctaaaagttttaaatcacaatctggagaattttctatgattaggaagtgctctgttttcatccctttagataactgtgacacctagaattttatgttaagtagagagtattcattgaaaatcaaggccaggtgcagtggctcacacctgtcaccccagcactttgggaggcagaggtgggcgtatcacttcaggccaggagtttgagaccagcctggccaaccgagcgaaaccccatctctaataaaaatacaaaaaattagctgggtgtggtggcgcacacctgtaatcccaactactcaggaggctgaggcatcagaatcacttgaacccgagaggcagaggttgcagtgagctgagatggcatgccaccacatccatcctaagcgacagggcaagactctgtctcaaaaaaaaaaaaaagaaagaaaatcagttgtcttagtttaagctactataacaaggtactgtagactgatggcttataagcaacagaaacttatttctcagttctgtagtctggaggtccaagatcaaggtgacactgtggtcaggttctgatgagggccctcttctgggttataaactacggacttcttgtatccttacatggcagaaagagcgacagagctctctgtagtcccttttataagctcactaatcccattcatgagggccctaccctcatgacccaattacctcccaaatgcccctcctccaaacaccaccactttgggggttaagatttcaacagatgaattttgaagggacacaaacattcagtccatagcatcacttatcaagctagtatttaatacctcttaggccccgtggaagggaaaatagataggaacctgccctgaaagatgcttcagttggggagaaaaggtgaaattccattgttagacaatttgtttaagacaatacatcttgcttgagaaggaatagaagggaaatgaaatggggggagggagtggtaggagatggaggctttgaaagaaaataaccagatttagaaacatgggtatagaaagcatcctccagtacttctgtaacaatttatcaagacctacaggaagtcagttttggatttgctcctccgagatttgcgagccagaggaaaatacttagactatcaggttggaaagttcacacttggaccaggaaaagaccaagcagttgctatagtctcctggattgtgactaatctggaggaagcaagtccctgtatccttggcaaagcttgaaaggcaggcaaatgtcttctctgtgttttctgacaggtggttgggtggtgggggttggtctctgtacctcctgttctttaccttgcttaccaagcccttccaccgactcactcctgcctccccagctaaaaattggctgtgttgcttttaccacagttaccaaggtctgagttttataaaatccaggatcacatctgacctcacctggtagatatctaggccaataaagtctaaagggctaaaaagaaggtacctctccatcctgtctcctcgaggccaggcagcacatgtgcagttaagaggcctcctggatccattgtcctcctgttgcttttcgttctaagtgatccaaactctattgctgatagggaataaaagcagggcaggctagtagtgggcaagtgctttgatggagcgtatctccaagcagggcccaagtttaggaggaggaagacctgatacaatgaatgaacagtgcgtcctcccaacccaaccaagaagtgtaattgtgttccgtctttaaccctggcatggaatggggagggaagaggcatggacatttattacatagtgcacattatctacattctctgcatgtgacccagatgtcagcccttccgcttcctgcgaaggttacctctaatgcacgttgccccaggccctgctgagctagttcctcaccgcagctacttaactcaccatgaattcctagaaccctcagcctctgagagtgctgggatctggcgggagaacaggcagtacttccctcactaacctacccgcacgccataccatcattgtgcaaagctgcctcatgctggaaggtctggtttacgtaaaagtgacaagttggaattgagcgtccgactctcgggtacctgccccaggcatttctcatcagccccatttcccacacagctctctcctaggcgcagccctccttcaccaccaccacccccaccccaatcacctttaggtattttctcccctaaagcctcacctgttggcattttacatctttttaagaccttattttgtattttaaatgtatgagaaaaattatggaggatgatgcaagatgagtgagtccataatggtaataattggacactaaaaacaatgaaaacttgtctcaagtatttgtgttgaaatctcaattaactgggcgactgctcccgttccattttattctgtaaaatatgtggcatcctttgtgttgaggcggcatttactaaacacccccaaggtgcaaggctgcaagagaatcgagcgccgcaaggcgagcttatcttccacacctggtacagtgcccaggacagagaaggtgtttagcaagtttctgctgaatggaagagtgagcgagaagggaaagtgcatctaaaaagcacagggaacctacaaaatatttgggaaagggtttcatcagttcgggtgaaatcttgaacgtgcaaagcaccatgggggtggctggacaggcttgttggagtcgtataatgcaatgaataaaaacttacggctgccttaaatgcaaatgtcaagcccttaaataaaatttaacaaagtcta

SEQ ID NO: 336 - DNA, 4821 bp, Homo sapiens
tcctttgggcctagcagggccagagaaagacggaatcactctacccactcaggttgcccagagagcactttaggttctgactcgcgtggggcgcgaggtaccccgtggggcagctaggtgcctccaagaaaccccgccccagaggacccgcacgagttgctgccatttttcgctgaagcccctgccctggggctggtgttcttctctatgattctaccaatcgtcggcatttttttcctcccttctttctttttaggaaggcgctggggtgtgcggcggcaacggcggcggtgaagggatcctcttgtgcccggagaaataggggagtgggggcccaagaacgagaagacgagaacgcgtcgccctgcgctatgtcagaatggggcgggtgtgaggggaacagctctcttgcgatcagctcaggagtatgagcctcccggaggacggcatgagttctggacacttcaggagtcctcagctagtgacatggtcgatatggataaactcataaacaacttggaggtccaacttaattcagaaggtggctcaatgcaggtattcaagcaggtcactgcttctgttcggaacagagatccccctgagatagaatacagaagtaatatgacttctccaacactcctggatgccaaccccatggagaacccagcactgtttaatgacatcaagattgagcccccagaagaacttttggctagtgatttcagcctgccccaagtggaaccagttgacctctcctttcacaagcccaaggctcctctccagcctgctagcatgctacaagctccaatacgtccccccaagccacagtcttctccccagacccttgtggtgtccacgtcaacatctgacatgagcacttcagcaaacattcctactgttctgaccccaggctctgtcctgacctcctctcagagcactggtagccagcagatcttacatgtcattcacactatcccctcagtcagtctgccaaataagatgggtggcctgaagaccatcccagtggtagtgcagtctctgcccatggtgtatactactttgcctgcagatgggggccctgcagccattacagtcccactcattggaggagatggtaaaaatgctggatcagtgaaagttgaccccacctccatgtctccactggaaattccaagtgacagtgaggagagtacaattgagagtggatcctcagccttgcagagtctgcagggactacagcaagagagagaagccttataaatgcacctgggatggctgctcctggaaatttgctcgctcagatgagctcactcgccatttccgcaagcacacaggcatcaagccttttcggtgcacagactgcaaccgcagcttttctcgttctgaccacctgtccctgcatcgccgtcgccatgacaccatgtgagccgcacaggtcacactagagaagctgcgctggtatctttcctggtcgtgtgctgaggttgggacaattttttcctctttgacttcagcttgcatatggggttgaagcagcccactgagccaagttgaggagactggaggaaaagagagctggtctcccgtggggctcttcatattctaccttcacttctccactgtccagacccgtttttttcaacctccacatgggttgaattccagtgtggcacccatggctgccttcccatccccccctgctctgaaataggacatttttcctacagtaacaaaacaggaatcaaactcaaggctgtgaacaaacatacgctgctttattctttccaatttttctcttgttttctagaactcttatccatatgtttttaaaataagtacctaaaagtggtttgatagtgtcctaaacgacttttttaacttcctaaatggaaagagcataacaatgtagttgattggtaagatttacagggatttggtttctgagtttgaggcacattcccagtgaataagctgagtcccataccacactcaaaaggttttaataaatctaatcctatttcttcttaaagtttggttttcagacagtgctggtgcttctgcttcttaagttcatcaagggaatgaggagttcttgtccttctcctcctcttttttttcttttccactttctccttcaggattaaagattttgctgcacaattgttatttgttaggttaaatttggacaaatattcaaagcacacatagacatataagtaaggagaaaaatgttccaggagagtaggttgggcagtgacaggaacaaacagacctaggatgatcctgagaacaaatagaggggttcctttacttgtataggatatcaaaagtgctgttaatcacaaacctcattcaaatggcaggctgtcgagacagtgtcttgaggggctggctgtactgtttattttttcgtttacacaaagaagcaattgagtatattgcatgatgagaaatcacacactagggtcatgttatacagaagtaaggggttggaaaaatggaatgttgttcactccatggaattattggcattcattcctgtgtttcaaatgaaacatagatgcttttcatgaaaactgacctacaaaaagcaatttgatgttctgcaactgctatgaaaacctaagccatttattttagctgatagcagattgcataatatactcatttagctgcccaatcagattgttttataatattacctggggtacaaaatcctctgttcctggccctggaccacagatctacctccacatggcatatttcctttctggggtcaggggtaggggagggggctttgcatcacttgaatttagactcagcctctctttaaaagattgtctttatattgaacacctttttcttttcaaccctgcttgaatactttaggttactatttcctgaggctgtccattctcactatattgtagaattctagcaccaagaagggatcccgttaaccatctagtcctatccatccctcatattttacagatgagacaaatacgggtcagatttttttctccagatgtttctttgagcccttatacacctgcacgcttattctcctggggatcacataattttatttatttattttttgagagacggtttcactccatcacccaggctggagtgcagtggcgtaatcttggctcactgcaacctccgcctcctgggttcaagtgattctcctgcctcagcctcccaaatagcttggattacaggtgcgtgccaccacacctagctaagttttgtattattagtagagatggggtttcgccatgttggccaggctggtctcaaactcctgacctcaagtgatccccccacctcggcctcccaaagtgctgggatcacaggtgtgagtcaccacacctggccaggatcacattattaaaccaaattaaagtttatgtgattggttgcaatatttgtctaattttatatgttttcttcaggaaaactttagaactcaaaaatcatttacagctgattaaatagcaagtaaaatgtacttgtggtcattgccgtataacattaggcacacgcttctaacacttctataatatctagattttatttacctcattttaacttgcaatgtctgtctatctcatgaactctccataaatccaagaactgcctgtagttttcaaaatgacatgtgggtttttactgttatcattgttatttcgatagggctttttcctgattttgggtatacaagttccaaacttgcataataattgctaacgcactaggcgatatctagggccagtctgttaaaggggacctctaatgtagctataagacaggttggtaaagatgaactaacataagtttaagctaataattcagtagttgatgcagtatttcacagtagagcccgagcttactcatttttttcaaaatttggatcctgatactcctttttcagagttcagaactgaactgctcccctaagacctcagaatcttttgcattgagacatatgatctatttataaataaaggttatcaaatatcttgttgaactaattaggttgatcaaattaggatcccaaatattggggtccctgacatctgagcctttatctaaaaatgtttctgtaacataatgacagcctttatgtttgttaattgcctatagtaaagaagcaattttaagcctattctcatttccctctcccctacaaaaaatgataaaagctttccaattacttacatatgctctaacaagtgtctcaggattcattaacagaattttatagagtacagtaattcaaatatagcacagtacagagtttaccaaaaacacataaaactttgctagatagacagtgaggtggaaaggaactaaaatgtatctctcttgaatagcatttggggttcaattgaatttgttgtgtttacaacagcaaagcaccgttagcctggacagttgcttatggcatcgatagggttggataatattctgggatttgttgcagcagaattcctctatctgatgatcagcagttgaacataaacttcataattatagtaaaatttaggaaaaactatgagtgtgaagagtatgaactgattgggtagattaggcagagtgcattatgggcaagacaaaggttttcgatattaacttcttttaaaataaactttttattttcaaacagtttcagttttacagaaaaaatgtgaagctagtacagagaggtctcatttaccccacacccagtttctcctgttattagcatctcacattaatatgtggtatatttgttacaattaataaaacacattgatatgttaatattattaa

SEQ ID NO: 337 - DNA, 2763 bp, Homo sapiens
gcggcgccgggcttcccacggacggggccccgcggggttgcccggccgtgcccgctgtgcccggctctgcccggcgcggccgcggagcgcacgcctcctgcctgctgaccctctcgtttggtttctcgcaggcctctgccgcagacatggagaaactcagcgcgctgcaggagcagaagggcgagctgcgcaagcggctgtcctacaccacacacaagctcgagaagctcgagaccgagttcgactccacgcgccactacctggagatcgagctgcggcgcgcgcaggaggaactggagaaggtcacggagaagctgcgcaggattcagagcaactacatggcactgcagaggatcaaccaggagctggaggacaagctgtaccgcatgggccagcactatgaggaggagaagcgtgcgctgagccacgagattgttgccctcaacagccatctgctagaagccaaggtgaccatcgacaagctgtcagaggacaacgagctctataggaaggactgcaatctagcggcccagctgctgcagtgcagccagacctacggcagggtccacaaggtgtctgagctgccctcggatttccaggagcgcgtgagcctgcacatggagaagcacggctgcagcctgccatccccgctctgccacccggcctacgccgacagcgtccccacctgcgtcattgccaaggtgctggagaagccggaccccgccagcctgtcctcccgcctgtccgatgcctccgcccgcgacctggccttctgcgacggggtggagaaaccaggcccgcggcccccctacaagggagacatctactgcagtgacacagccctctactgcccggaggagcggcggcgagaccggcggcctagcgtggacgcgcccgtgaccgacgtgggcttcctgcgggcccagaactccactgacagcgcggccgaggaggaggaggaggccgaggcggcggccttcccggcgggcttccagcatgaggccttccccagctacgcaggctcactgcccacgtccagctcctactccagcttcagcgccacgtcggaggagaaggagcacgcgcaggccagcacgctgaccgcgtcgcagcaggccatctacctgaacagccgcgacgagctcttcgaccgcaagccacccgccaccacctacgagggcagccctcgctttgccaaggccacggccgcggtggcggccccgctggaggccgaagtggccccaggcttcgggcggaccatgtcaccgtacccggccgagaccttccgcttcccggcctctccgggtccccagcaggccctgatgcccccaaacctgtggagcctgcgggccaagccggggaccgcccggctccccggggaggacatgaggggccagtggcgtcccctgagcgtggaggacatcggcgcctactcctaccccgtgagcgctgccggccgcgcctcaccctgcagcttctctgaacgctactacggcggggccgggggcagcccgggcaagaaggccgacggccgcgccagcccgctctacgccagctacaaggccgacagcttctccgagggggacgacctctcccagggccacctggcagagccctgcttcctgcgggcgggcggcgacctgagcctcagtcccggccgctcggctgacccactgcccggctatgcacccagcgaggggggggacggggacaggctcggggtgcagctgtgtgggaccgccagcagccctgagcccgagcagggttccagggactccttggagccgagctccatggaggcctccccggaaatgcatcctgccgcccgcctcagcccccagcaggcctttccgcggactggtggctcggggctgagccgcaaggacagcctcaccaaggcccagctctacggaaccttgctcaactgagcgcctgcgtgcaggcctggccgtggttcgctccccgccagcccacgtgccccagaagggccggcctcacctctccccagcccccgctgttcccctgccccggccaacaacgaggagtctgttcctccccgcacctcctctcctccccagccctgtaggcctgaggggagggtcccccacaccacggtgtccacccggccccgccccgtggaactccacttagagcgtttttcacgcgtccttcccccatgtgagaggagcatccccccttttataaagcgaaactatttttatagagaaaaagggtctttcttaacgcacttggcctccagctccctggacggctgccttggcgttttcaacacaaagctcctttattttttgggcgagggtgcgtggggcctgccccttggaagggaagggaaggacggtgtcctgtggagaccagactctgcaagtggggagaccacccccgcaagccagtgacaagggagccctgaagttgtgtccacgaagagggagctgaaacaaattcggggctatgaagtgttttaaaaatccattcttcgcagtgtggccaccacaccgccctgagccctcccacggcccatcgtcccgggtgggccgggatgatgccccagtgcggccggtgctcatctccgcccccgggtccgccccctgacaccgtcttactctacctcagacatgaggaggccctccattcctggtttctgtagcttgcattcttgttgtctctgatgcatgccctgccagttagtactgtattttgcattcattaataaaagacaccggtggaaagaaaaaaaaaaaaaaa

SEQ ID NO: 338 - DNA, 8779 bp, Homo sapiens
gcgatgctcggggaaagcaggaccccaaagccccgtaaacaccgcgcgaccacccgggccaagatcttcaagaggttcttttcagaaggatcggagagcaattcccgattggtagaagaacttgctgtaatacacacgtactctgacgaccccgccccaacgactagcccctcctctgtgcaaccccgagagtttggggtcatgcagggggcgccacgagctcgtttcggaagccggaccccgcccgcagccgcagaagcctcgagtccacatctgggtctctaaagtctcgccgtagccagatcccggatccccaccttcttcaccagttcccgggcgtcctccaggcattggcgaggcagcctgtcaatcaggagctcgggcggcagccccccgcgcgggggctcggcgatgccagcctcagcgacaggcggcggcggcggcggccacggcacagacacacaccctcccacacgcgcgcaccagggcagacccggcgggcaggcggcggaggcaccctcggagcccggcgcccggcggggaggggacgtgctccgagggaccggccccgaggcgccggatggaggaagagatgcagccggcagaggaggggcccagcgtccccaaaatctacaagcagcgcagcccctacagcgtcctcaagacgttccccagcaagagaccggcgctggccaagcgctacgagcgacccaccctggtggagctgccgcacgtgcgggcgcccccgccgcccccgccgcccttcgcgccgcacgccgccgtctccatcagcagcagcgagccgccgccgcagcagttccaggcgcagagctcctacccccccgggcccggccgggccgccgccgccgcttcgtcgtcgtcgccgtcctgcacgcccgccacatcccagggccacttgaggactccggcgcagccgccgcccgcgtcccccgccgcctcctcgtcgtcttcgttcgccgctgtcgtcaggtatggcccaggcgcggcggcggccgccggcaccggcggcacgggtagcgacagcgccagcctggagctcagcgcagagagtcgaatgatcttggatgcctttgcccagcagtgcagtcgagttcttagcctcttaaattgtggaggaaaactcctggactccaaccattctcagtccatgatttcttgcgtaaagcaggaaggctcaagttacaacgaaagacaggagcactgtcacattgggaaaggggtccacagtcagacctcagacaatgtagacatagagatgcagtatatgcaaaggaaacaacaaacttctgcctttttgagggttttcactgactctctacaaaattacctgctctcgggaagctttccaactccaaacccctcgtcagccagtgaatatggccatctggccgacgtggatcctctgtcaacctctcctgtgcatacattaggtggctggacttccccagcaacgtccgaatcccatggccacccatcttcatctacactgccagaagaggaggaggaggaggacgaggaaggctattgtcctcgatgccaagagctggagcaggaggttatttcactgcaacaagaaaatgaagagctcagaaggaaattagagagcatcccagtgccctgccagaccgttttagattacttgaagatggttctgcagcaccacaaccaactcctgataccacagccagctgaccagccgacagagggaagcaagcagctgttgaacaactatcctgtctacataacgagcaaacagtgggatgaggctgtaaattcttcaaagaaagatgggagacggctccttcgatacctcatcagatttgttttcacaaccgatgagcttaagtactcatgcggccttgggaaaaggaaaagaattcattaggatgcattgtacctccaaccccgattggtggatgccctcggaagagcagataaacaaagtgttcagcgacgctgtcggtcacgcccgacaggggcgggcggtggggactttcctgcacaacggtggctcattttatgaagggatcgatcaccaggcttctcaggatgaagtcttcaataaaagttcccaggatggatctggggattagtggacagaatcttcctgttgtagcagctggtcctctcaagagttccaattgtgaatgtcctgttcctgtcacctgagagtccaaagcctgtcattctgccatagtctacacattctcagctgccacagtacccaaatagaaatccattttagggttgtttgggaagtctgtggcacctacaacagacttttggaatattatattataaaaagaaaaaactacatctgatttttaaatgattactagctagatcatgagggtgaaaaaataggtgagctcctagttacctttctgaaatcttcaaactctgctacctgggcagagatagtccccaaggtaggctggggtagtgtttctgcccatgggagaaggtggagacatggagttgtgttaagggacaagaagcaaacattctcttaattcaaataagttgtctttatgttttccaaagacttgacttcatatttctcggcaaagacataggatagatgacatcatataccattttgacattaataatgtctattactaaaaggaaaccagagaacagaggcaacatctgcagacagtgattaattacaggtcaactgtttttctgttgtttaaaaaccactgtgttgatcaagaaggcactatttgatctctggagtttacaaacagtagtcatttttcattgttagtcaagaaacatccaaagatccaaaaccattttcaaatgctcagttttgtaggttaataaatccgcagtttccatagccttaaatcaggctttgttgacacaatgccaaagtgatgggtagaacaatgaaaatttaaagcaattagttgtttggtgcactgaagaccaaacaagtggtgtgactgatggtattcgctgaattgactagatgttctggcattgtatacacacagcttcaaggcgattctgacaactatgcaatgggcttgtcagtaattgctctgaaatttgagggtctttctctgctgagctgatctttagaatttgtatgaaacttgtttcccattgtccttgatgaaaacatttcatcccctccgtgcctcctttaccccaatgtaccccttagctatggctaagtcagcactgtgccgctatcccctggttaatttgttgagttccatatgtgaaattagtggtatctttggaaactttccatattggcaaatgctatagaggtgctagagtcatcatttctgagggcttcctgtttggactcaggagaggctttctttaccaaactagtccagattactacattctttgtagagcaaagggctaaatggacagcgtttattgaaggctactaatgtcatctacagacatgaccaagggtttttgaaaattggttggagattcaggttaatgagcatccattgataaagggtttttgggctatttttgtcaacataaactcataaattgtcctttagatttaatatttagtttgtattcactatatacaaagtcctagaaacaggtctttctgtagcttttgtttattagcttttttgtattactagaattcatccattgaaaagtttaatgtttatggaggtggtcatctgtcagatctgctcaatgatgtagtgggcactaatatttcaatcctgttttgagaaaattaactaaaatttgtcatatcattcaatggaatagggagaaccaatattcaattctatttggggcaaattagctaaaatttggaagtaaaagaaatgatatgggcaaatgccatgttcttacggcagccatgagaccagtctctttggctctccaaggaagaaagatacctcttaaagcattttttagaggtccgagaagtcagtgtctgtcttataagattctttgacaacatgacatcttcgctagaagaaaaacaccaccatagcctcatctgtttttccatcttaccttaatttttcattggccttaagttgtccttactgctgaatacatcgttctgtttttctaaagcaacaatatttgatcactgcttttaagaaaaacagactagcccttcttgtttttctggaagtttgagagtcctgaatatttcttcatatccaaatatcatcttggagccctatcgtgctggtcttcgctgaggctgatgagagcactttctgcacccctgctccatggccgtacatgacaacgcacctgcaccactgctgcaagggcggggggcagcagcctgtgttttggctgtcactgttacctcctgagaaggctgctgtcccaggtttgcacaccacttttgttccaaagttacacatggtctcttcctccctcgcacccattccaggttaatcatttctctatcagctgtttctccatccacagattctgaatgttgagactaattgttgggcatctcttttgcacaaggctgacagactccatactcagcatcgcacagccagttctaactcctctgctgggtctcggacctacagcttttgcctgagtgaaatgttcctacgacttttgctcctgagtgagatattccattgtacttctactgtttgtgtatctgctgggttcctttagccaagcctagcgtctgacgcaggcactagccgccactgaggccgtgatacagcatcactgtggacactgctggctcctctccttgggacatatccacactgccccttgagcttcacctttaaggctggtatgtacgtaagttcacggtggtcgtctgcatggtctcctcttgtttaaatcaggaccaacaaaggatgttcatttgtattttggcaaggcccattgggcctctgtgtagccaggttaaaagctcactcactaggatcggatgctgtcattgctctgtgagcctttcagttgaaatccttggagacttgaaggtgttgcttattattttgatttgattttctgcatctttatctggcaaatggacagattgctctcacaagaaacttagtcatgtcagcttttagagtccttcttgagtcatgttagcattggtagtgtaaaatagattgagttaaaacagctcaggatgcagctgtgcccccacttaattggtgagaggaggaggtcacggggctggcttgacaacaaagactaaatgtggcttttttgtcggtgactaggtgtggtccataagcagaagagccatacctacaaaaagtgacaactgtcctgtgttttccaaattaaaatcttgttacaaagatcatgccggcttttcgcagtgagttgaagccccaagctcagttccagccaggctcaggatgaccctcaaatgatatgtattggatagtgtaggtcaggagcctgtggaggggaccagtattttgcaagcagttactaaagtcacatttctcactgactcttgacggtgcattgttcaaaatctcatggcttaaccttagtgttaaatgctttcaagaaaaactgtaaccatttcaattttacaagtactttctcattttacttgaacattttacaagtactttctgtatttacttgtaaatatttcctctagcccttgaacccgcgcatcacttttttggttttcctcattccaccacagcatttaggtgaccgttaccatttatgtttcattaagcttcactaggaatgtaaggataatattagagcatttgcagaaaattgttatctccttttgtaggggattcgagacatatttgtagctacttcacggctgtagagttagtgggtgatcgggtattctgcattgttccttatccctttgtcagtgacagacacattgacataagagattcctacaggattataaggagagataaattattaaccatttttttacttgatccaactactccatgtcccatcaactagtggtaactgatgttgataggattttttttaagtccagtaactattcttgcagtatcagatgtttaccccaaattaggcaataacccagacttcgaatctgtaggtttatgattcctacattcccctgccgctctcaatggcttgttgcctcccttctgttgctctcagaaaacagatggagatcaggtaaagatgaaacgtgcactatatgttcagaaaagcaaacatccattgtcctcatttagattccatccttcaatttatgctctagaacctaaacctaatacccattgactacctcctgagtttcttaggtttcaattatttttttgaaatgtcatccatggataatagcttcaattttaggaaagatttaaatgtataactttcctcattcagtgctgtgtcatttcacagtacagatctgcgttaatttttgacagctcatatatacagatttttagaaatgtaatagaaaatgattttgcacatatggtgcaagtcttgctggtgtatgtttaatgtggcaacacgtgccagaactgtttggcaaaacatgtcaaatggagtgcttgagtcagaactctaatgtaaatgtgtctaaacagcagtatgtatcattatgatgtatttttgtaaacatagtgatggctgctttcagtcatgtaagtgctggataaaaataaccacttcagttggagtaatgtaggaaaacgtcacccagcagatgggtagtcctctgcaaagttacactgtcagccagtggcactggttcttttatttatgttgggtttttgttttttttttagaggagagtgaagaattgacatcagacaacatggagtgcaaaaataataacccatcaatatttgccttctaaatgtaaaatgtaaaagtttaactgatctgtgtacacattagagaccactttcacacgccacaatatgttcagttgcaggttaacactgagaggttgagacttccctcatctgatgaccagcttggttaatttgacttctgaaggcactaaattaccaagtatttgcagtaatggggaccggattaattttcctcacaattctctatagctgtctgatataagggctgtgtttttattgaatcacagatcctcaaattacagtgaaagcatgtcttgctagtaagactcatttgaaaacctctttattcttggaataattgggccagtacaagtggccagatgtatcctggccacattggaaaactatttgggcccgttcagaaccacttaactgcaacaacagtagtaactatagttaatatctatctattgagttattgtgtgacagttacttggataagtactttaatgcattctcattttaatcctcacagctaccctatgaggctgttactgttcttatccccattgtattgataaggaaactgcccagggtactcagctaagaagaggattgctttgggcataggaagcagaatgacgagttcagtcttcctcagtagttggagcacagttctcaaagcccatcaacactttggaatggatttgttgttttatttatgccatcaagggagagttgatatttgtgtattgctaaaaactactaaagtatgtcgatgcttaggtaggaacatacaaaccatatatcctctgggatctgcccaggtttctgtataaggcttgacctacgtaagatcctatgatgaagaccagaaaactttttttaaaagtaggtaaattaaaattaaaatcacgagtttgttcacatttgtcccataggttcctagtgcaaaaatgcagggagataaaagcaaacatttgaactcagtgaagtgagagtctttgggaactcctagatgttagaaatagcaccggggcatcaggtagccaacgttcaattcacttttcacgtttgtgtctttgtagctttagagctgatgagtctgattggtttggaagagagagttttaatttatgatgtcactgtgagaactgttgtgaaaattttgtaagaaaatacagtaatctgttgattttttcctgtagttttggctttcacatccctttggctgtgtttaagttcaagagcatgccaaggccatgagggtcctggcttgcacttcttgggaacagggcatgctagaggtgggtcatgaagctttcaaggtcactgttccagcccgaccctgcgcaatttaggcattgcctttatgtctctcctctctggaacttcatgtagcagcctaacaccggggccgagttgcctttactctattttctatgatgaatacttgtggagaaactgtgacaaatccattgatcctgatatttttattgttggagtcttgttgattctctatgaataatttctatttgattgtactgtgtagagttaatacccactagggatatgttaataaagctacaaatgcatagtgtaatatagaatagcaagatttttttgtgaacaatttatatagaagagtaagttgttttttaagtgttaggctcatttcttttagaaacttaaaatgttataaaagttttttaaacattcaatatttttaattataagagacatttgttactagagccaattatttcaggtgttctaattggagtgttgattttattacctcatatacctctagaatgccacgtgttctgttggggataaaattgcacaataaatgtcaagtctctgttaagtgttttaacttggtttttgcatctttctaattcattgtaaatacttttctgtttctttgaatacataacttttctctccctgaa

SEQ ID NO: 339 - DNA, 6774 bp, Homo sapiens
cggcgtgagcttcggccgccattttacaacagctccactcgcgccggacacagggagcagcgagcacgcgtttcccgcaacccgataccatcggacaggatttctccgcctcagcccaacggggagggctagttgcacatagtgatttagatgaaagagctattgaagctttaaaagaattcaatgaagacggtgcattggcagttcttcaacagtttaaagacagtgatctctctcatgttcagaacaaaagtgcctttttatgtggagtcatgaagacttacaggcagagagaaaaacaagggaccaaagtagcagattctagtaaaggaccagatgaggcaaaaattaaggcactcttggaaagaacaggctacacacttgatgtgaccactggacagaggaagtatggaggaccacctccagattccgtttattcaggtcagcagccttctgttggcactgagatatttgtgggaaagatcccaagagatctatttgaggatgaacttgttccattatttgagaaagctggacctatatgggatcttcgtctaatgatggatccactcactggtctcaatagaggttatgcgtttgtcactttttgtacaaaagaagcagctcaggaggctgttaaactgtataataatcatgaaattcgttctggaaaacatattggtgtctgcatctcagttgccaacaataggctttttgtgggctctattcctaagagtaaaaccaaggaacagattcttgaagaatttagcaaagtaacagagggtcttacagacgtcattttataccaccaaccggatgacaagaaaaaaaacagaggcttttgctttcttgaatatgaagatcacaaaacagctgcccaggcaaggcgtaggttaatgagtggtaaagtcaaggtctgggggaatgttggaactgttgaatgggctgatcctatagaagatcctgatcctgaggttatggcaaaggtaaaagtgctgtttgtacgcaaccttgccaatactgtaacagaagagattttagaaaaggcatttagtcagtttgggaaactggaacgagtgaagaagttaaaagattatgcgttcattcattttgatgagcgagatggtgctgtcaaggctatggaagaaatgaatggcaaagacttggagggagaaaatattgaaattgtttttgccaagccaccagatcagaaaaggaaagaaagaaaagctcagaggcaagcagcaaaaaatcaaatgtatgacgattactactattatggtccacctcatatgccccctccaacaagaggtcgagggcgtggaggtagaggtggttatggatatcctccagattattatggatatgaagattattatgattattatggttatgattaccataactatcgtggtggatatgaagatccatactatggttatgaagattttcaagttggagctagaggaaggggtggtagaggagcaaggggtgctgctccatccagaggtcgtggggctgctcctccccgcggtagagccggttattcacagagaggaggtcctggatcagcaagaggcgttcgaggtgcgagaggaggtgcccaacaacaaagaggccgcgggcagggaaaaggggtcgaggccggtcctgacctgttacaatgaagactgacttgctatgtgggattacaccagaagcttgcagtggagtaatggtaaggaaatcaagcaaccttaaatatgtcggctgtataggagcatattctattgcagaagaccttcctatgaagatcatggaatcaaatacgggacattgaactaatacttggactttgatatgaatttctttaacaattttctctgcagtgcaagttattaaactaaagctactctattttcaaaatgtgttccaacagaaatccttcataactcctagcatggtatcttaataaagaataaagttcttttaaaaatctgctctaagtagatttttccccttttttaaattaaggatcccaacagtggtattttgaaatattctcttgaatttgtgcatttaaattttattgcagtggtatagatgaatgccactgatggtatccttaaattttatttctgctcaccaaggttaatcatgattgtctatatcttttttatagtgatcacttttgaattgtgttcagatatgcagtttcaggtgtaatcatcagagctggttagtcaggcattccagatagtggttcttttcagaacctttttaaaagggttggttaactacctcagtagcagaggattgaactataccctgtctgtactgtacatagaaaatctttgtagataaaagcaaggcttgttaaatatgatatgagggtaagattttaatataccaaatgtaacattcttagttgcctttagtttcagaggcttgtaagacttcctcatgaccatcataacaggccttgcttttgtcgtattttgtggctgaaaaagcagccttgcttcttcagatattgtagttatttggatgtataatagtttagcaagatgttacttttgtaagacatcagatgttcaaaaaagtgcatccgaacttgtactaaatactgcagtgtccctttataaaaagtcagactaaaactgacaattgtacagcgaagcctgacatttggatattttgaagttttttcataaatcatagaaattagtatatggctgtagtttagctttttaggtaaaaggtatgtttcattagtgcatttcttcctgctgatcactgtaaacatgtgaatcagctttccatttcttatgcaggtcatgataacttgtagagtagagtacaatcatttgtgctatgtttttaattttctaaagcaccttgatgacagtgagtgtccagtggtgaagcatcctctattgaaccaccctcaaaaatttttttgccaagtcctaagttgatagcttaaagtaaaaagtgaaaattatagtttcattaggacttggtgtaaagaaatcccctccccccttccccaaagggatactgcagttatatcacatacccaataggcaccacgatgaagatcagagcttatacttaattaaggttttatacacaccagttccccagtaaatgcaaatttaacaagaaaatcagacatgtcatatgttcaaaatgctcatggcaaacaatcattttgcattcctgcaaataaaattgttttatactgtaagctggaggcgagtgtaacttatttttgtaataaagtttttattttttttatgtgtcattaatataaatgtgtgttagtgtagaaatcttctggtttaaaaacttagaattgcacacatttcagtatgtttatttgtacttacataattttagaatagtggttgccaatagcctgtatgtttcacattaattggttttttgttatctaaataaatcattttagtatgttgtatgtcagttactgggatagctgggacatagagtgtaatttaaaatttgtcaataagtattcattggaatatatgtaaatgtgccttgccggttattgaaacttatctacaaaatgagtatggggtgacaaaaattagttcctggtgcttaatgaaactttctgccactgattttatatattaccccgtgcttttttaaagtacatctctctcaaaacttagtgtaagtttgagggctacacaaaacatttacatttcattctaacataatgaatataataggttgtggaaagtgggtaaactaaatgtagccttcagtaaaattgaatctcagtgtaatccttggtgctggcatttctcagttccgaggagttaaatgatcccatctaagaggtcattgccatgcctattggcactttactgtcatagcatttttaagggacactgtcaaggtgtttaagttctcagaattacttgttgggattttaggacaggtttgtttacttaaagtaagaactgcattgtcaaagttgaaagaggaacacttttgtgagttcacaaatgtgttcttaagaaaacattaaaatatggagctctgggttttcaagactatttggcattcttaatttggggacttgggagggaaactgataaaaagaaattgaagaattgatggttatacttaaagaagggtaatgtaaacagtggtgatgaaatatatacacatcaagtgaaattacttgacagtgttcatttgaatgactttgaattcaagccattataattacttttaaaattaaatatcatttgcactgttctgataatgggtgcagtttttgagcaatataatcagagctaaatatgcatgtagtgattagtgatgtgaacaattaacgttctgagaagaaatactaactgtggtattttcaaacttaaatttctgtagtaaaatcagtatcaaagtcttatcagatcaaggaaaaacaggcaatgcatataaacatacttttgaatgttgtgtggcctataaagcaataatgcaatttatatggaatgtcatgggatatgagaaatggaaatgcaaaaataactaatcctttagtaaaaatgtcaacatgttaaagggggaatgttaactaatgtaggttattgctatttgtgatttgtttatgggttcttggctttgacagcttcaaagaatggacagtgataagttaaaagaaattttgtatattgtcaaggaaagggtcttaaatccgagtcaagtcccttccttggggtaaaaaatgtattcttaaagcattctgatgttaaaaagaaaacttaagttatctaaccaaaacagacgcaagattttgtttctgcagactacttggcaatcaaaagtgatcataaatttaggttatcagttttcagaaagttgctttgtgagaaaattttgttagatatattctcccaagcatgctttttgtggaaggttttcagccattgccactgaatcagatgttaaaaatgaagggaaaattgagtgtgcacacacacaactgttgtacactcatgattgcagtttttagcttaagaaacttttctaccagttactgtgaatctgacttaaaatgtaaagtttcctcatgataaaataggaacaacatagaaatggattgatggggtgatctgagttattgtatataaaagtttttaaagaatagaatgaacatcaagctagataggcaaaaattgacacattcagaacagcttttttgactgcgaagccaaaagttgtcagaaacagcaaaagatcccttattattacagagtattttacgtagtctctattttaaggagagaaattaaatagaagggcttcatgcatttaggggagggtgctaaaacttctcaagttcgtcaaacttacaggaatacccaccatgatcattttctctctaattatgtataccacaaaattttcatctggccataggaattcactggtgggtgtaaaattaatgactaaagaaattaagtgacaaatacataaaagaaacagacttgtggggatattgttttaaggtgtattaattactcagtgatgataccactcaatagggcatgccactacttttcttaagatgctaattatgaagcagtgctcacaggcattttttaactagcaaattagtagatggacttttggggtctgtcactttttaaaagtatttaagacttaaattctattagcaccacagtctgccttcagtaatacacctaaaatatttttcaggaccagaagcattcagtttgaaaatttgcagatgcaaaccagtattattactaacgctctgggtcaaagattaggtttttaatattaacagtagtctggtaaatatttagaagtctggcattgagaaacaaaagcttgtacctgactagtatttttatttaaaaaaattagttctgttagcttatttaaattgtgttttatttatccgtagaatttatatttatttcattcctttcatctcactgaaaactgtctgcaggccctttgatttggattagatgtgtgaagtactgtcttttgccaaaaacctcaaattacctgttcttttcaacgtagtgggtttgtgcttgtttggagatcagttcaaaaactatctgtactatctgtactgcctctgatgttaagattttatgtatagcataaggaagctagctctgactatattttcctaagaataaagacctatttttgtagcatgtcttaggatctccaggagtccaagaattattgtgggtgtcctccaattcatcactcttcacttaacagcttttaagtagacacttggaatctttagaggtctgtcgccctttgattatccatacattcgaagtaactagccaatggtgaaaaattcctcaagatatcctcagttgcaatcacattactggaagatgaatagaataaatgtattaggctggtcttaatttttgatggaaatattctgttgtcccgtacttgccattggatttgataaagttagtggtaatttggaaagaatcggggacttgccaatatatttgtgggttttagcttatacccctaggatttcttggttgcgggacgagcagttttggccacttccatcaggacaagactttttaggtcacttagtgcaggttttagtttctattttggattaacaacatttatattgattatcgaaaagaagctttcatcatttcagaacagtcctggaagtttgactttgagtgtgggagaagtcctaataaaccattttggaaattaaaaaaaaaa

SEQ ID NO: 340 - DNA, 1883 bp, Homo sapiens
ggggctgcgccgggttccgtgtgtctatgtcaatgtgtctgtccttcactcctccattgtctgccgccactgctgctgctgctgctgctgccgctgctgctgcacgaatcgccgcagcccccagccttgcgcgtcgtcgctacctcctcggacaggtgagaagcagcccagaaattttatgaataagcatcagaagccagtgctaacaggccagcggttcaaaactcggaaaagggatgaaaaagagaaattcgaacccacagtcttcagggatacacttgtccaggggcttaatgaggctggtgatgaccttgaagctgtagccaaatttctggactctacaggctcaagattagattatcgtcgctatgcagacacactcttcgatatcctggtggctggcagtatgcttgcccctggaggaacgcgcatagatgatggtgacaagaccaagatgaccaaccactgtgtgttttcagcaaatgaagatcatgaaaccatccgaaactatgctcaggtcttcaataaactcatcaggagatataagtatttggagaaggcatttgaagatgaaatgaaaaagcttctcctcttccttaaagccttttccgaaacagagcagacaaagttggcgatgctgtcggggattctgctgggcaatggcaccctgcccgccaccatcctcaccagtctcttcaccgacagcttagtcaaagaaggcattgcggcctcatttgctgtcaagcttttcaaagcatggatggcagaaaaagatgccaactctgttacctcgtctttgagaaaagccaacttagacaagaggctgcttgaactctttccagttaacagacagagtgtggatcattttgctaaatacttcactgacgcaggtcttaaggagctttccgacttcctccgagtccagcagtccctgggcaccaggaaggaactgcagaaggagctccaggagcgtctttctcaggaatgcccgatcaaggaggtggtgctttatgtcaaagaagaaatgaagaggaatgatcttccagaaacagcagtgattggtcttctgtggacatgtataatgaacgctgttgagtggaacaagaaggaagaacttgttgcagagcaggctctgaagcacctgaagcaatatgctcccctgctggccgtgttcagctcccaaggccagtcagagctgatcctcctccagaaggttcaggaatactgctacgacaacatccatttcatgaaagcctttcagaagattgtggttctcttttataaagctgatgttctgagcgaagaagcaatactgaaatggtataaggaagcacatgttgctaaaggcaaaagtgtttttcttgaccagatgaagaaatttgttgagtggttacaaaatgcagaagaagaatccgaatcggaaggtgaggaaaattaaatggctcaacaagcacaatacctaggttaccacacaccactttttgattgggaatgctgaaccatttgagaagagaaacttggcttctgttttcgcaaaggaaaaaaaaaataggataggcttcccttgtgcagagggagaaatggttttgtttttgttttgtttttaaatggagccctgaggcatcagctattatacttgggactctacctctcactcactatatgctaacttaaagccattcaacaaggagtcaagtagatctgaaattaaatactcaacagactcctccttttttagctgtatttttcaggtactgtgtggtgaccgccccactggtgtctattacaggccactttggtagttgtgtatctgctcatgtatgtgatttgacaaaccagttttttaaaataaatggctttttaaaaatctgggaaaaaaaaaa

SEQ ID NO: 341 - DNA, 3489 bp, Homo sapiens
agaggctgccgggaacgcgggcccagaggcggggcgagcgcgcgcggggcggaagtcggccaccttcctccgtcccggccgttagcccagccaagcccagccaagcccagccaagccccgccgatcgcgggcaccggagccagccccgcagcgggagcctaacccagaggaagtggagactcctttactgcacatctgtctgctccaggccaggcactgttctaggagccaggatacagaggtggagacagaaacaaacaaaccgataactgtatacaatactctaacgtcagagggaccacagagcaccagcctgcatggaacttccttcctcactcagcttcccacgttgccagctgggacaggggagatggagtaattttgctgtggaaagacttcacgtcttgccgaatgaaagtcccgcctgtctgtcacgctgatgcccgtgcagctgtctgagcacccggaatggaatgagtctatgcactccctccggatcagtgtggggggccttcctgtgctggcgtccatgaccaaggccgcggacccccgcttccgcccccgctggaaggtgatcctgacgttctttgtgggtgctgccatcctctggctgctctgctcccaccgcccggcccccggcaggccccccacccacaatgcacacaactggaggctcggccaggcgcccgccaactggtacaatgacacctaccccctgtctcccccacaaaggacaccggctgggattcggtatcgaatcgcagttatcgcagacctggacacagagtcaagggcccaagaggaaaacacctggttcagttacctgaaaaagggctacctgaccctgtcagacagtggggacaaggtggccgtggaatgggacaaagaccatggggtcctggagtcccacctggcggagaaggggagaggcatggagctatccgacctgattgttttcaatgggaaactctactccgtggatgaccggacgggggtcgtctaccagatcgaaggcagcaaagccgtgccctgggtgattctgtccgacggcgacggcaccgtggagaaaggcttcaaggccgaatggctggcagtgaaggacgagcgtctgtacgtgggcggcctgggcaaggagtggacgaccactacgggtgatgtggtgaacgagaacccggagtgggtgaaggtggtgggctacaagggcagcgtggaccacgagaactgggtgtccaactacaacgccctgcgggctgctgccggcatccagccgccaggctacctcatccatgagtctgcctgctggagtgacacgctgcagcgctggttcttcctgccgcgccgcgccagccaggagcgctacagcgagaaggacgacgagcgcaagggcgccaacctgctgctgagcgcctcccctgacttcggcgacatcgctgtgagccacgtcggggcggtggtccccactcacggcttctcgtccttcaagttcatccccaacaccgacgaccagatcattgtggccctcaaatccgaggaggacagcggcagagtcgcctcctacatcatggccttcacgctggacgggcgcttcctgttgccggagaccaagatcggaagcgtgaaatacgaaggcatcgagttcatttaactcaaaacggaaacactgagcaaggccatcaggactcagcttttataaaaacaagaggagtgcacttttgttttgttttgttctttttggaactgtgcctgggttggaggtctggacagggagcccagtcccgggccccatagtggtgcgggcactggacccccgggccccacggaggccgcggtctgaactgctttccatgctgccatctggtggtgatttcggtcacttcaggcattgactcaaggcctgcctaactggctgggtcgtttcttccatccgacctcgtttcttttctttcctatgttcttttgttcagtgaatatccctagagctcctaccatatgtcaggccctatgcctcaccctgagaacgcagtgagcatgaggtggacctgtttgctgggaaccccaggtcacccccttttcttcctactctgtgcctggagcatcatgtccacccctgcagatccttggaaaagaaaatgtttatgttgcagggtattgcatggtcacgagtgagggcaggcccctggggacacatctgcccacagctgcacaggccagggcgcaggcacatctgttggttctcaggcctcagataaaaccatctccgcatcatatggccagtgaccgctttctcccttcaagaaaattctgtggctgtgcagtactttgaagttttaattattaacctgctttaattaaagcagtttcctttcttataaagtggaatcaccaaatcttatcacacagagcacagtcctgtagttacccagcccgctccagcagtgcgggagattgtaaggaagcggtggcggctggtgaagcaagtctcacatgtcggcgttcttggccaatggatacaaagataaagaaaatgttgcctttttctaggaactgtcagaaatcctcatgcctttcaagacttctgtgaatgacttgaattttttattccctgcctagggtctgtgaacgaggcctgtctcttccctggggtttctttccatggcctttatttctcctcttccagtgggagttttgcaggctcttctctgtggaaacttcacgagcgttggctgggcctcggcttcgctggagtgtactccagggtgaaggcagagtgggatttgagacccaggttaggcacgacccaggctgagaagggacgtttccatcattcacagtgccctccccacagcactacctcaccccgacccccaccctcactcctaccccaccccgcgatcgtcaggggtgccacggtgggccggagggtgccggctctggctgtccctgtgccggtccctcacaaacctctccccctttgaaactcaagcacagctgcgaggagggcagcgaggagggacccctctctcatggttgtctctttcccccgctatgtcataggtagtggaggaagcgaaggaagtgaacgctgaatgtgacgcatttctgaagagctcagctgtcaccgggcatagcctggaagccccaagtctgttctgactttgcctggctgtctccttgacccgcctcctagatcattgtccttgatgtccaggctgggtcatttaaaatagagatgcaatcaggaaggttgggggacttgggactgtggctgaattgagaccttgctgatgtattcatgtcagcacctgagtcacagcccaggtgcccggaagcagcctcttcgcataggcagtgatttgcgattactttaaagctcaccttttttcttcccctctctgttcgctgctgtcagcataatgattgtgttccttccctatgggatccatctgttttgtaaacaataaagcgtctgagggagtgtaaaaaaaaaaa

SEQ ID NO: 342 - DNA, 2538 bp, Homo sapiens
actgcgcgtgcgcctcaccgcgctggcaccccggcctggcagcctttggggacctgaaccagctgcgcctgcgcagctcgactttctcaggatactgtccctctcccacagaggagctgaaggagtaggacagaagaactgtcaaattctggaatccttaaagccatgtccaaggatttggtgacatttggggatgtggctgtaaatttctctcaagaggaatgggaatggctgaaccctgctcagaggaatttgtacaggaaagtgatgttggagaactacaggagcttggtatcattgggagtttctgtttctaagccagatgtgatctcattattggagcaaggaaaagagccctggatggtgaagaaggagggaacaagaggcccatgccctgattgggagtatgtatttaaaaacagtgaattttcatcaaagcaagagacatatgaagaatcatccaaagttgtgacagtgggagcaagacatcttagttatagccttgactatcccagtttgagagaagactgtcaaagtgaggactggtataagaaccagctgggaagtcaagaggtacatcttagtcaattaatcatcactcataaagaaatccttccagaagttcaaaataaagaatataacaaatcttggcaaacattccaccaggatacaatctttgatatacaacagagttttcccaccaaagaaaaagcacataagcatgaaccacaaaagaaaagttaccgaaaaaaatctgttgaaatgaaacataggaaagtctatgtagaaaagaaacttttgaaatgtaatgattgtgagaaagtcttcaaccagagctcatcccttactcttcatcagagaattcatactggagagaaaccctatgcatgtgttgaatgtgggaaaacgttcagccagagtgcaaacttggcgcaacataagagaatacatactggagagaaaccctatgaatgtaaagaatgtaggaaagccttcagccagaatgcacacctggcccaacatcagagagttcatactggagagaaaccttatcagtgtaaagaatgtaaaaaagccttcagccagattgcacacctgactcagcatcagagagttcatactggagagagacctttcgaatgtattgaatgtggaaaggcctttagtaatggttcatttcttgctcagcatcagagaattcatacaggagagaaaccttatgtgtgtaatgtgtgtgggaaagcctttagccatcgtggatacctaattgtacatcagagaattcatactggagagagaccctacgaatgtaaggaatgtaggaaagccttcagccagtatgcacaccttgctcaacatcagagagttcatactggagaaaaaccttatgaatgtaaagtatgtaggaaagccttcagccaaattgcataccttgatcaacatcagagggttcatactggagagaaaccctatgaatgtattgaatgtgggaaggcctttagcaatagttcatcacttgcacaacatcagagaagtcatactggagaaaaaccctatatgtgtaaggaatgtaggaaaacatttagccagaatgcaggccttgctcaacatcagagaattcatactggagagaaaccttatgaatgtaatgtttgtgggaaagcatttagctatagtggatctcttactctacatcagagaattcatactggagaaagaccctatgaatgtaaagattgcaggaaatctttcaggcagcgtgcacatcttgctcatcatgagagaattcatactatggagtcattcttgactctttcctctccctcaccctccacatcaaatcagttgccaagacctgtaggtttcatctcctgaatatttctggaatccacctcttgaatccatttccatcccatcatccttgtccaatgcacattaatatatttgacatgggatactcgagtagctttctaattggtctccttgtactcaccattgtctctgtcagatgtccacattgcaaccaaatttgtatttttaaaaatatgtttaatctcatttctccctcattaaaatccctcagtggcatcccatggtttttaagttaaagcacacattcttcaaaatagcctaaaaacctagcctctaacaccttgttccaggttaccttccaaagtttctatcttgtgtcactatccatctcattctctgaatacttatccaggattaagatacatattccaggatcaaaaagacctgggttccaatctttgcacttccatttcctgccctctaatttgggggcagcagtttgtgctttgtaagcttcagtcttatttatagtgtgggaataataatggttctacctcagaagttaatagaagaatgaaataatgcatgtaaattgctcagcagcgtgcctagcataaagtaattactcaaaccataatgtaaagtaaaaagataaccatactatacatagaaagccaatcatctcagccatgattatctcagaaataaaaagagatgcagcagctc

SEQ ID NO: 343 - DNA, 4136 bp, Homo sapiens
agttcgctgcgtgtcgaggcgagcacgcgctccgccctggaggctgcggcgacgggtcctcctccgccgtccggtcgcgccctcgcggaagctcggcagtgcgcgtgcgcccgcacccgcactccaaattagaaaggggacgtctagtgggttgcccgggaggggtggcgggagcggtcctggaaataatctgtcctctgtcgccgggaactggcgaggtagttccttcgcggtggagaggtacgtccggcgcgcggcggccacgcccaccctatcggggcccgcggagccgcggacggcggggtctggccttcttggggtagctctggccgccgaggctctgcggggcggcgggagtcgccgcctccttccccccgggcccctccctcgtctggaagccccagaatcgccccgcggctgtccggagtcgccggcgacggtggaggggccgacgcggagagcggctctagacctggaatggccaaatatcaaggtgaagttcaaagtttgaaactggatgatgattcagttatagaaggagtaagcgaccaagtacttgtggcagttgtggtcagtttcgctttgattgctaccctggtatatgcacttttcagaaatgtacatcaaaacattcacccagaaaaccaggagctagtaagggtacttcgagaacagcttcaaacagaacaggatgcacctgctgccactcgacagcagttctacactgacatgtactgtcccatctgcctgcaccaagcctccttcccggtggagaccaactgtggacatcttttttgtggtgcctgcattattgcttactggcgatatggttcatggcttggggcaatcagttgtccaatctgtagacaaacggtaaccttactcctaacagtatttggtgaagatgatcagtctcaggatgttctgagattgcatcaggatattaatgattataaccggagattctcagggcaacccagatctattatggagagaattatggatctacccactttactgaggcatgcattcagggaaatgttttcagtcgggggccttttctggatgtttcgcatcaggataatactttgtttaatgggagcttttttctatcttatatcacctctagattttgtacctgaagccttgtttggaattctaggctttctagatgatttctttgtcatctttttattgcttatctacatctctattatgtatcgagaagtgataacccaaaggctaactagatgaaaaagaaaacaaaactgagtttactaggatatctgagctaatgtagaacatcaaacagaaggacccatggcagtataaagcaatgaagcaatggagtattatctcacaaatataaaaccactataagacaaacatttgattatcatttgacaaatacctaggtataactggaattttcatgtttgaagttctaatattaagtttagaattataatgatctacagttgtatcttgattctatgttgtctggaaaaaatatggaattatataaaaagggatgcttttatatatttttcttttccccagaattacttagattaattagatgtatagtaaaatattgttaaatgtcagtttatccatcttatccttctcagcaggtacctatatgataatatatagctgtgaaactcatctaaatatttttgttccaataaaatattatatactattggggaaaattcagtatttcttttagtgctagctaagttttgtgcatttggagcagttctgccttttcattctggtataattaattatttgctatcagctgaaactgaaagaagaaacttgaacttcatacttcgatatcatattctagtttacagaacacattttaatcaatagaagaattaagatgaaaaacatggccgggcggggtggctcacgcctgtaatcctagcactttgggaggctgaggcgggtagatcacaaggtcaggagatcaggaccatcctggctaacatggtgaaaccccgtctctactaaaaatacaaaaaattagccaggcgtggtggcaggcgcctgtagtcccagctactcgggaggctgaggcagaagaatggcgtaaacccaggaggtggattgcgccactgcactccagcctgggcaacagagtgagactccctctcaaaaaaaaaaaaaaaaaagatgaaaaacatttatctccagtcagcacacttgatgttcacagttagacatttaaacaagagctcatcctttcgtagtagatataaaagtaatttgtaaagggaagattgttttaggaacctgggcgatgctgcaaacacagagtagcctgatgcatttctgaggaaggtgaatcttcgtgtctttgagcatcaagccaataggaaggtactgggaacggtatttacatttgacaaaagaaattactggttagctatagcaacagattggacaaattttgttagttttctgttgtcagaaatttttataatactgtctcaggatggcagcacacagctcagattcatgtcttgagccaaacaagtgaatgtatctgagaagactcagtaccacatggtactgggagatcttactcacttcagctggcgttgctcattagtgaatgtatgacagcaggatgtgaggggatgcccaggagtcagtgttagcattgtcatctgagatcactgctattaatatcatccattaatttattagtgagcttcactatatgcagactgggagataaggagaaaatctgtcacattctctctagctaatcagatcagctaccaattaatgagattctgaatgaaatatcaatatgtgtttttctaatttggacctaggacagagctgttgcttgtcatagagaaaaacaataatgcttaaacatagcacattataattaaagcaggtttctcacatacttttcattttatcctttggataattttgtgaggaacgcaggacaccaacttccctttcatagatacaatccccatgctattgatgaaagtgtttttgaatgaagtcatacaacaaataactgatcaaagtggcattacaccaaaatttcttagtaggactcctgcatagaatgtttagatagacgtgaaagttgttaagaggaacagcaagagagaaactggttctttggaagtctttcgtgctacattatacctccatcagagtaagacagcttaggcactcctaagaggaaaggtctgtggagatgacatgaatccgaattctacacttccaaatcaaataggtaaaagggtggcatacatcacagaaaaacatttcagctgcagtcaccaacttgaaaagcgagtgagtaggagtttgtcacactgccatgtaccagactggaaatgcatttcctaccaattacacatttggtgtgggggaatggtgatgtcattttttgacaggattttattttgtgtgcatgcattctgctccaagtgtcacaattctggttacaataattataatatttggagttactactaagactttcctgaaagaggtgtattgtaccaaattttgtaacataaaaaaatactaaatgatcttaaagcttcctaaattgtgaaaagggtatgtgctaacatctcagaactttagacctgcttgttgtcatctttaccgatctctgatgataaatgcagaagggatctgagagtttttaaagcaagtagagtcaatcagagttttgaacatcatagtaatacttccgtgattcagagttagatcatataaatcaaagtaacaatttggattttttttaaacaacaatatcataactgtcataaaacagatggtccaaccccaggagcagataataacttgggcagctctgtggggaacaagacggggaaaacaactgttctaactgcccactagaacagtggtttcaactactacaattctcagtgtttgagaggtacaagggaagaaaggactatgtggatcccttgtggctatgcagatacctacctcacagagttgttgtagaagactggtggtttggttcaaaccttgtgattaaagagtttgtcaagcattttattcttttgaataaaagcaacatatctaaaacattttaaaaaaaaaaaaaaaaaaaa

SEQ ID NO: 344 - DNA, 2984 bp, Homo sapiens
atgcaccacctcctggagcagtcggcggacatggcgaccgcgctgctggcgggagagaagctgcgggagctgatcctgccgggcgcgcaggacgacaaggcgggcgcgctggccgcgctgcttctgcagctgaagctggagctgccgttcgaccgggtggtcaccatcggcaccgtgctggtgcccatcctgctggtcaccctggtcttcaccaagaacttcgcagaggaacccatttactgttacaccccgcacaacttcacgcgcgaccaggcgctgtacgcccgcggctactgctggacggagctgcgggacgcgctgcccggcgtggacgccagcctgtggccgtcgctgtttgagcacaagttcctgccctacgcgctgctggccttcgccgccatcatgtacgtgcccgcgctgggctgggagttcctggcctccacgcgcctcacctccgagctcaacttcctgctgcaggagatcgacaactgttaccaccgggcggccgagggccgcgcgcccaagatcgagaagcagatccagtccaagggcccgggcatcacggagcgcgagaagcgcgagatcatcgagaacgcggagaaggagaagagcccggagcagaacctgttcgagaagtacctggagcgccgcggccgcagcaacttcctggccaagctgtacctggcgcggcacgtgctgatcctgctgctgagcgccgtgcccatctcctacctgtgcacctactacgccacgcagaagcagaacgagttcacctgcgcgctgggcgcgtccccggacggggcggcaggtgcggggcccgcggtgcgcgtgagctgcaagctcccgtccgtgcaactgcagcgcatcatcgcgggcgtggacatcgtgctgctgtgcgtcatgaacctcatcatcctcgtcaacctcatccacctcttcatcttccgcaagagcaacttcatcttcgacaagctgcacaaggtgggcatcaagacgcgccggcagtggcgccgctcgcagttctgcgacatcaacatcctggccatgttctgcaacgagaaccgcgaccacatcaagtcgctcaaccggctggacttcatcaccaacgagagcgacctcatgtacgacaacgtggtccggcagctgctggcggcgctggcgcagtccaaccacgacgccacccccacggtgcgcgactcgggggtgcagaccgtggaccccagcgccaaccccgccgagcccgacggcgccgccgagccgcccgtggtcaagcggccgcgcaagaagatgaagtggatccccaccagcaacccgcttccgcagcccttcaaggagccgctggccatcatgcgcgtggagaacagcaaggcggagaagccgaagcccgcgcgcaggaagacggccacggacacgctgatcgcgccgctgctggaccgctccgcccaccactacaagggcggagggggcgacccgggccccggccccgcccctgcccccgccccgccgcccgcccctgacaagaagcacgcgcgccacttctccctggacgtgcacccctacatcctcggcaccaagaaggccaaggccgaggcggtgcccgccgccctgcccgcctcccggagccaggaggggggcttcctgtcccaggcggaggactgtgggctaggcctggccccggcgcccatcaaagatgctccgctccccgagaaggaaatcccgtaccccacagagccagcccgggcagggcttccctcggggggcccgttccacgtccgctcacctcccgccgcccctgctgtggcccctctgacaccagccagcctgggcaaggcggagcccctcaccatcctgagccgaaacgccacacacccgctgctgcacatcaacacgctatcctcatcgccaccttcgacgagccgagaacggtcgtgagtactgtggagttttgagggatggcaccgtccaggccgccgagagcccctctgcctgtgtcgtgtggcctggccagcctcccggtggacaccagccctgcgtggacgtggcctgtgcttcgcccgcactgcgcgcatccccaacctctgtccgcatgcctggggccttcgcccccacgtgctcgacaggggaacccgcccggacggcatcgccaggcactggctggggtggggaaaggtggcccagtggagccggtggccaggaaggctgaagcccgcttcccatgctcctgcatcaggtgcccagccgtgggtgggggccctgaggtgaagagtttatttttttagtccgtttcgtcctggccccgggctgtggcgagacagcccaactcccccagcccagctcccccagcccagagccagggaagaggaaggtggggccagtcccaccagtggggtggccacgcccatggggtcacatgctcaggggtcaccccctgcagggacctgatgccctcgggtgggagggaccgaggtccaccctcgggtcaaaggtcaacgtgcactttctccttgtcgcctgacagacattttattttactaagactgctgtaccgaacaagcatatttatcatcaggagacaggatgggtttaaagcaggatggtgtgtgtgtgaacgggcatgagcagaggtgagcgtgagcgagcgggtgtgtatgtacgagtgtgcacgtgtgtgcgtgtgcacagagggtgtggtgccagcttgagtgggagtgtgtgagtgtgagcaggcgggcgagtgcgtgagtgcacgccagcgcgtggcccatgtatgaggagtgaaggggcccaacgcaataaccacgtcccccacccgggccccccgccgcggctgaggccacatggcttcctgtgggagccccggccggcacccggctggtcccaccccaaatacctcagccatggagaccatgtcatgcagaattaacaaggtagcaccgagcatatcaataaatattattctgataatcaaaaaaaaaaaaaaaaaa

SEQ ID NO: 345 - DNA, 4524 bp, Homo sapiens
ttccttattcctgctccctccacaaacgcgtcctcatccaatccagtggaacccagccgggccaaaaggacacgagaactgcagtctggaccgtggtgggtttgtcttccagctgttgaccgagacagtctttcaatagcctcatctgctgttaaatgaaaggatttgagcaccccctccacgcctaacattctggtatgaggtgcctgcctcccggacatttcagccttcacatacagttagaccaacttgaaaccgaattctgccttgtctgtttattgctgtgggacctttgagaacctctctctagactccagttgcttctcttctccacctgtgaacttcctccaagaattgccaagctaccggtccattgcacgtaggagaacgactgtccattcccgggacaagcaaagcggaactttgctaaagccaaccgactcttacagctcccagctggaggacagaatcgctgaaaacctcagcagccattctcttcgaaattatgcactgaacatctctgagaagcggagactaagggacattcaagagacacaaatgaagtatctctccgaatgggaccagtggaagcggtatagcagcaagtcttggaagaggttcctagagaaggctcgagagatgacgacccacctggagctgtggcgggaggacatccgcagcatagaagggaaatttggcactgggattcagtcctatttctccttcttgagattcctggtgttgctgaatttggtgatatttctgatcatctttatgctggttttgctcccagtcttactcacgaaatacaagatcaccaacagcagcttcgtgctcattcctttcaaagacatggataaacaatgtacagtctatccagtaagcagttctggactcatttacttttacagttatatcatagacttgctttctggcactggtttcctggaggaaactagcctcttttacggacattacaccattgatggggtgaaatttcagaacttcacctatgatctgcccctggcgtatttgttaagcacaatcgcctccctggccctgagccttctttggatagtgaaaaggtcggtggaaggattcaaaatcaacctgattcggagtgaggagcactttcagagttactgcaacaagatatttgccggctgggacttctgcatcactaaccgcagcatggcggatctgaagcacagcagcttgcggtacgagctccgagcagatctggaggaagaaagaatgcggcagaaaatagcagaaaggacctcagaagaaacaatacgcatttactctttgagactgtttttgaactgtattgttctggctgttttaggggcatgcttttatgcaatatacgtagcaactgtcttctcgcaagagcacatgaaaaaggaaatcgacaagatggtttttggagagaacctcttcatattgtatctaccgtctattgtgatcacgctggccaattttatcaccccaatgatctttgccaagatcatccgctatgaggattattctccaggctttgagatccgtctgacaatccttaggtgtgtctttatgcggctggccaccatatgtgtcctggtgttcacgctgggctccaagatcacatcctgtgatgatgacacatgtgacctttgcggctacaaccagaaactctacccgtgctgggagacccaagttgggcaggaaatgtacaagctgatgatcttcgacttcatcatcatcttggctgtgacactcttcgtggattttcctagaaagctcctggtgacctactgttcctcttgcaagctgattcagtgctgggggcagcaggagtttgccattcctgataacgtcctggggatagtttacgggcaaaccatctgctggatcggagcctttttctcaccccttctccctgcaattgcaaccctgaaattcattatcatcttctatgtgaaagagtggagtctgctttacacctgcagaccctcccccaggccgttcagagcatccaattctaatttcttcttcctgttggtgttgttgatcgggctgtgtttggcaataatacctctgacaatcagcatatcacgcatcccttcctcgaaagcctgtgggccgttcaccaacttcaacaccacctgggaggtcatccccaagacggtgagcaccttccccagctcgctgcagtccttcatccatggtgtcacatccgaagcctttgcagttcctttcttcatgattatttgcctcatcatgttttacttcattgccttagctggagcacacaaacgggtggtcatccagctccgagagcagctatccctggaaagtcgtgacaagtgctacctaatccagaaactaacagaagcccaaagggacatgaggaactaactagactgagcgtgaagatggtgctgcctgttgcttctaagctgacctagtgattctgctgagcctacagagtctacctgggttttgagtggacatttaaaaatatatttttcttgagtttaggcttttccatatgtgcagctgtgtttacctaacccagcccttaattagggcttcagtgacttagaaaagcaggggaaacccaaggctttgcctgcagaccggccactctgtgacaactctaccaaaaaccaacaagccattcaagcttttacaagaatgaaagagcggagacggtagtttagtatttgagccacgagtttatgtgcacaagtgttttgggttgtggactgaagctcagcctgttaatcagaccagcccatgagtgtataacaaacagaattggaggctggtttcttaaacacacacgtccacattttttagggttgttttcctgtgcttacaatttttaatgcatgtgcctttatttcacaaaacatgtggctgggcgcagcggctcacgcctgttatcccaacactttgggaggccgaggcaggcggagcacctaagttggggagttcaagaccagcctgaccaacgtggagaaactccgtctccactaaaatacaaaattagctgggtgtggtggcacatgcctgtaatatcagctactcaggaggctgaggcaggagaattgcttgaacccaggaggtggagtttgcagtgagctgagatcacaccattgcactccagcctgggcaaaaagagcaaaactctccctaaaaaaaaaatgtagaatatctcttaagatttccgttatggtaaaaaccatatgcaataaatacctcattgtaagcttacccaaaattgatagatgtcaaccttttaacagaagaacagaagtttaagttattgtttaatgtaatcagttttcattttaatatctttgaaatctttttcaaaggactgtagttttgtaatggacttttcaagccttccttccattgtttttcttccgttcactggctccacacgtttcctggggagtagcctggaatttaaagttgggtgcaggttttagaaagctgttgctgttaacaataattctcccggccatctccactccactactcaaaaatgcctgaatccttgctcagaggagcaaaggtatcttctcgtccctttcttacagccattttcttgcttttccacaaagatattatttaaagtggaatatttttgtaactgggataccaatgagcttttcggtcttttcctgacttggtaaggtttatgggtttctaaatctaataactacagtcataccaccctgaaaatgcctgatctcgtctaaatctaataactggtgtcatggaattttgagtaaccaaagattcattccagtctcacttaaaaaaataaattctgctgggcacagtggctcatgcctgcaatcccagaactttgggagtccaaggagggcagatcacctgaagtcagaagtttgagaccagcctggtcaatgtggcaagaccccgtctctactaaaagtacaaaaattagccaggcatggtggcgtgtgcctgtaatcccagctacttgggaggctgaggcatgagaatcacttgaacctgggaggtgaaggctgcagtgtgcgagaccgtgccactgtactccagcctaggtgacagagggagaccctatctcaaaaaaaaagataggtgaaaagaaaaaaaaagttgtaattgtaaacatttctgcccagtgcctttatatttatataacattttcactgtgaccagacttgatgatattcaagttttctatttgtgtgtgtgtgtgtgtgtgtgtgtgatgaacacaacgaaaacgtactgcgttttttttcctattataaaagtgatactgaaatatgctaattaatatattaattttagttaaatgctgctaatatgcatacctcttacttgaaggtttttaatatgttttgataactttaataacttcaggtgatgtctgtataacttttaaagtgcagctctctctaacaaatgtgccttacaactcctgattaaacggcgtcttgaaggttttaaaaaaaaaaaaaaaaaaaaaaaaaaaaa

SEQ ID NO: 346 - DNA, 8352 bp, Homo sapiens
atttagaggcggcgccagggcggccgcggagaaacgtgacacaccagccctctcggaggggtttcggaccgaagggaagaagctgcgccgtgtcgtccgtctccctgcgcgccgcgggcacttctcctgggctctccccgaactctcccgcgacctctgcgcgccctcaggccgccttccccgccctgggctcgggacaacttctggggtggggtgcaaagaaagtttgcggctcctgccgccggcctctccgcctcttggcctaggaggctcgccgcccgcgcccgctcgttcggccttgcccgggaccgcgtcctgccccgagaccgccaccatgaacaagctttacatcggcaacctcaacgagagcgtgacccccgcggacttggagaaagtgtttgcggagcacaagatctcctacagcggccagttcttggtcaaatccggctacgccttcgtggactgcccggacgagcactgggcgatgaaggccatcgaaactttctccgggaaagtagaattacaaggaaaacgcttagagattgaacattcggtgcccaaaaaacaaaggagccggaaaattcaaatccgaaatattccaccccagctccgatgggaagtactggacagcctgctggctcagtatggtacagtagagaactgtgagcaagtgaacaccgagagtgagacggcagtggtgaatgtcacctattccaaccgggagcagaccaggcaggctgacgaggttcccctgaagatcctggcccataataactttgtagggcgtctcattggcaaggaaggacggaacctgaagaaggtagagcaagataccgagacaaaaatcaccatctcctcgttgcaagaccttaccctttacaaccctgagaggaccatcactgtgaagggggccatcgagaattgttgcagggccgagcaggaaataatgaagaaagttcgggaggcctatgagaatgatgtggctgccatgagcctgcagtctcacctgatccctggcctgaacctggctgctgtaggtcttttcccagcttcatccagcgcagtcccgccgcctcccagcagcgttactggggctgctccctatagctcctttatgcaggctcccgagcaggagatggtgcaggtgtttatccccgcccaggcagtgggcgccatcatcggcaagaaggggcagcacatcaaacagctctcccggtttgccagcgcctccatcaagattgcaccacccgaaacacctgactccaaagttcgtatggttatcatcactggaccgccagaggcccaattcaaggctcagggaagaatctatggcaaactcaaggaggagaacttctttggtcccaaggaggaagtgaagctggagacccacatacgtgtgccagcatcagcagctggccgggtcattggcaaaggtggaaaaacggtgaacgagttgcagaatttgacggcagctgaggtggtagtaccaagagaccagacccctgatgagaacgaccaggtcatcgtgaaaatcatcggacatttctatgccagtcagatggctcaacggaagatccgagacatcctggcccaggttaagcagcagcatcagaagggacagagtaaccaggcccaggcacggaggaagtgaccagcccctccctgtcccttcgagtccaggacaacaacgggcagaaatcgagagtgtgctctccccggcaggcctgagaatgagtgggaatccgggacacctgggccgggctgtagatcaggtttgcccacttgattgagaaagatgttccagtgaggaaccctgatctctcagccccaaacacccacccaattggcccaacactgtctgcccctcggggtgtcagaaattctagcgcaaggcacttttaaacgtggattgtttaaagaagctctccaggccccaccaagagggtggatcacacctcagtgggaagaaaaataaaatttccttcaggttttaaaaacatgcagagaggtgttttaatcagccttaaaggatggttcatttcttgaccttaatgtttttccaatcttcttccccctacttgggtaattgattaaaatacctccatttacggcctctttctatatttacactaatttttttatctttattgctaccagaaaaaaatgcgaacgaatgcattgctttgcttacagtattgactcaagggaaaagaactgtcagtatctgtagattaattccaatcactccctaaccaataggtacaatacggaatgaagaagaggggaaaatggggagaaagatggttaaaatacataataatccacgtttaaaaggagcgcacttgtggctgatctatgccagatcaccatcttcaaattggcacaactgaaatttccccactctgttggggcttccccaccacattcatgtccctctcccgtgtaggtttcacattatgtccaggtgcacataggtggtattgaatgctcagcagggtaggggctgaccactgtccctgattcccatcgttctcaggcggattttatatttttttaaagtctattttaatgattggatatgagcactgggaaggggacgctaactccccttgataaagtctcggttccatggaggacttgagtggccccaaaggctgccacggtgccctcaccccagcccatgtgctcccataagggctggttcctagaggcaggggttgtggggcactcccagccacggcactgttaccttggtggtgggacttggaacccaaccctgagctcccgataaagctaaagtccatcatctggcaaattcagtaaattggagagtacttgcttctgtttgtatctgagaggaatttttaactgacggcttctgtctccatgaatcattatcagcatgatgaaaggtgtgtctaaaaaacaattcagaataccagcagcattgtacagcaaggggtaaataagcttaatttattaatttaccaggcttaattaagatcccatggagtgtttagcccttgtgggagacagaagccatcagttaaatgaggttaggcctctcctcctaatatactgattgacaatgcatattagccaggtaatgcactttagctaccctggacaatgctatcaagtgtgctgggaagggaggaaggcctctctacatatggaaaagcccatgcgtggagttcccctcctttcaacattgcaacaacagtaacaacaagacaaccgcaacatgtgggcgtagtcaggcaatgctgtgtgcgaagtaaactacctcaaggtatgaagttacctcagcaattattttcctttttgttccccccaaccccattaaaaaaatttttttttgatttttgtttttttgcagcttgctgatattttatataaaaaagaaaagcaaagcaaaagagaagctgatagtcttgaatattttatttttttaatgaaaagaaaaaacaagaaagttatgtttcataatttcttacaacatgagccagtaaccctttaggaactctctatggagaacaggcctggtgggaaaggctttgggggctgcccccttaggaggaggctagtgctaagagggaaggcccaggtttgagagagcccagaggggcagagcccagagccttgtttggccctgatctctgacttctagagccccagctgctggcggctgctggaatatcctacctgataggattaaaaggcctagtggagctgggggctctcagtggttaaacaatgcccaacaaccaaccagctggcccttggtctcctctctttcctcctttggttaaagagcatctcagccagcttttcccaccagtggtgctgttgagatattttaaaatattgcctccgttttatcgaggagagaaataataactaaaaaatataccctttaaaaaaacctatatttctctgtctaaaaatatgggagctgagattccgttcgtggaaaaaagacaaggccaccctctcgccctcagagaggtccacctggtttgtcattgcaatgcttttcattttttttttttgttattgtttcatttcagttccgtcttgctattcttcctaatctatatccatagatctaaggggcaaacagatactagttaactgcccccacctctgtctccctgtcttctttagatcggtctgattgattttaaaagtggacccaaacttagggaattcttgatttagggtggctggtggcaaggaggggcaggggatatggggacgtgactgggacaggttcctgccttatcattttctccctaggacattcccttgtagcccccagaattgtctggcccaaattgaatagaagcagaaaaacatttagggataacatcaggccagtagaattaagcctctccacctgtcccaaccataaaaagggtctcccagctttccatctctggctctatatgctttatcccaaaacaaagcagataacgttcagacgtcggccatttagtaatttaaagcgaatttccagcagcaagcatgctttgatatctggttcagactatcatcaggaagaaaaaaaaatcccacagtacctgaaatgtgattgttgcagtgttcagtttccttgggggcctgctcccttcacaccttgagcccaagtccttttccgttggctgattcagctcccagaagagacgaggaagtgtgtggcaagggactggaaaacttcacttgcttggattaggcaaggctccactcattgttgatatttgcccagcaggaaaatcatgtaagttataccaccagaaagcaaaaggagcatggtttggtggttaaggtttagtgggatgaaggacctgtcttggtgggccgggccctcttgtgccccgtaggctaggtcttagggcaactccttgccctcctgctcagcacctccatttccccatccttggtgagataacaagctatcgcgaaaagcacttgggagatttggatgatttgagaagagtgacttaaaaaaaatgcttctgtgctctaagatatatatgtgtgtgtgtgtgctacatatatatttttaagaaaggaccatctctttaggatatatttttaaattctttgaaacacataaccaaaatggtttgattcactgactgactttgaagctgcatctgccagttacaccccaaatggctttaatcccctctcgggtctggttgccttttgcagtttgggttgtggactcagctcctgtgaggggtctggttaggagagagccatttttaaggacagggagttttatagcccttttctactttcctcccctcctcccagtccttatcaatcttttttcctttttcctgaccccctccttctggaggcagttgggagctatccttgtttatgcctcactattggcagaaaagaccccatttaaaacccagagaacactggagggggatgctctagttggttctgtgtccattttcctctgtgccaaagacagacagacagaggctgagagaggctgttcctgaatcaaagcaatagccagctttcgacacatacctggctgtctgaggaggaaggcctcctggaaactgggagctaagggcgaggcccttcccttcagaggctcctgggggattagggtgtggtgtttgccaagccaaggggtagggagccgagaaattggtctgtcggctcctggttgcactttggggaaggagaggaagtttggggctccaggtagctccctgttgtgggactgctctgtcccctgcccctactgcagagatagcactgccgagttcccttcaggcctggcagacgggcagtgaggaggggcctcagttagctctcaagggtgccttcccctcctcccaacccagacataccctctgccaaactgggaaccagcagtgctagtaactacctcacagagccccagagggcctgcttgagccttcttgctccacaggagaagctggtgcctctaggcaaccccttcctcccacctctcatcaggggtgggggttctcctttctttcccctgaagtgtttatggggagatcctagtggctttgccattcaaaccactcgactgtttgcctgtttcttgaaaaccagtagaagggaaacagcacagcctgtcacagtaattgcaggaagattgaagaaaaatcctcatcaatgccaggggacataaaagccatttcccttccaaatactcgacaatttagatgcagaacatttctctgtattcagacttagagtaacaccagctgaaaactgcagtttctttcctttggatacataaggcttctctatcggggtacgggacagggaggaggcctcatgtctgaagggggatttaggggcgagagccccagccctgaccctcggtcctgtgcaccgctttggggcacagtctgatggcgcctttgctggcgccttagtatggttgactccggatggacaaaagaaaaaaaattttttttcttgaatgaaatagcaggaagctcctcgggagcatgtgttttgattaaccgcaggtgatggatgctacgagtataaatggattaactacctcaatccttacagtaagattggaactaagggcagggactcatgcataagggtatgaatcccagccaggacaagtgagttgaggcttgtgccacaaaaggtttgtccttggggaacaggcaggcctgccaggatcccccccatatcgattgggctgggagggctggccatgaggtccccactttctgctttccttgcccatgtgtcacccctttggcctccagcttgtccctctctcactttctatagctttgttggaccagatggtgaggaaaggaatggcctcttcccttctagagggggctggctggagtgagacctggggcttggcctggaacccaccacacagccccaaagtcaggaagcctggggaaaccagagctgagacctcttcaacagggtttctttgagatcctacacctccattgggccctttttcagtcttcaatgggggcccagttggctctagaaggagaagaggtgaagcaggatcctttgccctgggggagtctgagggcgcggtccttggactcattcaggccgtctttgtagttgggggagttccactgggcgatcccagcccctccccacccaccctctaatggacctcctcatagaagccccatttcacttttgttttatctacctcttagcaaaacaatagataaattaggtagtggcagctccacttgcttaggttagggggggaaaaagatttctttttccaaaggaaaaaaatattaccttgagaatactttccaaaaaataaaattaaaaaaaaaaaaaccaaaaaaaaaaatttttttttaaaagggagacattttccagtgaccactggattgttttaatttcccaagcttttttttcccccataaataagtttcactctttggcgattttcttcacttgtttaagataacgtgctagctattccaacaggtaacagctttcacagtctgcccctggcctgtctcaccccatcccccaccctattcctgccagtgagtccttcctgtgcttctctcccttctcccctcccagccagctgacttcagtcacccctgtcccccctcccctgccaataagctcccccaggaataaaggctttgttttggggatgcttaaatcttgactggcacttcccggctgtgggggctggggagccacttgtaacatttctgtgcagattttatgttagccactgctatgtaaaagcacgttcaaaatgaatttcagcagattatgtgttaccataatgaataaacgtcctctatcaccatttggagtctcccttttctccaggatcttgatcctggtccccaaaaccagagtgaatcaaaagagcttcctcccctgaggcaaagtggatttgtaagcagttctgaaacatcacttactcagaagagggaacgatgtattttgatgagtgcaaattgggaagagctggaggcctactgcttgggacagttttttttttttttttttttttaaatatgagtgctagcttattctgtaattgcggcaactttgaaaattgtattttactggaaatctgccagccatcaccacccgattttgattgtatccttcctcccatcctttaatctgttcattgctttgggggaggtggggcagctggctcacacgttggagtttgttctttgatggatgaacgaacactccagttttctttcccgtgaaggttgtttcagccacaaaccacttcattttgctgtttcaatttcaaaataaaaggaaacttatattgaaagacaa

SEQ ID NO: 347 - DNA, 3413 bp, Homo sapiens
gtcggttgcagctggcagtgcggcgggcgcgggcgccggagcgaggggcccgcgggcccggctattaataacgcggccgccagcccggggtcgcgcagccatggccagcccggagccccggcgcggcggggacggcgccgcccaggccgcgaggaaaacaagagtagaggccaattctcctcttccaaagaactctggatccctaaatgaggcagaagccttgaacccagaagttactctatcttcagaggggtccttaaacctcgaagacattctctacctggaggacacaggtgaccttgatgagacactctatgtgcaagagactgagaaggcagaggaggccctgtatattgaggaggccatgcagccagatgaggctctgcatgtggaggagcctgggaatccagaggagacagtgtgtgtggaggaaaccacggagccagatcggatacagtttgtggaggggcccgtggagccaggaaagcccacaagcccagagcacgttgtttatgagggagagacagtcacaagggcggagaaatctaaccctgaggagagcctcagagccgagcagagccccagcgtggaggagaacctgagcatagaggacctggaattgctagaggggcgtttccagcagtgtgtccaagctgtggcccagctggaagaggagagggatcagctcatccatgagcttgtattgctccgggaaccagccctgcaggaggtacagcaagtccatcaagacatcctggctgcctacaagctccatgcccaagcagagctggagagagatggcctaagggaggagatccggctggtcaagcagaagcttttcaaagtgacaaaggaatgtgtggcctaccaataccagctggagtgccgccagcaggacgtggctcagtttgccgatttccgggaagtgctgactacaagggcaacccagctctcagaggaactggcccagctccgggatgcctatcagaagcagaaggagcagctgcggcaacaactagaagcccctccaagccagagggatgggcactttctccaggaaagccggcgactctctgcccagtttgaaaatctcatggcagagagccgccaggacctggaggaggagtatgagcctcagttcctgcggctcctagagaggaaagaagctgggaccaaagctctgcagagaacccaggctgagatccaggaaatgaaggaggctctgagacccctgcaagcagaggcccggcagctccgcctgcaaaacaggaacctggaggaccagatcgcacttgtgaggcaaaaacgagatgaagaggtgcagcagtacagggaacagctggaggaaatggaagaacgccagaggcagttaagaaatggggtgcaactccagcaacagaagaacaaagagatggaacagctaaggctcagtcttgctgaagagctctctacttataagggctgtttagaaatatatggccaaatctgtaacccggaaacagcaaaaaacttcttagcaaaggatcactaagtaccctttggatgtactcttccaaccagacaagagtgccagaaacttggcaagcaattcatcctgtggaagttgcaaatactggctgacctgcttaaaaagattctagagttggccggaggcagaacatgtcaactctttgctggattctatttcatctgctgttgatactgatctcaatgcaccaaggaaaggaaagatgagcctcctgtcttccagcaacaaccctcacatatgcactgagtaaaggatgaatgtatggacacatctgggagtattttaaagaatgtatcttgccttgtgttgacccaaaccaaaaacatttttgaggggcacatgtggggtcaaaaagatagccaatttccattacatgggtttacaatttccattcttttgtgccacgagtgttagaatttaaatgaatacttttacaaagtctactttttgttcaaggatatgctgacccatatagtttactcttaaaattgtgtcaaggtatttctcactatactctaaaacaactagacttgaaaagaaaccatttgagatttgaatctaatggttaacgctattcagattttcccaaagatcttacctcatgaaagtagttctgggtcagaatgatctactcagttaaaaaacaacaacaacaaaaaactaagcgattgggaaaaaacaggaattttatctggttattgcatctggtgatagaggccttcaaagcctattatttctaacctaagtaaaggccccagtgaaaaacatactggggaaataaaacctctgagaaaaggttcaagcaccttttccaaatttaaatcttgccttaaattctctctaccacactgcctttgacactcttggaagtccatgtagttctctacagatagacttcaaagaaacgttaccttatcaaagactaatctgtgccacctctgattcagtgttttatgtctttcactttccctgggaaggagtaaagttcttttctacagctctgggactattacatttaattctgctcttgatagtcaaagaccatggacaacaactgtcatctgaaggactcttctagaagccagagactggtgtttgatggatgttttatactaaataaaacccatcagcatggggttatgtagaaaagcaatttattccattttaagcacttacacagttagtcatggagagtaacaggcctgctggtgaaacaggtcacccaaaatggagatggcatcaaactagtggtcaaggactaactcctaaaaaaaaaaagcaactcttatcaaggattaatttaatttttaaaacaaatacaagttattgattcactcttctcaacttgacagtctacctgtggtataactgtcaggtaaaaacatacatctttacaacttggtggtcccaagttaaaaaaaaaaaaaaaaaaaccaacaacaaaaaaaaaaacaccatttcacagacaggaaataaacaacatgaaaacagctcaagaaatacactaacgagcaaaaatatatgaatatatggggaaagaggaacgtgttgttttgacttaactgaagaaaccaagaggaaactggtctacgtatgaaaatgtgcatcctggaaagtcaggtgtcaagattttcgagtaggaatctatatgacttgaatctccccctatttcctgaataaaagtgacatctttcagtatttatacttcatggctcagacacctacctcatttggctctattccttactcactctagcctttacttaaatgagtctgaaaaacttggggatatagcataagaagaaaaataatcacacataatattcccctttctgtagctactttagacctgggttactagaaaattcctgaagaaaatttcaac

SEQ ID NO: 348 - DNA, 4248 bp, Homo sapiens
gggccatttctggacaacagctgctattttcacttgagccgaagttaatttctcggggagttctcgggcgcgcacaggcagctcggtttgccctgcgattgagctgcgggtcgcggccggcgccggcctctccaatggcaaatgtgtgtggctggaggcgagcgcgaggctttcggcaaaggcagtcgagtgtttgcagaccggggcgagtcctgtgaaagcagataaaagaaaacatttattaacgtgtcattacgaggggagcgcccggccggggctgtcgcactccccgcggaacatttggctccctccagctccgagagaggagaagaagaaagcggaaaagaggcagattcacgtcgtttccagccaagtggacctgatcgatggccctcctgaatttatcacgatatttgatttattagcgatgccccctggtttgtgtgttacgcacacacacgtgcacacaaggctctggctcgcttccctccctcgtttccagctcctgggcgaatcccacatctgtttcaactctccgccgagggcgagcaggagcgagagtgtgtcgaatctgcgagtgaagagggacgagggaaaagaaacaaagccacagacgcaacttgagactcccgcatcccaaaagaagcaccagatcagcaaaaaaagaagatgggccccccgagcctcgtgctgtgcttgctgtccgcaactgtgttctccctgctgggtggaagctcggccttcctgtcgcaccaccgcctgaaaggcaggtttcagagggaccgcaggaacatccgccccaacatcatcctggtgctgacggacgaccaggatgtggagctgggttccatgcaggtgatgaacaagacccggcgcatcatggagcagggcggggcgcacttcatcaacgccttcgtgaccacacccatgtgctgcccctcacgctcctccatcctcactggcaagtacgtccacaaccacaacacctacaccaacaatgagaactgctcctcgccctcctggcaggcacagcacgagagccgcacctttgccgtgtacctcaatagcactggctaccggacagctttcttcgggaagtatcttaatgaatacaacggctcctacgtgccacccggctggaaggagtgggtcggactccttaaaaactcccgcttttataactacacgctgtgtcggaacggggtgaaagagaagcacggctccgactactccaaggattacctcacagacctcatcaccaatgacagcgtgagcttcttccgcacgtccaagaagatgtacccgcacaggccagtcctcatggtcatcagccatgcagccccccacggccctgaggattcagccccacaatattcacgcctcttcccaaacgcatctcagcacatcacgccgagctacaactacgcgcccaacccggacaaacactggatcatgcgctacacggggcccatgaagcccatccacatggaattcaccaacatgctccagcggaagcgcttgcagaccctcatgtcggtggacgactccatggagacgatttacaacatgctggttgagacgggcgagctggacaacacgtacatcgtatacaccgccgaccacggttaccacatcggccagtttggcctggtgaaagggaaatccatgccatatgagtttgacatcagggtcccgttctacgtgaggggccccaacgtggaagccggctgtctgaatccccacatcgtcctcaacattgacctggcccccaccatcctggacattgcaggcctggacatacctgcggatatggacgggaaatccatcctcaagctgctggacacggagcggccggtgaatcggtttcacttgaaaaagaagatgagggtctggcgggactccttcttggtggagagaggcaagctgctacacaagagagacaatgacaaggtggacgcccaggaggagaactttctgcccaagtaccagcgtgtgaaggacctgtgtcagcgtgctgagtaccagacggcgtgtgagcagctgggacagaagtggcagtgtgtggaggacgccacggggaagctgaagctgcataagtgcaagggccccatgcggctgggcggcagcagagccctctccaacctcgtgcccaagtactacgggcagggcagcgaggcctgcacctgtgacagcggggactacaagctcagcctggccggacgccggaaaaaactcttcaagaagaagtacaaggccagctatgtccgcagtcgctccatccgctcagtggccatcgaggtggacggcagggtgtaccacgtaggcctgggtgatgccgcccagccccgaaacctcaccaagcggcactggccaggggcccctgaggaccaagatgacaaggatggtggggacttcagtggcactggaggccttcccgactactcagccgccaaccccattaaagtgacacatcggtgctacatcctagagaacgacacagtccagtgtgacctggacctgtacaagtccctgcaggcctggaaagaccacaagctgcacatcgaccacgagattgaaaccctgcagaacaaaattaagaacctgagggaagtccgaggtcacctgaagaaaaagcggccagaagaatgtgactgtcacaaaatcagctaccacacccagcacaaaggccgcctcaagcacagaggctccagtctgcatcctttcaggaagggcctgcaagagaaggacaaggtgtggctgttgcgggagcagaagcgcaagaagaaactccgcaagctgctcaagcgcctgcagaacaacgacacgtgcagcatgccaggcctcacgtgcttcacccacgacaaccagcactggcagacggcgcctttctggacactggggcctttctgtgcctgcaccagcgccaacaataacacgtactggtgcatgaggaccatcaatgagactcacaatttcctcttctgtgaatttgcaactggcttcctagagtactttgatctcaacacagacccctaccagctgatgaatgcagtgaacacactggacagggatgtcctcaaccagctacacgtacagctcatggagctgaggagctgcaagggttacaagcagtgtaacccccggactcgaaacatggacctgggacttaaagatggaggaagctatgagcaatacaggcagtttcagcgtcgaaagtggccagaaatgaagagaccttcttccaaatcactgggacaactgtgggaaggctgggaaggttaagaaacaacagaggtggacctccaaaaacatagaggcatcacctgactgcacaggcaatgaaaaaccatgtgggtgatttccagcagacctgtggtattggccaggaggcctgagaaagcaagcacgcactctcagtcaacatgacagattctggaggataaccagcaggagcagagataacttcaggaagtccatttttgcccctgcttttgctttggattatacctcaccagctgcacaaaatgcattttttcgtatcaaaaagtcaccactaaccctcccccagaagctcacaaaggaaaacggagagagcgagcgagagagatttccttggaaatttctcccaagggcgaaagtcattggaatttttaaatcataggggaaaagcagtcctgttctaaatcctcttattcttttggtttgtcacaaagaaggaactaagaagcaggacagaggcaacgtggagaggctgaaaacagtgcagagacgtttgacaatgagtcagtagcacaaaagagatgacatttacctagcactataaaccctggttgcctctgaagaaactgccttcattgtatatatgtgactatttacatgtaatcaacatgggaacttttaggggaacctaataagaaatcccaattttcaggagtggtggtgtcaataaacgctctgtggccagtgtaaaagaaaatccctcgcagttgtggacatttctgttcctgtccagataccatttctcctagtatttctttgttatgtcccagaactgatgttttttttttaaggtactgaaaagaaatgaagttgatgtatgtcccaagttttgatgaaactgtatttgtaaaaaaaattttgtagtttaagtattgtcatacagtgttcaaaaccccagccaatgaccagcagttggtatgaagaacctttgacattttgtaaaaggccatttcttgggaaaaaaaaaaa

SEQ ID NO: 349 - DNA, 6603 bp, Homo sapiens
gggtccgagcagcggctgcggagccggagctgggcgagggcggctgcggtcccggcggcggcggcggcggcggcagctgcggcgggagaagatggtggcgctggaggcagcagcggctggagcggagctttattcccaggcttggcaccagcgctgtcactagcgccgcctgctcccgcgggcccgcggacccagctgtcaggcaagcccagtggagcaaaatgagagcgcagtgagccgggcccagcttctctcctagccgttccgactcccaccatgaaccacttggaggggtctgcggaggtggaggtgaccgacgaggcggcaggtggggaggtgaacgagtcggtggaggccgacctggagcaccccgaggtggaagaggaacagcagcagccgccgcagcagcagcactatgtgggccgccaccagcgcgggcgagccctcgaggacctccgcgcccagctcggccaggaggaagaggagcgcggggaatgcctggcgcgctcagccagcacggagagcggcttccacaaccacacggacaccgccgagggcgacgtgatcgccgcggcccgcgacggctacgatgcggagcgcgcgcaggaccccgaggacgagagcgcctatgctgtgcagtaccggcccgaggccgaggagtacacggagcaggcagaggccgagcacgccgaggccacgcaccgccgcgcgctgcccaaccacctgcacttccactcgctggagcacgaggaagccatgaatgcggcctactcaggctacgtctacacgcaccggctcttccaccgcggtgaggacgagccctactccgagccctatgccgactacggcggcctccaggagcacgtgtacgaggagataggggacgcgcccgagctggacgcacgcgacggcctgcggctctacgagcaggagcgcgacgaggcggccgcgtaccgccaggaggccctgggcgcgcggctgcaccattacgacgagcgctccgacggcgagtccgacagccccgagaaggaggccgagttcgcgccctacccgcgcatggacagctacgagcaggaggaggacatcgaccagatagtggccgaggtgaagcagagcatgagctcgcagagcctcgacaaggcagccgaggacatgcctgaggccgagcaggacctggagcgtccccctaccccggccgggggtcgccccgacagccccgggctgcaggcgccggcggggcagcagcgggcggtgggccccgcgggcggcggcgaggcggggcagcggtacagcaaggagaagcgcgatgccatctcgctggccatcaaggacatcaaggaggccatcgaggaggtgaaaaccaggaccatccgttcgccttacacccccgacgagcccaaagagcccatctgggtcatgcgccaggacattagccccaccagggactgtgacgaccagaggccgatggacggagattctccgtctcctggcagctcctcccccttgggtgcagagtcatcaagcacatctcttcaccccagtgaccctgtggaagcgtccactaataaagagtcaagaaaaagcttggcttcattcccaacctacgttgaagttccgggaccctgcgaccccgaagacttgatcgatggaatcatttttgccgccaattaccttggctccactcagctgctctcagacaaaactccttccaaaaacgtgcgcatgatgcaggcccaggaagccgtaagcaggatcaagatggcccagaaattagccaaaagcaggaagaaggctcctgaaggcgaatctcagccaatgactgaagtggatctcttcatttctacccagagaatcaaagtgctgaacgccgacacacaggagacaatgatggaccaccctctgaggaccatttcctacattgcggacattgggaacatcgttgtgctgatggcccgccggcggatgcctcgctccaactcccaggagaacgtggaagcgtcccacccatcccaggatgggaaaaggcagtacaagatgatctgccacgtcttcgagtctgaggatgctcagctgattgcacagtccatcggacaggcatttagcgtggcataccaggaattcctcagggccaatgggattaaccccgaagatctcagccagaaggagtatagtgacctgctcaatacccaggacatgtacaacgatgacctgatccacttctccaagtcggaaaactgtaaagatgttttcatagagaagcagaaaggagaaatcctaggtgtggtgattgtggagtctggctggggatccatcctccccaccgtgatcattgccaacatgatgcatggtggccctgcggagaaatctgggaagctgaatatcggtgaccagatcatgtccattaatggcaccagcctggtgggcctgcctctgtccacctgccagagcattattaagggcttaaagaatcagtcccgagtcaagctgaatatcgtgagatgtcctccggtgaccaccgtgttaatcagaagaccagaccttcgctaccagctcggtttcagcgtccagaatggaattatctgcagcctcatgcgagggggaatagctgagagaggaggcgtccgtgtggggcaccggatcattgaaatcaatggacagagcgtcgtggccaccccccacgagaagatcgtccacattctctccaatgctgttggggagattcatatgaagacaatgccagccgcgatgtacaggctgctgacggcccaggagcagcctgtttacatctgaccgcggccacacgcggtggcatgcatggaggactctcctcttcgtggttgtgtttctcgtgctgcatccctgtgtccactgagactttcccctctcgcgcccagcatttggttttacacaggaagagaagaatccacaaggacctctttactctctccgatttgcttttttttttttttttttttcaataccagggaagtttcgtatgcactcccttgaggatggagagcagccagcacccacctggtactgacccaggaccatcctggagggctttctgggtgtgtccagggggtgggctgtcactgcttgagggagaatcctcccttcccaggaggtgcagacttcttaaaaggagctcgcggggcagcaaagcagctgattcagcagtgcctaaaacccagttgctgatccctgctctctgagtttatctgtgggaatgtggtagtacccagggccagcccacgtcattaaggttatgcactgcctgccatgtagttggggcaccatacattatttcttcccagaatctctgagccaaccttaaacctcttctattgctagttctaatttcaacgtatgtgtgttttctaatacgagccttctcaccccaggataaaaggggaaataactgccttgggcaaggacaccatagtgtcacagagagcttggcaattcatggggcatctgaagctttaccaggttgtcctcaagttatcaaccattagataaacacaggcaggtactgtctgcttctctctctctcacacacacacacacacacacagtcccatttgcatatcacccttccctgctcccaccaccagtgagacaagctgaagattaggcacacagatcccctggaaacccacctctctggaaggccccttccctggcaggtggccaggcaggcgggggctgctcagcctcatcctgagagacctgccctctctgcgctgaggcccagcccctccagcaccactttggcttaaagcatcctcctcctggactcccctccctgccgaacacacatcccaggagtctgggaaggagggactgttcccaagaaggcaagctgcaggtgcaattgcgtcttgttttctggcccaaggcaagaccaactttcttctctgctcagggccactaggcggatgtgatattggaaaggccagaatagtacataaaccacaaaattaaggagacaatagcaacctcaagttatgcctcagaatccccagatgtggtccataaacaccctcttgctgccttgtgggcctgagagcatttttggctggtgtggaattgttccgtgttttcatcaggtgcctcatatttatgcttccgtctcagttcagtgtagatgttttagtaatattataattctgagccagttttcacttggtccaaagagcattttgtgttcatgtgaggtgtgatttggctttgcttttgttttgtttcattcatgacctcagtagagacaggggaagagaaactattatattttgtaattaatatagtccctgttctctgcatccgagatatttatgttgtgtctatggaaataggaactcagtgagcaaatggtgggtagcatgtatttatagagagaatggagggattctaaggagggagcaaagtgactataacaagattagggacaagagacttcaaccagagagttctgtgatcaattccccgagatctctgcatcttctgagttttctgcttagaatcagggaagctcagtgcttgacaggaacgagcagtggcactctcagtttcactgtgttacaaaggagccctgaggaagggaggccgctggctgcccaggtgccctggggggaaagggacttctgctgctgcagagagtggcacccggtggggccaggggctctgggatggtccgtaaagctccccaggacttctttgaaggatgctttacagaatgtttctgggagaccagcctcaaggtcaacccatcacaaacgtgaggaccaggaaggaaccatggccagggttctccatttgctgtagagtatctggtgatacagtgagacactaaagagtcatcagccagttcatctttcctctgccaataagagtggatagaacaggaatgaagtgttactggtggtatttcaggcatcaggagccttggaaaatcatcgtaggggcccatgcctgtctgtccctaggcacctgggcagtgccacagaggcccgcccacgactggccaggggacagaactccagtagtgcatccctgtacaacctgcacataacggttatgtatgttcacctaaaggagagaatatactttctattcctattgcacaaaaaccttgtaaactttgagaggtgctgaaaaagccaattctgcaagctctcctagaggactgacattgtaacattagagtgagaagatttctctgccacattcttttgtgttaatccaggtgtgtcttcacacccagtgagtggaagttgctggagctcggtacaggtccacccagctgaagtgggttctttttcccactaccactggggcaagggagtgagcctaggtatggtcacctcagcagccacagtcttaaaagcaagtcgctagattttttgaaagtcccaagagaagtggtggtcttcccttctgtcatcccagtatatatagttatacatgtaaatatctaaataccccatgtaatgggaaggctatgtacagggcagccttcccaaacgctgtgagggcacagagctgctgtggctgctccaccagggtgtgctggtggctcagctttggggttggactcccacgttcacctccccctcctggtccaggcagaggcaccagaacccatcctgccttttctccagtgtgagcatttcagggagccaccatcagccttgggttcatgagaggaagaaacccccaaagaccaatgcctggagcccacttctccagcgacaccttccctcgccagagcaggctcctaggagtgcatggcaggggtgccgggtccctgtgcacgggtttgctttctgaacattgcccatcaacaccgccttcagggagtcccagagtaacctactacctcccccatcgctcctctgcccccctcaccctgtgggcaccaacacctcccgcacacagatgaaaaccatctacagagcccttcccgggtccctcgacccagtggtgtagccgttaccaatgtttacaaccaggggccgcccctccttagatgtgtttactcgcattcacaggccacctgttggtttgagtttcatgtgtctccttccctggcctaggttgacttgagcacacaactcgatctttcttcccctccatcaaggcagtgtgtgaggactgtgtgggaatgacatttcttgtacatacttagcacagcacctagagtatgaacttgtactattgttctgtaaagagggtgaaatagagcttattgtaaagtgtcgggagaagtatagtattgtatttgtaacaatatcgttctttgtatacacaaaactcaatgatctatatataaatataaataaatatataaataaaatatatctacacgtgagcctggaatgtggacaccgcacacccactgaatgtacttccttgacagtctggtcactggtccctccctccctccctcctccgtcccgtggccacagtcatccagtttggggttgtgatgtatttactgtgctatctatcttcctttatttaactgaacgctaatgtctgtataagagttgctgcaacaataaacaagaacttcacctcttaaaaaaaaaaaaaaaaaaa

SEQ ID NO: 350 - DNA, 3979 bp, Homo sapiens
ctcgcctgtcttcaccgcggtccgctcggttcaccgcctgccccctctccctgccgcccggcccggctcgcccagtccagtggctccagtccggatctcgccgccgcccggcccaggtggtgctgatcctgggcacgtccatcctagacctcatcgagctacgcgcgcccttcggcaccacgggcttccgtctcaccatggcgctgtcggtgcccctgctctacagcttggtgcgggccatcagcgaggcgggcgcgcccccgggatcggcaggacccctgctgctgcagccccagcggcaccgcgcggccggatgcttcctgggcacgtgcttggacctgctcgacagcttcacgctggtggagctgatgctggagggccgcgtgccgctgcccgcgcacctgcgctacctgcttatcgccgtctacttcctcaccctcgcctcgccggtgctctggctctacgagctcaacgccgcggccgcagcggctgcatcctggggccaggcctccgggcctggcagctgcagccgccttctgcgcctgctgggcggctgcctggtggacgtgcccttgctggcgctgcgctgcctcctggtggtcagctaccagcagcccctctccatcttcatgctcaagaacctcttcttcctcggctgccggggcctggaggccctggagggctgctgggaccggggcaatcgggcctccccgagtcgggccagagggggctacggtgctccgccctccgcccctccaccacctccgccaccacctcagggaggctcccagctgggccactgcatctcggagaacgaggggggtgctcatggctatgtcaacaccctggctgtggcctctcagaattgagggtgaagggcacgggtccttgtttttgggttgagagtccccaacccccttgtcttctaccttctgtcacctagatttgatcagggtctatttggaagaggtaacccttttcagggctaagggccagggtgttcttctgcaccctggggtgaggacggcttggagggagaccagcagttaacggtgagggaggtaggtgcacttaccctctcctctcttctcctatcctaccccaatcctgacctccaaggggctggtacctctgcttcttgctttgcccacctccactctaattcccatccattaggaggagaggggtgctgggccttggaccttctcccttgcttagaagtgccagcctcttttaggctgtggttagtggccattgtcccatgccttgaaattgacccagaacccactttccactgatgtgtctcttggatttcttccaggtgatagatacaaagtgtatgtctctgtgtgtgtagtgttgttttctcgtgtccaccctgtggccctttgcaatgggtaggagatctggggaggccctgccccctacaccatacttatcaccaccctcctcttttctgcctggatttgtgaccatgaattcccaggaagagctgggcccctgggagctgcccaggtactccccttgaagggagaatctcacccaggatcttcctcaatactgctcctctcttctcagctcagggagaggaggggatccattctctaaggaccaaactgcaccctttcttgggtgagtgagcatttctacctccgtgctttcaacttttgttgcatcatgcactgatgctgcttgcaaaaaatgaagacaaaatactcagaagttgcatttgccatggccactggctccagctggggtttggtgccagtgttattacagggtctgcggagtatcagccattggcttggcctctctctgttcctccctctgcacctagaactcttatccttcctgtggtttggtgccgactgggtcggatctgggcttagagtaatagctttggtgggtttcctggatggatgtgaagttgggcctcccatgggcccaagggagtaggaagccccattccccacctgtccttcctctaggaagtgtagatcagaaagtgaggtggtgacctcccacctctggtctggttaagagtctcactagggccaaggcaggctgcagaactttccctcttcctctcattgagggtgatgacaagagacatccggggactgtgcacttacagtcggtgtggaatgtcactcttgcagtctttgaggcaggataagtatttttacatattttaagggtgcaggaggacagcagctaacaaggccaggaaatactcacttccctccaccctcaacaggatgtggtgggggtgaaacttgaagaatttttgtttccccttctcccttcttacgtttgggaagttttatgtagtgtaacaaactctagacgagttaccagaagatgtggattctagttctgattctgtcactcattggctttgagtgacatatttttatttcctgggcctgttttctcacattaaaaaagtagaagttagatgagtgatctctaaggttgaaggtaatttcagctctcacattcttttgagtttgtggctcttgaaagccctggtcctgatgctccctgtaaaggtggctgggagagaagccagccaggctgcacttgcagaacattccctgctctgtactgggtgtgtgaagccccagcagagaaggccggagggagggcttgggtgcctgggctgggtgtggggcagggcctggcacagctgcagagtgcacagggagggtcagaagtgccaagtcactggccgttaactcagcacccaggccaagcccccgcctcccacttgaagccccctcttacaactgttttgggggcttggagcagaagacacccttgtagacagacataagaggggcagaaggcttgaccagagttctcttgagcctcctcatgctctcagagcagggaacagcgggggaaaatgtttacactccatgcacaatctgtgcttccagtccctcaccctatgtggcccaatagctggctggatttcacacttaattggtatttttttctgccttcttcccctgcccccactgactcctctcctctccctttgattgtactcaaggttctggggcctgggccctgggtgggtaccaacagctgctcgctgttcccatgtcctctctccagctttgctgtgtttctctgctacctaatctcagtgactgtgaaaggacattgtgtctgagccatggccagccgctggctggccccctgatctgccccccttctattgtttggatggccatctcctgctgggcctccctgactgtaaaatctctgtactgtttgttaggtttttggtgggaggctgtgataagttccaatgagctgccacttccctggatatgtcaagaagctgatggcaacttggccaattctggcagatatcaggcccccagttcagccccagtcaccctcttttacacatgtgggtcaaccactgtgtgctcagagggtcagtcccttcctctgctgtgtttttcttgagtccttgcactcacttcccctgccccagtcacgatgacccctaaagcttcctttgcccttgctttctagggcatccctagtgaaggggcaaacctgagatttctccgtggacctgacagccaaggcagggcactgtctcctgaggccagtgccagcacgtgcatggttcacagaaaaggatcctgggctcagaatctcgagaaccgcctgctcctaacaattcagcaagtcaggggcttcctctctgttagtccccaaatccttacttattttaaaaagactagaccctctctaaagactgttccattttaacatgtcctgattctgcatccgtgggttttgtgaaagagagctagctggcggttagagcctggaagaaggagggaagtggcacctcactagcatttatcacttttttccttctctttttaaaaataaaaccagactctgttctgaaaataaaaaacttgagacttgtaaaaaaaaaaaaaaaaaa

SEQ ID NO: 351 - DNA, 5507 bp, Homo sapiens
ggggacaagaggaggcttgtggtaagtaaagcaagagtgcctagcaactcaaatctctccttattcaacaactgggacactccgagctcctccgagcttatctttgagcgctgggcacagagagcctgcttgacctttggtcaagtgagcaacaaaaatttcatcctgtgactcaaaagaactccaaagggtagaggcctctagagaagataaaaagatcaggagcaggcatggtaggccatcaggagtgcatcatggaagaggacaatcgcgctccccaattgtggcgcaagaccctgactgcacctgccccatttgctgatgaaaccaactgccagtgtcaagcaccccatgaaaaactgaccattgctcaggcccgcttaggaacaccagctgacaggcctgtcagagtatacgccgatggaatatttgacctcttccactcaggtcatgcaagagcccttatgcaagcaaaaacactgtttcccaacagctacttgttggtaggagtttgcagtgatgatctcacccacaaattcaaaggtttcaccgtgatgaatgaagccgagagatacgaagctctcagacactgtcgctacgtagacgaagttatcagagatgctccctggacactcacgccagagtttctggaaaaacacaagattgactttgtggctcatgatgacattccgtattcctctgctggctctgatgatgtttacaagcacataaaggaagcagggatgttcgttccaacgcagagaacagaaggcatctcaacatcggacatcattaccagaattgttcgtgactatgatgtttatgcccgacgtaacctccagagagggtatacagccaaggaactgaatgtcagctttataaatgagaagaggtaccgtttccagaaccaagtggacaaaatgaaggaaaaagtcaagaatgtggaggaaagatcaaaggaatttgtgaacagagtggaagaaaagagccatgatctaattcaaaagtgggaagagaagtcaagggaattcattggcaacttcctagaactgtttggacctgatggagcatggaagcagatgttccaggagaggagcagccggatgctgcaggccttatccccgaagcagagccctgtgagcagcccaacccggagccggtccccttcccgctccccatcgcccaccttctcatggcttccactcaaaacctcacccccttcctcacccaaagcagcctcagcctctatcagcagcatgagcgagggggatgaggatgaaaagtagaggctgctgggaggcaagagccgcaccatgcaggatggggaggagggcgagagtcacagggttgcctgggtggtgtttgaagggtaatagtcacaggagctgcagctcagcagagagaccctgaactctgctaagggaaggtcttgggaccagttctctctcactctccgtacagctgaagagttgggcgaggtgcagagacttctagctggacaacctacacaaaccttagcgtctagagtcactctaaccttgctaaggaaggatgcagagttccctagagagacttgcactgatggggtgacttctgctttggtccttccaccacccccaccaagtaaaccacctgtggcagcggctgttccctcaacctgctacttctgcgtccataagggtcctgcacgttgcctcccaccaccccagctctgccagaataaaattgtttccaatagaggtggcaaagtgcttctgaaatagtcgagaaaaagacagattccaacctcctcagtccagccactgagacctgatgttggaacgcatcagctccttccagttccatgaatgtggctcatagacaaagccttgctttaggctggttataaaaggtcatctagtgtgaaccttaactttttattcaaaggacagttttgtcaagaactccacgtaaggcctgatgtgctcctggttgtactttctcatcactggtttgacttcattgttttgcagaaattaccttaatccgtgggaactgcaacaaagaaaaacttcctaatatataaaaaagaggagctgctttgctttgcctccaggtttagcggacaagaaatgtctcctgaagcttctccttaaaggatgctattatggaatggcttttcccatttctgaccagttaacagtttcatagacctcaagtaacagtttgaggtatcaaacatagtataccaatagggggtgctacctgcacgtatctgttctatatatgctccaatatgtcatccccgggtgtatcccatgtgcaatatgagtatatagtggtggcattttataatagaccccactcctgcgctccaccataatactcctctgaaatccttggtctcaagaaacatctgttctcttgtgacttgggcactttgtcaagcttattccagattcctgtggaaacgttttatcccaaccaggaaattagtattttgttctcgtggcctcctataacatttttgggtgaaggagaactcaagactttttacagagaactgtgggctcagttatgatctcagcatctgaatggtctaggtagtatcaccattatctctggccctaggtttgccaagtaggatgaagactctaagtgttcctgctgagttgtccaaaggtcctgctccttagtcacctgtgcgaaatgagcagggagagttaaggcatagaaccaaactctttgggttattgtatgggtatgccagtaaattcagacacagagctggggtctgactgaatagaggcccaaaccagcaacttgtaggcagagcccagaatctcttgtgatagaaataccccttttcagaggccttgggaaccagccttctaggtgacaaggggacaaccagtgaaggaaggcggcatgtctttccccttcttgttggggttgaactacctccctatccacttggagatgagtgctgtctgctgtgaagcaaaactatgaggctgagctggcttggaacctctttgttcttggcactttccttctccaggactctgggaagcactcatatgggacagagggctggcaggaacatggcatgtgaagaagaaaacttctttttgcagtcaagggccacccagaatattgctcttcagagagggacaagggcctcattcttccatttggtctctgtcttccatcatgcactcaggtcaagccatgcaagtctgcctaccatttgagttagttggcacttgtagcagtgaaggatgaggccagccaggcaagggaaggtggcgggaacaagggaagagaaaaggaggaaagaagttcctggagggaggaaaggaggataaagaaaatctgctctcataaaaccatttcaggacctcactttacaggtgagactctcttgggaaggcctttgtgcccctgctccatggcccagggcagatagattcacttttacctgaatcttatactctggagcaaatagtgtatcaggctgactatacatttgcaggccttacacgccatactgacaggtgccacttacgtgactcatcagataatgtcaccattgctgccaattatgggaaataactaatgcctattccagggatgagcccaaaccacacataaatgggttctaaatctcaccctcctaacctgcagtgagtccccccgttccaccctcttgaggctgcaaatctactgagaaggaatgggaaggattctacaacccaacttttgatactttttggccatctctcagtctctcccagcccctacccccacaccacctccctgctcccaggcagagaccgggttgcactttgttagggccagcaggtcaactgtaatggccaagagtgagttaaggctggaatgagaaatatgccccaagcttggaggggtaagcaggaataacacaaagcaaggaaagagattctttttgccctagtgaggaaaggaagcttcagaatgagggctggaggatagcaacttaggactgcagaagggggcagcttatgaagatgggagaaagtgggactgaagttgtaggggagcaggagggtagtgattttccgcttttctttctttctttcttttactttctttctctttctttctctctctctctctttctttttctttcttctttctctttttctttcctctttttctttctttctttttctttctctttcttccttctttctttcattcttctttgttctttcttctttctttctttttttttttttttgagatggagttttgctcttgttgctcaggctggagtgcaatggcacaatctcggctcactgcagcctccacctcccaggttcaaggggttcttctgcctcagcctcccaagtagctgggattacaggtgcctgccacgacacccagctaatttttgtatgtttagtagagacggggtttcaccatgttggccaggctggtctcaaattcctgacctcaggtgattctcccgcctcggcctcccaaagtgctgggattatgagcacgagccacggcgtccagccgattttccgctccctttcaagtgttaactcaccccctgacaggtgaagagggaagggttccttttacgcacaaccaaggttagcaaatgcccatgcaggatatggggtccctgcctctctggttgcttcatttcagcacttctatattagctgcttatggggaccctaaaatgaactggtcacccctccaccagctaagaaacaagggtgggattgctgtgccataagtcacactgaacgacttgcttctggcaagcatgctcctgtgtgtcaggaccttaccaaggcaaagaaatgccaggctcaagaggagcaggacgtgagacattggcctggcttctaacctggtctgagtggaagagacacagcttagggatttcagttttgctcttaggctactagatactgttatttcaccccctgagggagggacaggaagagcacggatttattttctctccgtcttcagtacttattttagcatctagtcataccccagggagagatgcgagacggtgtcactggctcagctgaagcagatgagcccgtctctagcagagatgtgcctgtttcttaggcatccgttcagcactagtcttggccatcagatttttaaaaaagaaatagctcatgaggcatttgcaacttctcctctctagacttctttctagttttcctctgttgtgtcactgcgatgtgtccagggacaaagccataagtagagcatacatacttaagactatgctgtacatataagacaagacctgtctgggttaaagcacgaccttatgcccaagcatttactctggtgctgaataacgcgaactactggaatcagcctcccccaactctgcgcgccccctgcccccctgctcctatcccattcttgctctcaaatggaccacaccattctcaactcgtttataaataaagggatgcagaattgcaaaaaaaaaaaaaaaa

SEQ ID NO: 352 - DNA, 2718 bp, Homo sapiens
ataaatacagcttgactcagccactgtatgactgactccccggggacatgaggtggatactgttcattggggcccttattgggtccagcatctgtggccaagaaaaattttttggggaccaagttttgaggattaatgtcagaaatggagacgagatcagcaaattgagtcaactagtgaattcaaacaacttgaagctcaatttctggaaatctccctcctccttcaatcggcctgtggatgtcctggtcccatctgtcagtctgcaggcatttaaatccttcctgagatcccagggcttagagtacgcagtgacaattgaggacctgcagatttaccacgagatggacaacattgccgcagactttcctgacctggcgaggagggtgaagattggacattcgtttgaaaaccggccgatgtatgtactgaagttcagcactgggaaaggcgtgaggcggccggccgtttggctgaatgcaggcatccattcccgagagtggatctcccaggccactgcaatctggacggcaaggaagattgtatctgattaccagagggatccagctatcacctccatcttggagaaaatggatattttcttgttgcctgtggccaatcctgatggatatgtgtatactcaaactcaaaaccgattatggaggaagacgcggtcccgaaatcctggaagctcctgcattggtgctgacccaaatagaaactggaacgctagttttgcaggaaagggagccagcgacaacccttgctccgaagtgtaccatggaccccacgccaattcggaagtggaggtgaaatcagtggtagatttcatccaaaaacatgggaatttcaagggcttcatcgacctgcacagctactcgcagctgctgatgtatccatatgggtactcagtcaaaaaggccccagatgccgaggaactcgacaaggtggcgaggcttgcggccaaagctctggcttctgtgtcgggcactgagtaccaagtgggtcccacctgcaccactgtctatccagctagcgggagcagcatcgactgggcgtatgacaacggcatcaaatttgcattcacatttgagttgagagataccgggacctatggcttcctcctgccagctaaccagatcatccccactgcagaggagacgtggctggggctgaagaccatcatggagcatgtgcgggacaacctctactaggcgatggctctgctctgtctacatttatttgtacccacacgtgcacgcactgaggccattgttaaaggagctctttcctacctgtgtgagtcagagccctctgggtttgtggagcacacaggcctgcccctctccagccagctccctggagtcgtgtgtcctggcagtgtccctgcaagaactggttctgccagcctgctcaattttggtcctgctgtttttgatgagccttttgtctgtttctccttccaccctgctggctgggcggctgcactcagcatcaccccttcctgggtggcatgtctctctctacctcatttttagaaccaaagaacatctgagatgattctctaccctcatccacatctagccaagccagtgaccttgctctggtggcactgtgggagacaccacttgtctttaggtgggtctcaaagatgatgtagaatttcctttaatttctcgcagtcttcctggaaaatattttcctttgagcagcaaatcttgtagggatatcagtgaaggtctctccctccctcctctcctgtttttttttttttgagacagagttttgctcttgttgcccaggctggagtgtgatggctcgatcttggctcaccacaacctctgcctcctgggttcaagcaattctcctgcctcagcctcttgagtagcttggtttataggcgcatgccaccatgcctggctaattttgtgtttttagtagagacagggtttctccatgttggtcaggctggtctcaaactcccaacctcaggtgatctgccctccttggcctcccagagtgctgggattacaggtgtgagccactgtgccgggcccgtcccctccttttttaggcctgaatacaaagtagaagatcactttccttcactgtgctgagaatttctagatactacagttcttactcctctcttccctttgttattcagtgtgaccaggatggcgggaggggatctgtgtcactgtaggtactgtgcccaggaaggctgggtgaagtgaccatctaaattgcaggatggtgaaattatccccatctgtcctaatgggcttacctcctctttgccttttgaactcacttcaaagatctaggcctcatcttacaggtcctaaatcactcatctggcctggataatctcactgccctggcacattcccatttgtgctgtggtgtatcctgtgtttccttgtcctggtttgtgtgtgtgtgtgtgtgtgtgtgtgtgtgtgtgtgtgtgtttgtgtgtgtgtgtctgtctattttgtatcctggaccacaagttcctaagtagagcaagaattcatcaaccagctgcctcttgtttcatttcacctcagcacgtaccatctgtccttttgttgttgttttgtttttgtttttttgcttttaccaaacatgtctgtaaatcttaacctcctgcctaggatttgtacagcatctggtgtgtgcttataagccaataaatattcaatgtgagtttca

SEQ ID NO: 353 - DNA, 4514 bp, Homo sapiens
aaaaaaaaaaaaaagaaaaaaaagaaaaaaaaaaggaggaggaggaggagggtgagagagaagctgggagagcagagaaaaggggccaccggtcgcccccccgcttccccgcacgcgctctccagccgcggccgcccgcctgccgcggtcaccccggcctctgcctctgtcccccagtgatcggatcaaggcgctgagcgaggccctgcctgcggggcggccatgcggcggtgacaggagcgcgaccgacacgcacgggcccctcgccccctctcgcctcccgtccgctcgccagctcccctcagccgaggctgctccgcggcggccgcagcccgcgcgcggcccacactcgcctcccctcggcacccccggccccggagctgcctggaggcggccgcactcggggatcatggcccaagttgcaatgtccaccctccccgttgaagatgaggagtcctcggagagcaggatggtggtgacattcctcatgtcagctctcgagtccatgtgtaaagaactggccaagtccaaagccgaagtggcctgcattgcagtgtatgaaacagacgtgtttgtcgtcggaactgaaagaggacgtgcttttgtcaataccagaaaggattttcaaaaagattttgtaaaatattgtgttgaagaagaagaaaaagctgcagagatgcataaaatgaaatctacaacccaggcaaatcggatgagtgtagatgctgtagaaattgaaacactcagaaaaacagttgaggactatttctgcttttgctatgggaaagctttaggcaaatccacagtggtacctgtaccatatgagaagatgctgcgagaccagtcggctgtggtagtgcaggggcttccggaaggtgttgcctttaaacaccccgagaactatgatcttgcaaccctgaaatggattttggagaacaaagcagggatttcattcatcattaagagaccttttttagagccaaagaagcatgtaggtggtcgtgtgatggtaacagatgctgacaggtcaatactatctccaggtggaagttgtggccccatcaaagtgaaaactgaacccacagaagattctggcatttccctggaaatggcagctgtgacagtaaaggaagaatcagaagatcctgattattatcaatataacattcaaggcccttctgaaactgatgatgttgatgaaaaacagcccctatcgaagcctttgcaaggaagccaccattcttcagagggcaatgaaggcacagaaatggaagtaccagcagaagatgatgattattctccaccgtctaagagaccaaaggccaatgagctaccgcagccaccagtcccggaacccgccaatgctgggaagcggaaagtgagggagttcaacttcgagaaatggaatgctcgcatcactgatctacgtaaacaagttgaagaattgtttgaaaggaaatatgctcaagccataaaagccaaaggtccggtgacgatcccgtaccctcttttccagtctcatgttgaagatctttatgtagaaggacttcctgaaggaattccttttagaaggccatctacttacggaattcctcgcctggagaggatattacttgcaaaggaaaggattcgttttgtgattaagaaacatgagcttctgaattcaacacgtgaagatttacagcttgataagccagcttcaggagtaaaggaagaatggtatgccagaatcactaaattaagaaagatggtggatcagcttttctgcaaaaaatttgcggaagccttggggagcactgaagccaaggctgtaccgtaccaaaaatttgaggcacacccgaatgatctgtacgtggaaggactgccagaaaacattcctttccgaagtccctcatggtatggaatcccaaggctggaaaaaatcattcaagtgggcaatcgaattaaatttgttattaaaagaccagaacttctgactcacagtaccactgaagttactcagccaagaacgaatacaccagtcaaagaagattggaatgtcagaattaccaagctacggaagcaagtggaagagatttttaatttgaaatttgctcaagctcttggactcaccgaggcagtaaaagtaccatatcctgtgtttgaatcaaacccggagttcttgtatgtggaaggcttgccagaggggattcccttccgaagccctacctggtttggaattccacgacttgaaaggatcgtccgcgggagtaataaaatcaagttcgttgttaaaaaacctgaactagttatttcctacttgcctcctgggatggctagtaaaataaacactaaagctttgcagtcccccaaaagaccacgaagtcctgggagtaattcaaaggttcctgaaattgaggtcaccgtggaaggccctaataacaacaatcctcaaacctcagctgttcgaaccccgacccagactaacggttctaacgttcccttcaagccacgagggagagagttttcctttgaggcctggaatgccaaaatcacggacctaaaacagaaagttgaaaatctcttcaatgagaaatgtggggaagctcttggccttaaacaagctgtgaaggtgccgttcgcgttatttgagtctttcccggaagacttttatgtggaaggcttacctgagggtgtgccattccgaagaccatcgacttttggcattccgaggctggagaagatactcagaaacaaagccaaaattaagttcatcattaaaaagcccgaaatgtttgagacggcgattaaggagagcacctcctctaagagccctcccagaaaaataaattcatcacccaatgttaatactactgcatcaggtgttgaagaccttaacatcattcaggtgacaattccagatgatgataatgaaagactctcgaaagttgaaaaagctagacagctaagagaacaagtgaatgacctctttagtcggaaatttggtgaagctattggtatgggttttcctgtgaaagttccctacaggaaaatcacaattaaccctggctgtgtggtagttgatggcatgcccccgggggtgtccttcaaagcccccagctacctggaaatcagctccatgagaaggatcttagactctgccgagtttatcaaattcacggtcattagaccatttccaggacttgtgattaataaccagctggttgatcagagtgagtcagaaggccccgtgatacaagaatcagctgaaccaagccagttggaagttccagccacagaagaaataaaagagactgatggaagctctcagatcaagcaagaaccagaccccacgtggtagacctcttccctcctaggcttaaagtatcagtggttgagaagagcttttcggacctgttactaccccaagctgtgtaatatacttgtataacagaaataccttctatacaaacctttttttctacttttagatagaaatgtctactttttcagcagttctgtgaattaaagagcagagtgactgtgggtctggaatggctggtgtacttgggaatgtactatcaggattttacagcaatgctgggaaatgacagggaaaatgacaggaatgaatctcaccagattttttatgtactcagcagagccttgagttacggtgtttattttccaatcaagtgaagatatctcctacttctcctactggaacatctcagcttctgcagtgaagaaaaattcctgtgatagttcagttctttagtttttctatttgaaaaaaaaaaatcatttaaatgatcctttgttcacggctctccttaatgactgagtgaacagttcctatctgtatatttgactaaaccttttcctaagctatctctcatggttcctatgtttttttatcataattaaaagcaaaaccatctggatcacctaacagtcagaggtcagtatctcagcgtgtgaattatagaggaaatacagagagaacctcttccacttttacttttcgtccaaataaaatgcatggtgtaccagaagttgaagatcgggttgaggattggggctagctcgatgacactaaggccccaacatcgcgggacctgctgtggcgcggattcttaggaacgctgttctagccggccccctctccaggggtcgccgtggccggcattatttcctagttcttcttgtaaccctgaggtgccagcgcggggagtgaggaggggtcagggggctaaggatgcaacctctgacgttctgcgccttcctaggagagtcttacatgtgttgagatttcacaagcaatgcgagttgtaaaataccagctctacaagaagctaggctctgtgacggcatagttttcagtagctttatcacaatattcacaatggagaattatatgacatggtagcagaaataggcccttttatgtgttgcttctattttacctcaaattgtagatatagggtaatcaataaaatccatccatgcctttcacacactaaaaaaaaaaaaaa

SEQ ID NO: 354 - DNA, 5786 bp, Homo sapiens
actgacttcgtgccctccatgttccttgacagcctgggcctctcctactggattaatacctgatgagtacctgatcacgcaacagtgaaacaacacaagaaattgaagccaaggaagcttgtgattggctacgggcaactggtttcccccagtatgcacagctttatgaagatttcctgttccccatcgatatttccttggtcaagagagagcatgattttttggacagagatgccattgaggctctatgcaggcgtctaaatactttaaacaaatgtgcggtgatgaagctagaaattagtcctcatcggaaacgaagtgacgattcagacgaggatgagccttgtgccatcagtggcaaatggactttccaaagggacagcaagaggtggtcccggcttgaagagtttgatgtcttttctccaaaacaagacctggtccctgggtccccagacgactcccacccgaaggacggccccagccccggaggcacgctgatggacctcagcgagcgccaggaggtgtcttccgtccgcagcctcagcagcactggcagcctccccagccacgcgccccccagcgaggatgctgccaccccccggactaactccgtcatcagcgtttgctcctccagcaacttggcaggcaatgacgactctttcggcagcctgccctctcccaaggaactgtccagcttcagcttcagcatgaaaggccacgaaaaaactgccaagtccaagacgcgcagtctgctgaaacggatggagagcctgaagctcaagagctcccatcacagcaagcacaaagcgccctcaaagctggggttgatcatcagcgggcccatcttgcaagaggggatggatgaggagaagctgaagcagctcaactgcgtggagatctccgccctcaatggcaaccgcatcaacgtccccatggtacgaaagaggagcgtttccaactccacgcagaccagcagcagcagcagccagtcggagaccagcagcgcggtcagcacgcccagccctgttacgaggacccggagcctcagtgcgtgcaacaagcgggtgggcatgtacttagagggcttcgatcctttcaatcagtcaacatttaacaacgtggtggagcagaactttaagaaccgcgagagctacccagaggacacggtgttctacatccctgaagatcacaagcctggcactttccccaaagctctcaccaatggcagtttctccccctcggggaataacggctctgtgaactggaggacgggaagcttccacggccctggccacatcagcctcaggagggaaaacagtagcgacagccccaaggaactgaagagacgcaattcttccagctccatgagcagccgcctgagcatctacgacaacgtgccgggctccatcctctactccagttcaggggacctggcggatctggagaacgaggacatcttccccgagctggacgacatcctctaccacgtgaaggggatgcagcggatagtcaatcagtggtcggagaagttttctgatgagggagattcggactcagccctggactcggtctctccctgcccgtcctctccaaaacagatacacctggatgtggacaacgaccgaaccacacccagcgacctggacagcacaggcaactccctgaatgaaccggaagagccctccgagatcccggaaagaagggattctggggttggggcttccctaaccaggtccaacaggcaccgactgagatggcacagtttccagagctcacatcggccaagcctcaactctgtatcactacagattaactgccagtctgtggcccagatgaacctgctgcagaaatactcactcctaaagctaacggccctgctggagaaatacacaccttctaacaagcatggttttagctgggccgtgcccaagttcatgaagaggatcaaggttccagactacaaggaccggagtgtgtttggggtcccactgacggtcaacgtgcagcgcacaggacaaccgttgcctcagagcatccagcaggccatgcgatacctccggaaccattgtttggatcaggttgggctcttcagaaaatcgggggtcaagtcccggattcaggctctgcgccagatgaatgaaggtgccatagactgtgtcaactacgaaggacagtctgcttatgacgtggcagacatgctgaagcagtattttcgagatcttcctgagccactaatgacgaacaaactctcggaaacctttctacagatctaccaatatgtgcccaaggaccagcgcctgcaggccatcaaggctgccatcatgctgctgcctgacgagaaccgggaggttctgcagaccctgctttatttcctgagcgatgtcacagcagccgtaaaagaaaaccagatgaccccaaccaacctggccgtgtgcttagcgccttccctcttccatctcaacaccctgaagagagagaattcctctcccagggtaatgcaaagaaaacaaagtttgggcaaaccagatcagaaagatttgaatgaaaacctagctgccactcaagggctggcccatatgatcgccgagtgcaagaagcttttccaggttcccgaggaaatgagccgatgtcgtaattcctataccgaacaagagctgaagcccctcactctggaagcactcgggcacctgggtaatgatgactcagctgactaccaacacttcctccaggactgtgtggatggcctgtttaaagaagtcaaagagaagtttaaaggctgggtcagctactccacttcggagcaggctgagctgtcctataagaaggtgagcgaaggaccccctctgaggctttggaggtcagtcattgaagtccctgctgtgccagaggaaatcttaaagcgcctacttaaagaacagcacctctgggatgtagacctgttggattcaaaagtgatcgaaattctggacagccaaactgaaatttaccagtatgtccaaaacagtatggcacctcatcctgctcgagactacgttgttttaagaacctggaggactaatttacccaaaggagcctgtgcccttttactaacctctgtggatcacgatcgcgcacctgtggtgggtgtgagggttaatgtgctcttgtccaggtatttgattgaaccctgtgggccaggaaaatccaaactcacctacatgtgcagagttgacttaaggggccacatgccagaatggtacacaaaatcttttggacatttgtgtgcagctgaagttgtaaagatccgggattccttcagtaaccagaacactgaaaccaaagacaccaaatctaggtgatcactgaagcaacgcaaccgcttccaccaccatggtgtttgtttctagaacttttgccagtccttgaagaatgggttctgtgtctaatcctgaaacaaagaaaactacaagctggagtgtaggaattgactatagcaatttgatacatttttaaagctgcttcctgtttgttgagggtctgtattcatagaccttgactggaatatgtaagactgtgcaaaaaaaaaaaaaaaatttatgtgtattcttattcaaattgcttctgagaagcaaaactctttaaatacattatggaagataatgaagatacttcattctcttgtgatatcagtgtatgcgtacctgtgtcgctttatttgcagtgtgttgagggactggtgtatccactggaatagttggtactcttggatgtgttttctcaccaagatgagcaaagaaaggtttgcacagaggagtgtgaatgtgtgtttgttgctggctgaatggcaatagatgtctaaggtggattcagtgtctggcacactgagacacctccaagaaggagattgatgcatcaggttcagtttaacctggaatatctgactacccctgaatccacccagaaagggggcccaacacccttgtccatttatgggtattttttttcgaagttattaagcatattccttttccacgaacctcttctgtactttgattgtaataggttggctcttacacccattccaaatgcagtttatttttagacccgattgcaaatagtgatgtagttttaaccagtatggattagttcagggatgaactgctccctctagccttactggctctgatccacagggttttgttttgttttgttttgttttttgtttaagtcgagatataaaaactgaacacgataacacttactcttaaatcaagcatcaacactttttccctgttagaattctttgcatttttgtgtttgtaacagaaacgccttaagacactatgtttgggaatataggaaactatgtgtgtcccaaggaaatccctgtaaatttaactcacctacaaaaggctttttccccgcctttggttgttaacggcattcctgaaagccacatgtgtttattcattgggcttgttcttatcagcaaataggttttctggttttatgactttttgtcttattttatttttcctacatttctttttttttttttttcctttagaatgccctggaaatatatttaagtggtaatgaaaaatagtaatcatagtaaaacgcaacaagaagaaaaccaacccaaaccagtgaagttttttagaacctttagaagggtggtctttattcaggttttactgtaatggtaaggattgactcaagagacagtattagtaaatttattgtgtatggatcaaaagtgaataatgtatgaatgagagctgtaagaaggatttttattttgttataatttagttaccattttcagtgttatttcaaaggttctttgaagaattttggggcagggcatcagattagagttttaaaatttgagtattttggatatcagtgttcctcatgaagatatacatggatattcaattttgatggcttccagatttgtaagattgtatgttgtatataccattctattaagaaacatgtccactgtgctttcaaacatagataaagcatgataaagattattatttaagatatacttgtatttatacctcagatattcttttgggttttgtacctcaaggcttttttcttcttattgtaaatacactttacgtgaatacagtctaagtgaagaaaataaataaaaggaagaggtttataacttgctctatatctgtacagattataatcaataagtgcactattattaaatgtttaaagtaagggaaaagtctgggctgccttccttaatattgcatctcactcccacccttaaaaccacagattgcaaagcatagcattttagcatcaactacaatcaaaagagcgatttgctgaaggaaaaatcggactgcaaatcattccaaggccaaactgcaactgagccacccactcccaaacaggaaaccctggtgaaggttcaggaagcacggagattctctccaacaaaggtccagttaggaaacgacgctgagaggatgacgacaacgtgcaacagcagaaagatgcttgcaagcagagtcagggtcaccagtgaatgccacaaaagttctctttcccactgtttaatttgacaagagaagaatttgaaggatatgaacattttcaagaactctgctgaggtcacttagagcgccatcacaacttatttgtgtgactaattgcctagattgtaagctctttgagggcagggcttgtctcttacacatctttataatcccctgcagcggctttcagtattttgtacttgtaggcacctaataaatttattatttgctatactg

SEQ ID NO: 355 - DNA, 2621 bp, Homo sapiens
gcttgcgcagccttcgctagccccgccccgtcctattcgggctcccgcctctgttcagttccagagacaattcatgggtcttggggccaccgaggcgctgtccctgaccaccagcacgagacccctttctatcgcgccagtcctgtggtctccgcacctctccagctcctgcacccccggcccccgtggttcccagccgcacagtagcgtgtcctgggtagcgtgaggacccacggggctgggcaggtgccacgagcccgccgcctcttcgccgcccgccgcctctcctcctctcccgcccgccgcctggccctcccctaccaggctgagcctctgggtgccagaagcgcggggcctccgggagaatacgtgcggtcgcccgctccgcgtgcgcctacgccttctgctccagttgctttcccaattgagcggaaaagccggggcatgttgccggggccctgggcgggacggttgtgccctgcagcccgaagcccgccggggcaccttcccgcccacgagctgcccagtccctctgcttgcggcccctgccaacgtcccacaggacactgggtccccttggagcctccccaggcttaatgattgtccagaaggcggctataaagggagcctgggaggctgggtggaggagggagcagaaaaaacccaactcagcagatctgggaactgtgagagcggcaagcaggaactgtggtcagaggctgtgcgtcttggctggtagggcctgctcttttctaccatggcagcccagggctatggctattatcgcactgtgatcttctcagccatgtttgggggctacagcctgtattacttcaatcgcaagaccttctcctttgtcatgccatcattggtggaagagatccctttggacaaggatgatttggggttcatcaccagcagccagtcggcagcttatgctatcagcaagtttgtcagtggggtgctgtctgaccagatgagtgctcgctggctcttctcttctgggctgctcctggttggcctggtcaacatattctttgcctggagctccacagtacctgtctttgctgccctctggttccttaatggcctggcccaggggctgggctggcccccatgtgggaaggtcctgcggaagtggtttgagccatctcagtttggcacttggtgggccatcctgtcaaccagcatgaacctggctggagggctgggccctatcctggcaaccatccttgcccagagctacagctggcgcagcacgctggccctatctggggcactgtgtgtggttgtctccttcctctgtctcctgctcatccacaatgaacctgctgatgttggactccgcaacctggaccccatgccctctgagggcaagaagggctccttgaaggaggagagcaccctgcaggagctgctgctgtccccttacctgtgggtgctctccactggttaccttgtggtgtttggagtaaagacctgctgtactgactggggccagttcttccttatccaggagaaaggacagtcagcccttgtaggtagctcctacatgagtgccctggaagttgggggccttgtaggcagcatcgcagctggctacctgtcagaccgggccatggcaaaggcgggactgtccaactacgggaaccctcgccatggcctgttgctgttcatgatggctggcatgacagtgtccatgtacctcttccgggtaacagtgaccagtgactcccccaagctctggatcctggtattgggagctgtatttggtttctcctcgtatggccccattgccctgtttggagtcatagccaacgagagtgcccctcccaacttgtgtggcacctcccacgccattgtgggactcatggccaatgtgggcggctttctggctgggctgcccttcagcaccattgccaagcactacagttggagcacagccttctgggtggctgaagtgatttgtgcggccagcacggctgccttcttcctcctacgaaacatccgcaccaagatgggccgagtgtccaagaaggctgagtgaagagagtccaggttccggagcaccatcccacggtggccttccccctgcacgctctgcggggagaaaaggaggggcctgcctggctagccctgaacctttcactttccatttctgcgccttttctgtcacccgggtggcgctggaagttatcagtggctagtgaggtcccagctccctgatcctatgctctatttaaaagataacctttggccttagactccgttagctcctatttcctgccttcagacaaacaggaaacttctgcagtcaggaaggctcctgtacccttcttcttttcctaggccctgtcctgcccgcatcctaccccatccccacctgaagtgaggctatccctgcagctgcagggcactaatgacccttgacttctgctgggtcctaagtcctctcagcagtgggtgactgctgttgccaatacctcagactccagggaaagagaggaggccatcattctcactgtaccactaggcgcagttggatataggtgggaagaaaaggtgacttgttatagaagattaaaactagatttgatactgaacacaaaaaaaaaaaaaaa

SEQ ID NO: 356 - DNA, 9333 bp, Homo sapiens
tggtgccggtttccgccgagctggagcgcgcgggccacggcttctctggggacgcagaagcgagaagcggggacctcggcgcgcgccccgcgtcccgctcttcctgcccgcgccccggcccccggcccgcgccccggccgccggcatggtgctgctggccgggaccgggccggagggcggcggggcgcgctgcatgaccccaccaccgccgtccccaccccggggcgcgcaggtcgaggaggaccccgctgactacgaagagtttgaggacttctcgagtctgccagacacccgcagcatcgcctcggacgactctttctaccctttcgaggacgaggaggagcacggcgtcgagagcgcggagagcgtcccggagggcgtcccggaaagcgtcccggagacggcgaccctcctgcgcgccgcctgcgccaacaacgtggggctgctgcggacgctggtgcggcgcggggtgagcgtcgaggaggcgcaggagactgaccgcaacggcaggaccggccttattgtcgcctgctaccacggctttgtggataccgtggtggccttagcagagtgcccccacgttgacgtcaactggcaggacagcgaggggaacacagccctaatcacagctgcacaggcagggcacgctatcatcactaactacttgttgaactatttccctggtcttgaccttgaaaggaggaacgcgttcgggttcaccgccctgatgaaagccgccatgcagggtcgaacggactgcatccgagccctgatgctagcaggggcggatgtccacgcgagggacccccgccgtgggatgtcgccgcaggagtgggccacttacacgggccgcgtggatgccgtccgtctcatgcagaggctgctggagcgcccctgcccggagcagttctgggagaagtaccggcccgagctgccgccgccccctgaagcggcgcggaagcccgcgggctccaagaactgcctgcagaggctcacagactgcgtgctgtccgtgctgacgccgcgctccgtgcggggcccggaggacgggggcgtcctggaccacatggtccggatgaccacgagcctctacagccccgccgtggccatcgtgtgccagaccgtgtgccctgagagccctccgagcgtggggaagaggcggctggcggtgcaggagatcctggcggcgcgggctgcacggggcccccaggcgcaggaggaggatgaggtggggggcgcggggcagcgcgggcggaccggacaggaggacgcggactcccgggagggctccccgagagccggcctccctcccgccctggggtcccggggccccgcagcgcccgccccgcggaaggccagcctcctgcccctgcagcgcctgcggcggagaagcgtgcggcccggtgtggtggtgccccgggtccgagtcagcaaggcgcccgcgcccaccttccagcccgagcggccggcgcggaagggcagcaccaaggacagcggccacctgcagatccccaagtggcggtacaaggaggccaaggaggagaagaggaaggcagaggaggccgaaaagaagcgccaggccgaggcgcagaaggagaggcgcactgcgccctggaagaagaggacgtgagggcccgtgtgcctggcgctggggccggggctggggccggggcggggccgcagggctgggcgcggagaaggaggcggccccgttgcgcatcgcaccacttccgctccatggaccacggggctgcgcgcatttccaggctgtttgtccaggctgcttccaagagagggctgagggagccacatggattcgcttgtcgccagccctcctagcaatcagtacacctagcgggcacgttgcctaaaaggctccctttagagaacctcaattaagattttttttaaagatcaatttatcaaagggcgttttctccgtaattttgtatttttaatcattatttatcaaatttgcaacgttttacaagtgatagggccccttatatccaaggcagttttaatacacttgcctgaagaccttttgtttaagatactgtttctagcaataagtatccatgatacctgtatgagttcacacagacatcatgggattctcccctttttggctgtttggtcttttctcctcatcgtgggtgtaggtgcacactggatgttcttagtcattagattaagtgttgccggatatttctatttgacggaggcattggctcgttgagccacatgatcaagtgagacagaggatcagatgttactgtatctttttaaaactcttatccatatagtaatatattgaggaaaaacatattgtcaaattataaaacaatggagcgataaacatgtatttattgctagaattaaactcattttaagcaaggggttttaggtaaactggatacgaaatctttaacattaaaaatagatatgagaaaaaaactgtcattcgataaaatgaggcaaatttaataataaatgattaccagaaatacaaaattaagccatatgtgctcttaagtaattcgaatccagatatccttaaaatgtcaaaaagatgcaacaagagtcaggagcccagaatgacgcaaattacaggaatggggaggaggtgatttttagaagaggtgagagaatggaatggggaacagacttgttttcggcaaattctcctggagtagactgggcagccccctcctccaggctcagttccaaagagtccgttgtgtggatatttcttttatttttcctttgaggactgcgcttggtgtttagttcatccttatgccgacctcttagaatttccaagatgcagggccttgggcagggcagggcatgggtgtgatttgccttgggccacaagctcttggtgagagtcttatgtccacacttttatctccaaagtgacatggagatcacttttctcagtgatcaaatttgaatttatcaaagggggttttctgcataattttgtatttgtaatcattatcagatttgcagcattctaattcggcagggcagggtatgaaagctggaaactcaggctggagtttctagttctaatggctctctggccatgtgggttgtagagtgtctgtcacatatgcactttatttcagtattaattgaaatacttggacacgcacgatcacaggcctatttggaggctctgtactatgaccctaataaccctagatacatcatgatacatggtgtctgtctcaggatgcaggcagggctggtgcaggcttctccatactcccttccacttggcaccagcaggcatcgagcaaccagggatcttaaactggcctctccaaatactccattgaacaggactgcaggctgcacccaggctaatgggagattggtgtgttgatgatacagtgtttaagatgagattgcagtgagttcctccttaatcccagaagggcaccatgatgaatgccacaggagactggaccctctttgagaactgcagatattagttgactgtgggtcaccctcgtggccaaggagttgggattggccatgtcttcttcgaggaggtggagactgtaactgacactggttatctttggggttgtctttcctgaatcctttggcatgtggcaccttcctgccacatgtagataattcacggcattaccaagtcaccacgagccccaccctcacctctgtcaaccgaggacccagccaggcagtgccatgtggtctcccaggcacgcttctcaacaccggctacccctgctgtgaaggttctcaaggccctggtccggggagccaagccctgggagcgccctaaagctccgcaggtaactgcactgcagcccgcattgagaaccgcagctctaacacagtgattgcgagaggacacccattctgagctcccacagagggctccacctccccaagaatgtctcattgtcattggaacagccagggtcaggcagcttctgctcggactgacgtggcgtctgacccttggtgggttgccagacattcctgcctgtttccaccatgggaagctgtcactgggaatggtatggagccctcacttctaccccaagcctgggtgtctgctgcctccatgtcaaaaatggacatttctggtcctgcccagctgctacctcaccacaacccatgctcagagttgtcagggatgcgtggaacagcaatgatgggacagcaaatgactggcaatttccccaggtcccacgctgttctggagtggacgtgttgcggccctgcccccgatgtgttccagcctcatccaggtgcacaggatactctggggccagcacagggattgtccagtgatgctcctggtgtccacaaaacagctctagagatacctgcattttgaaaagcctgctgagccaacaagcttggggcaggacacggatttctttggcaaatctgcaggcgagctgaccacttgcctggtgagtggaagctgccattacctggccagtgtttgcaactcgagggaaaatgacagctgcatggggggaagcctgacctcccggggagctttattgtggcctcagtggaaagattggattttgaaacctgccagacccaactgaaagaagggtcattcctgattgagttggagactctccccagtccctctctctggactcattctagctgtggcctgcctgtggacagcccttccctttggcccatgcggcgggtccaggcagctcctgcagctgtgctcatggctgctggcccagaacttctcatttttgccatgtggaagcagatttgctagtagaggaattttccaagtcaagggaagtgttgccaaacctcttgcctcgacctgtggggggccttctgctcttgttttctcattctctttggagtgggcacagaggggacaagtcggcccccagtgaggctcagggagtgcaggagaccagggagggaagcccagatgatggggaaacagagccaccttgagggggtgtcatggggtcagtgtcagggtgatctgacgggtcagttcatacttaagcaacattattctgttcgtttcttttgggtaaggaattcctcatgggaggtgtggtcatctggtcgtagaggtggacagaaacaccccctcgtcttcctgagccatttggaagccctttcctctagccctaggtactggtgacacaggcccctcggtctcaggatgtggacagggctgggaggtgcaggcttcttgtcccatccccactcagtatcatcgggtatctggtagtcaggggtctcacagtggcctctccaaaagcctggtgtccttggagaacatttttcattttgtctgttttcgttgctttgaacagctgcattcactcaccgagggctcgccctccctggatctgccatgtggttcagggaggaggggaccgatgagcaccgaccccttctcttcacctgtcagtggccaccacagtgccccctctggctttgccaccacgttctcctgcccccgtcaccttgtctcttctaactcattagcctttccttcctttgtctgttttcttctcccagctggtttaagttcttgatcatccctggcaccacctaccctaaggtcttccaagaacagaaaagccagggcctgtgtggggcaatgtgttgtccctgtcgggttatggtgggacctcctagaccccagagtgaatgaatggcaggcctgccagtgactgtgctgatggcttagaattcctacacggctgtgcctctcccaccccgtcctctttgctcggaagggagacctggtttgctctcctccatgacagcccagcccctgctgtgcacaggggtggggctcgggatccctccctgcaccctgatgtttattaactgtagatagtgaatttcaagttgacaggtaccttctcagggatttatatataaatatagttagaggaaaagttgaagtctattttactactttttagtgtttgagtaaattatgctttaactggacagaagaaatatttctcagacaatgtcgatgctgctgatgacaactgagatgcctggagctcacccttgatggagacttccttggtgattggagatgggggactctggtggcagaaatggctttggggtaggtgtgaagttgcttcagtccctctgagttgcctcttctggatggaacgtgtgtatcaacaacaatgaaatgcacctccgtgtgcatggaggcggctgatgagaatacagataggccagtcctcgctcttccctccagaaccggccgctcccggtctgacgttggagcacgtgaactaagagtgacaattttttctacttgcttctgtgaataaagtgttctacagtcagcccagcactaaactcaccagaaaagaggagggaacagcacggagccattcatctggaattactcgatgtgcagaggctgccccttggccgcacttgggaacatcgtggacatcttccttcctctcaggctcctcctgacagactcctggcagcactggagacctcaggactatggagatcagaattgtaatggctttgtcatctcagtgtggccactcctgaggcaagaggctcctcctgggagcaggagagagagagtttgtgatgttggttggaaaataggatttatggatgcaggagggccgtgctaggcccctctgcccgcttctctccctgctgttggcggtgaccaggtctcaggagcggagacgaggctgttgtgagtgaaacagaagcccctggcatagggccagaccctaggcctgaaaaggatgcaaagcctgctgttttcaggctgttgggaagaatcgtgcgtaccgagtgattatgatgaaacgtatcccagagaggaaatgaatgggacctgaaaagtgggtctgccacatccctggtagcccgcctccaagagcactacactccccccagccccaccggccacactacatgacgtgggaaggctgtccgttcatccttaccctggggactcaagtgtgctctgcggagtgagtcacagccctgatgtgcaccctgcactactctttccccaggtgcgccggagacgcaggcttgctcatttccgtcctgacacagctcgctgttcctgcggtggtcagagtccccctgtgctgtgtcagctcctggacactactagtctttcacatgataaagcgcgagcactttttcgcttttgcagtatttggggaaattctaacacatttcccggggatttgcccaggtccctccacctcccacggtgggtaactgtgtggattctgcacctggcaatcggcgctcccctttggaaacacctgggggccctgtttcttccagcctggtccttggtttctaccccagccgctttcagccggcacctgcatgggactgcctggagggccacggtccagggaaggacaggtgggaccctgaccatgacagatctttctaaaacaataaagtcccattgatgacaactgcagtgggatgaatgccattgcagcggtcatgctgggagctgccgagagcttacaacaaaagcagttcctctcaagacactgcttgcatcttccctccacgcctctcggtgcatttggaacttgtttatgcgctggtataactcgagtcagctgcttatttctgtgcccttgcactcacaggttccttcattaacattttaaataagtggctaaaaaaactcctctggaggttgtttttgaaagagacaggaaaaagaaacacacagtacctggattgttttgacttattttcaagcgactcagctgaaagccggtgttgcatacacaatttcctcacgctgacccagcctgactaagacttgataaaaggcacagcccttggcagcaggcagtgccaatgtggacagtgtacactaagctgtgagtgtgtgcacgggcgagcacatgtatgtgtactcatacatccagatgaactaaagggacactgggctttgtgctggcaaaggttacgatgctgctgtagcttggctgtgggccccaggcagtgtcagatggaacctgctttgatggcgtgttgttcagtgtactcagtggggtctcacatggcccgaggacccactgtgagcactccgcccgctgtggcacagaacacggctggggtcatcacagcccaggtctttattgaaaggcggctcatatagaacccatttggccaggtctgggccatctctctgcctctgccctatcttggctgcctggaggggcccaggcccaagaggattctttacccctggaagagctccccaggcattcagcctatggcccttgacatttggctgcaggttaccgtcagaatcaacaccatatcctgaggaagccctggtatttccccaagtctgcctatgtattagacactctaatcaatgctaacacagttcagtttttgagggaactagttttgtcataatactacacccctctattgtttttaaataagaaaaaaaaaaaccccacgaaactttccatcaaagcaatggtccgtgttggcctgatgctttaagaagtttgaggaggtaggtatggaggcaccttaacaccagtttttgagcagaagttctagaagctgatttagaactacacagctatggatacacctgatgaaaaccgcaaaaggcgatgacaggcccagaaatatgaccagcaagcccgtgagcctttggggcatccgactgaatttgaaaataataccccattcagatgaacattaaaagccaatgtactggaattctctttgttctgcccgacatttgggggtgtccaaggacctgtgtttttaacaaagatgactttatgaccgttctaaggattgaacagattcctgcacagggtgccaggtttcaagttaggtcctcttagtataagctctctttttttctgaatgtaaacctatttgcattgtcatttctaataatccagtaggtttctggatattgtaaagatactgagtacagatataactgtgtaaatttcatagtgttttattttgaggtgagagttttgttatagtttataaaagatattttcctattcagacctcagggctattttgggacctacaaataaatgtgattcccagcagcttcaatttttgatattcaaaaagttaataatctttaagctaaatataatgtgatatgattcagaaaaaaatgtttttcccttttaacttctaacaaattatgtatctaatgtttaaaaaatatggaaaaaagggataatgtaaaaatgtgggagaattgtggctaaagaataaaaaatcacttgttaaaacgca

SEQ ID NO: 357 - DNA, 4445 bp, Homo sapiens
gcggctgctggtcccgggcgcgcggagggcgcgagcggcgcgcgggggccgagggggcgcgaggcagcggcgcggggactccgggccccggcggcggcccatggggcgggaggcgtgaggccgctgcctgtccggggctcggggggtggggggagcggggcggggagatggataaactgaccatcatctcaggatgtctctttctggccgccgatatcttcgccatcgccagcatcgccaacccggactggatcaacaccggggagtctgcgggagcactcactgtgggcctcgtgcgacagtgtcaaacaatccatggacgagaccggacgtgcatccctccccggcttcccccggagtgggtcaccacactgttttttatcatcatgggaatcatttcattgactgtcacatgtggtttgctggtggcttcccactggcgaagagaagctacaaaatatgctcgatggatagcattcactggaatgatccttttctgtatggctgccctaatatttccaataggattttacatcaatgaagtcggaggtcaaccttataaattacccaacaacacagtagttgggtcatcatatgtactttttgtcttatcaattttctttacaatagtaggacttctatttgctggcaaagtttgtttaccaggctgatgaatgtctaaattgcttgactcttattattttttattttattttatttttttatttttggagggtggagaggacaaaggcgaggcatctgagcaggcctctcatgggaagatgctcagatgaaactgatgctgagaaggaaaaaaaaatgctttggtttgttctcactatgcactttggatttaaaaaaaaaaaaaaaaaggagagccttttccataaccaaatacagacaatattgactaaatctcctgagcatattcaggcagtcaggtctgcactgtgatagcaacctagagaaggagaatgctttataccgaaaagcatgtggccctttgtgactctgttattccgtttttaatgtctaatgattcattagaggaaaaaaaaaagtctaagtatttatgtgtcatggtggaccagagggatgcaagagaagttcatgtggggctggcctcacctcctaagaaattagtgttcacaacttccttgtaatagtatgagcctttggcaccagaatggattgccgttgcattactgcaccaagaagccaatagatcaaaacttgtttgctaaaatgtatgtaaaaattctgaaattccctctctctgtgtacaaaaaaaaaaaaaaatcaaacactaagacacatgttttgggtgggtgggtgggggaaatcttccttatatttatataaatatatataatatatatattttgctgatgcagtatacagtgtgtatatatgtgtgtgtgtgtgtgtgtgtatgtgtgtgtaaatttatatacacacacatgcaaacagttcctggaagagaattctgaatgctttgctagcaaaacactgtggtgtgcaaacctagaacccaatagaaaaaaaagccatttatctgaaggctgcatagtggagagagtcttcagtttacctcattctttgtagcagcccttgattttaacaggtttttgtaataggtacagataatcccatacctttctaggtgcgattttaagttaagctaaaaattatttgtagggttaatttatttgtatatgatagtagaaggtaagatcatgtcaaaccttataatttggggaatctgacactatttaaattattggcaactgttgtctgttgtacagagattctttttctactggctcagtctgttacattaataatgcattttatatgttcaggcacactttacataaatacaaagttcgctagtaaatatctggctattttggctatttacaacactaatttcattatttttatctgtaagcattattaatacatctttaccaaaacctgagcaatacaatattttctttatatgttatatgcctttgtttgctaaaagctaatatttttgcatttactttaaagggctgtactaaacccacagctttaagttcttccctaaaagaagcattgcagctaacccttgaactcacagttttaaaatacagtatttctcttctccacatctccatgccttcgcatcaatgcttgtttttcctggtgaacactatagataatctcctgtttgaaatgtgggacagggtgtttcatggcagtggagctaagtttctcctctttatagtgaactggtgacccaaatgtccctgtcatttatagtgaactgatgacccaaatgactccctgtcagtagagtcccatgtggcccatgcttcacacaagcagaaatgaacgcactgtttttaaggctagattatcagttctagaatgattacttcaaagatgggagctacctcctcagatattcacactatgaaatggaggtgcttgatgtgtttcacactggcttgtttgacagtcttctatcttactgttaattcagcagtattttattgtgaaagaaaaccccagtgtttgagctcactcaggaattggggagagagatggaccaccactgtggtgcatttcttaagtgttctgggagaatgtcatacttttccttcccagagtaaaagaaacctttgggagatcctgagggagactgtttctccccaagtatgatgatgtctagtcaagtctaagaataccactggacatgttctatggacatttgggattgcagttgctattctgatttgattggtcctcagtcaaatggatcactttgaaggaaagctttggttgtcaccgttatataccactgagataaagtgttagcaaagtatggttcaaattaacttatgacatgaccaagagcttttctcttccaaaagatgaattgtattgtaaatagtttctcaaaatatttttaactggatcatgagcatggggagagaaagtttctcagctgctaagaatttccccactgtttacttctttcacttatggtggtattgcatttaagattacaaaatttaaggttttatttgtatctattacccaaaccattaaattgtctttaatttcattgttgtcttggaggtccagtgcatacagggctgatgggggaaaactccctctagccagtcagcactctaacccaggattaaaccatcccatcaagtagtatgtgaagtcaagtcttcgtactcttgcagaccagacattgaaatggattcattcatatagatttctataaatcctataagtgaaaagatagacaactgtccgcagttgcttttaaaaaaggtcactataataagtactatatagtacagtattaatttatagcaggaaatcgtatcttgtaaactgtatataaaacactgttttatggtgcaatcatttgtcaaacttttgtctgtttcattgtttttagagtgtgtgcattcttctcatacctaagaatatcactgtaaaatctgctgaaaactatttttaggttttatttgcacaagactgaattagtttgacatttttggaagctcctattgaacatacccaaacatctgtaaacatgaaaaatcttcaatttattaaaagcaaacatttcagtatgattctttccaaaggtaatccatgttctatgttgttaatgtgtgtatgtaatttttctgactcttccacctcttataaacctattttctgtttcatttgttttgtttttgaaggatggctcttttttctttttaatgttctagatgaccaaaacactattggtttttacccttttgcctaaagctttgatatccccacttgatgttctgtgaattcactgtttaatctattaagtgaaataataaatagtcctggtgacaaacaatctgttgatttagaggaaaggccctgaaaaatacagtattggaaactaactttgcatatgctgttagctattattttgcatcatgggcttcatgggaagaacatgttgcatttattttgtctttattaaaagactactagccacaagttactctgattatagtaactgttttatcaacccacttcatctttaaaaaattaaatttacattcacaattcaaaacagtaagctgtctttcagaaaatttttgaaggataaaaacatgaaggaaaaaagtggcccgtgtaggtaggattccctacacaggacttttagttgtatcacctcaagagattttgaagtttgtgatcaaggtctgtatattatcccaaactttattaagaattgttttctaattggttataacatttttcaattaatagtttcaaaacaaattgttaatacaactgtataaaatgaacataattttcctcacttgtatttttgttattgagcaagtttatcaaaataaattgtctactaaagaaactaaaaa

SEQ ID NO: 358 - DNA, 12427 bp, Homo sapiens
gacccgagagccgctgagccgcgaggccgggccggggcgccggccgggaatgccgggggcgcggcgccgacgccgaggcgcggccatggaggggaagccccgcgccggggtcgcgctggccccggggccgagcggccgacggccttccgcccgctgcgcccgccgccgccgcccggggctgctgcttcctggcctctggctgctgctgctggcccggccggcctcgtgcgccccagatgagctctctccggaacagcacaacctttctttatactccatggagctcgtgctgaagaaaagcactgggcacagcgctgcacaagtggccttaacagaaactgctcccggctcccagcacagcagtcctctccatgtcacagccccgccgtctgccactacttttgatacagccttttttaaccaaggaaaacagaccaaaagtacagcagatcccagcatctttgtggcaacttacgtgtcagtgacgagtaaagaggtggccgtcaatgacgatgagatggataactttctgccagatactcactggaccactccacggatggtttctccaatacagtatatcacagtcagcccaccagggctgcccagggaagcattagaacctatgctcactccatcattacccatggtttctttacaagatgaagaagtgacatcgggctggcagaacacaacgcgacaaccagcggcatatgctgagtccgccagtcatttccacacctttcggtcagcttttcgcacctctgagggcatcgttccaactcctggcaggaatttggtgctttatcctactgatgcttacagtcatttatcaagcaggactctgccagagattgtggcttccctaacagagggtgtggaaaccaccctttttttaagctcccggtctttaatgccacagccgttaggcgacggcattactataccgttgccctccttgggggaggtctcacagcctccagaggaggtttgggccacaagtgcagacagatacactgatgtgaccactgtgttgagtcaaagcctagaagaaaccatctctccaagaacataccccactgtgactgcatcgcacgcagcccttgcattcagcaggacacattctccattgctttcaactcctcttgcatttgcgtcctctgcttcaccaactgatgtttcatctaacccctttctccctagcgactccagcaaaacatccgaattgcatagcaattcagccctccccggtcctgtggacaacactcatatcctgagcccggtgtcctcattcagaccatacacttggtgtgcggcctgcactgtgccttcacctcagcaagttctggccacgagcctcatggagaaagacgtgggatcaggggatggtgccgagactctgtgcatgaccgtgctggaagaaagcagcatctctctaatgagtagcgtcgtagcagacttctctgaatttgaggaagatcctcaagtatttaatacgcttttcccctccagacctatcgtcccactttcttctagatccatggaaatctcagagacgagtgttggcatttctgccgaggtggatatgagtagtgttacaaccacacaggttccccctgcccacggccgcctctctgtgccggcgtcacttgatcctactgctggctccttgtctgttgctgaaacccaagtgacgccatccagcgtgaccactgcatttttctcggtcatcaccagcattctccttgactcatctttctctgtcatagcaaacaaaaacacaccgtcgcttgccgtcagagacccgagtgtttttacgccttatagtctggttccttcagtggagtcttcacttttctctgaccaagaacgttccagtttttctgagcataaacccagaggtgctttggattttgcatccagctttttctcaacacccccgctggaactcagcggctccatctcttcgccttcggaagcacctgcgtctctgtctctgatgccgagtgacttgtcccccttcacatctcagtctttttctcccttggttgagacatttacattgtttgactctagtgatctgcagtcatctcagctgtctcttcccagttccacaaatcttgagttttcgcagctccagccaagttccgagctgcctttaaacaccatcatgttgctacctagccgttctgaggtgtcaccatggtcaagcttcccttctgattctctcgagtttgttgaagcgtctacggtttcactgacggattcagaagctcattttacctcagctttcattgaaactacctcctatcttgagtcttcactcatttcccatgaatccgcagtcactgcactggtgccccccggctctgagtcttttgacattttgactgccgggattcaagcaacatcaccattgaccactgtccacacaacgcccattttaactgagtcttctttgttctcaactctgacacctcctgacgaccaaatcagtgctctagacggtcacgtgtctgtcctggcctctttctccaaagccattcccactggtacggtgttgatcactgacgcgtacctgccatcaggatcctcgtttgtttctgaagcaacccccttccctctgcccacagagctgaccgtcgtgggcccatcactcacacccacagaggtgccactgaacacctccacggaagtgagcacaaccagcaccggtgctgccactggtggtcccctcgactccaccctgatgggtgacgccgcaagtcagagccccccagagagtagtgctgctcctcccctgccatccctgcgtcccgtgactgccttcactctcgaagcaacagtcgacacaccaacactggctactgccaagccgccatatgtttgtgatatcacagtccccgatgcctatctgatcacaactgtgctggccagaagagctgtgcaggagtacatcattacagcaatcaaagaagtactgaggattcacttcaaccgtgcagtggaactgaaggtttacgaactatttactgacttcacttttctggtaacatccggtcctttcgtttacacggcaatatccgtcataaatgtgcttataaacagtaagcttgtccgtgaccagactcctttaatcctgtctgtgaaaccttctttccttgtgccagagtccaggttccaagttcaaacagtacttcagtttgtgcctccgagtgtggatactggcttctgcaacttcacccagcgcattgagaaaggcctaatgacagctctctttgaagtgagaaaacaccaccagggaacgtataacctcacggtgcagatcttgaatatcaccatcagttcctcaagggtgactcctcggcggggcccggtgaatatcatctttgcggttaaaagcacacagggatttttgaatgggtcggaagtgagcgagctgctcagaaacttgagtgtggtggagttcagtttctatctgggatacccagtgctgcagatcgcagagcccttccagtatccacagctcaacttatctcagttgctgaagtcctcttgggtcagaacagttctcctgggcgtcatggagaagcaactccagaatgaagtgtttcaagccgagatggaacgcaagctggcccagctgctcagcgaggtttccaccagaaggcggatgtggagaagggccactgtagctgcagggaacagtgtggtgcaggtggtaaatgtgtcgaggctggagggagatgacaatccggtacagctcatctactttgtggaggatcaagatggagaaagactcagtgcagtcaagtcttcggacctgattaacaaaatggacctccagagagcagccatcatcttgggttaccgaattcaaggtgtcattgcccagcctgtcgacagggtgaagaggccgtctccggaatcccagagcaacaacttgtgggtcattgttggcgtggtcatcccagtgctggtggtgatggtgattgttgtcatcctctactggaaactatgccgcacagacaagctagactttcagcctgacactgtggccaacattcagcagcgtcagaagctgcagatccctagtgtgaagggcttcgattttgctaagcagcatctgggtcagcacaataaagacgacatattgattattcatgagccagcgccactgccaggacctctgaaggaccacaccacgccctcggaaaatggagacgtgccaagccccaagtcaaagatcccttccaagaatgttcgtcacagaggaagagtttctccctcagatgctgactctacggtcagtgaagagtccagcgagagggacgcaggagataagacgccgggagccgtcaacgatggcaggtcccacagagctccgcagagcgggccaccactgcccagttcgggaaatgagcagcactcatcagcctccatcttcgagcacgtggacaggatctcccgccccccggaggctagccggcgggtccccagtaagatccagcttatcgccatgcagccgatcccggcacctcccgtccagcgcccctccccagccgaccgagtggcggaaagcaataaaatcaacaaagagattcagaccgcgctgcggcacaagtctgagatcgagcaccatcgcaacaagatccgcctgcgcgccaagcgccgcgggcactacgagttcccggtggtagacgacctgtcctcgggcgacactaaggagcgacaccgggtgtaccgcagggcacagatgcagatcgacaagatcctggaccccacggccagcgtgccctccgtgttcatagagcccaggaagagctcacggataaaacgttctcccaagcctcgccggaaacaccaggtcaacggctgtcctgccgacgctgagaaggaccggctcatcaccacagacagcgatggcacctacaggaggccccccggcgtccacaactcagcctacatcggatgcccatcggatcctgacctcccagccgatgtgcagacaccatcctcggtggaactggggaggtatccagcccttcccttcccggcctcccagtacatcccaccccagccgtccatcgaggaggcacgccagaccatgcactccctcctggacgacgcctttgccctcgtggcccccagcagccagcctgccagcaccgcaggtgtaggccccggagtcccacccggcctgcccgcaaacagcaccccttcccaggaagagaggcgagccacccagtgggggtccttctacagcccagcccagacggccaacaatccctgcagtagatacgaagactatggaatgactcccccgacgggtccattgccaagaccaggttttggccccggtttgctgcagtctacagagctggtgccccctgaccctcagcagccacaggcctccgccgaagccccatttgctgccagagggatctactcggaggagatgccgtcggtggcccggcctcggcctgtcgggggtaccacaggctcccagatccagcacctgacacaggtggggattgccagcagaattggagctcagccagtggaaatcccgccaagcagaggcagccagtatggggggccaggctggccttcgtacggggaggacgaagcggggcgaagagaggccacacacatgctcggacatcaagagtattcttcttcaccgctatttcaggtgccaaggacttcaggcagggagccctcagctccttccgggaacctcccccaccggggactgcagggccctgggctgggttaccccaccagctccacggaagacctccagcctggccactcctcggcctctctcatcaaagcaatccgcgaggagctcctccggctctcccagaaacagagcaccgtgcagaacttccacagctgatcggcctcgcctcgcagatttgccaagtatccgcttcctgtggaagcaagaccaaaaggaaatcaactgagtgggtgtttggaagaggaaggagcaactctcgggcagcctgcccaagggagggagcaagttgcaatttagaagatgccatacgtcgtgtgacagctcatgagcctttcactgggctggcaattgtctgaacacttgggttcagttgaaatatatgtattttggccaaaagccagcagcacttcacaaaaacaaaacacaaacctaagctaacaaaatgactgcattcgtctcttttttaaaggtagagattaaactgtatagacagcatagggatgaaaggaaccaagcgtttctgtgggattgagactggtacgtgtacgatgaacctgctgctttgttttctgagaagaggtttgaagacattttattaacagcttaatttttctcttttactccataggaacttattttaatagtaacattaacaacaagaatactaagactgtttgggaattttaaaaagctactagtgagaaaccaaatgataggttgtagagcctgatgactccaaacaaagccatcacccgcattcttcctccttcttctggtgctacagctccaagggcccttcaccttcatgtctgaaatggaactttggctttttcagtggaagaatatgttgaaggtttcattttgttctagaaaaaaaaaatccctcccaaagtggggcaaaaagctttatatttatttgattatccaaaatacagatcaaagtttagatctacattcttcattgtatttgctgtttcttaattgggcacacacaactcctggtcatgtcccagttcagcaccgatcgctaaggccgatcctgtagaatgcggctttcaagaggtcctaactgatcctttcttccactttgctgttgatttgttcacaaattatgtctgaatgagaaatcttctgtaagcagaagttatttaataattcccagcaccacgaaattgttatacatacatccctaccagtcacattccctgtgttcagagcctggaaatgaaattgagttcagttcagcctctctgtaatgaatcaagaaatgtaaaagagctttgagaccccaagggaaaggagagagttgcttctcatttctgattttattgtgctgttactctgtcgagtggctattaaaattgtcttatgctctttgggctaagaggggatcatctcgcttaagatgtactcctgatgtaaacatttcccccactttccaaataatggtaaagaaaacagtggcaagggctgttctgttttctggtacctgagtgaaactcagaagaaaagcaggcttagctaagagattttcactattaacctgtttttattagatcagcgaagacagtcatgcatcgcttaatgatggggatgcattctgagaaatgtgtcattaggctgttttgttgctgtgccaacatcctagattgtacttacacaacctacatggtatagcctactacacacctgggctgtgtggcatggcctattcctcttaggctacaaacctgtacagcatgttactgtactgaacacaatggtaagtatttgtgtatctaaacatagctaaacatagaaaaggtatggtaaaaatacaattttataatcttatgggactaccatcaatatgtagaccgtcattgaccaaaacatcctgatgtgtgcatgactgtacttttcattaaataacagataaggggctatagaatttggggctctgactgatcaaaacctgtgtatctgtgtcaagttttaagacccctgaaacagctaaaacaggtttccaaagtgtaatcactggatttcaaaaccatgttttagcccttcattaatgaagcctgttgtacagatttagagtcttacaatatgagggaagttggttctgggaaggtaagatgtagccagttttcatctgggcacctctgaaagagaaggagtgcaggagagtaagtctctcaaggacgttcaacaaaggaccagcagcatcttatcaggcgatcctcagaggctccaaggagcattggagagaatgcccctttctgggcttgatgtcttggttttggtttaataccaaatttctcttggtcttggtttaatacccgactcctcccaaattgaacgattatctttgtatgtcactcaaaaataccaggtttcctgaatatgttattaagaatttcagatatccaagcagaattttattatggacaccttgtaatgaattcaaatcgtgtgacagcaaacgggataaatggccccttctcacccagttccgctcagggccatacaggcttgcacatagagtgtgctaaaaatggtaacctcctttgagcattgcagaaagagggttctgtttcaaattgggctgaccgtaaaagcaattttgatgtctttcaaactaccataaagggattttaactgtatttttattcttagaaacaatacacctttaaacagatgtcaagaccaaagatgatgtataataaacagccggtggttatggtgtggtgtgagcaggcccccggatcaccagccctctgctggtggtcataaagcacacacagtttgtacttgcttcctctcgacgcctgccacaacagttttgccagtcaccaaactcagaaaaaactagctgtgtgagcagcaccgtaccctagcggtcttcagacattaagttcacgtcatccactgaaaggaagggtccttgcgttgacagcgtgtggctttggagtccgtttatggaagcactctacaatgaacagttgaattttatgtctattcttttttcctattttaaaagttctagtggtaacacaaactgtaaatttgagtcagaatgtttggagaaatgttgtttttttttttttcagagactactttgtcactcactgaccatgtctggttccttctctgaacttcattctccccataagccaaacaagaacagacctcccccgccacctcccaggcaccgtagttgtgagaatcagatgtgatcatgtgtgcagatgtcctgtgaggagggagcataaagcactgtgaaaatgtagcatgctgtctatgtggacgccctaggatgagtgatgtgaaacgctgcactactgcggtgaatgggttcacacatgggtaatgagcaaaaccgaaagctcggtgtgactcagtttcctcactcccattttgctttaatttcacttccttcaccaattttccgattgcatttattaagcatctttctgctcccgactttctggtgtctctggcaccaaataacccagcagacatgagccttgccttctgagattttagaatctaagatagcacgagtgggtatagaagatggaagataccgataaataacatggtttaagtgtcaataaaattcattcgaagagatcaggcgcggtggctcacgcctgtaatcccagcattttgggaggctgaggcaggtggatcacttgagatcaagagcttaaaaccagcccaggcaacatggcaaaaccccgtctctacaaaaaaatacaaaaactagctgggtgtggtggcgcatgcctgtagtcccagctgaggcacgataattgcttgaacccggggggtggaggttgcagtgagctgagattgcaccactgtactccaacctgggcgacagagcaagactgtgtctcaaaaagaaaaaaatttgttcaaaagacataaatgaattaggcacccagaagaagttgcatgtttggaaatgcaatatcttggggagacgtcaacttctgaagtgactttgaaggcagggcagctacccaggcaaatggcgtggaaggaagagctgagagtgggcctgggaaaggctgtagggaaggagtgaagctgtcactgaaatgaacttgatcttgatctgctttgatatggggacagaatccccgactgcactattgagggagtttcagaagagaaggaagaggtgctggaaggatgcttttgcagtcatgcagcaaggaaacgaccagggctgtgaagatctacagaggaagtactccagtgtgggggaggcaagggaagaggacgaaaatgatgagaatgacactgaggtcattgtttagagcagatctcaagcagccgtttggccacgccatatcctttgtggagcatagtgggttatctatctgtctgtctgtctatgtatctgtctatctatctatatatatattcagcttctttactgctacctacacatttttctccaaattttattaatttcatagtgttttgatttgggtggcagatgacttttaagcagtgggtgtttgccggccagatctttcctggcatgcggactgtgaggcaaagcacgggtgaaggtaggcgctaaaggctttgggctaaagccagcacgcggttctgtgctataggagtctcccgtttcccgtggacaggttcagcgttccttctttcgcacaacttttttctaagtgttccagtgaccaagccagtcattcggacactgatttgcagtgcattggcagtaattcacaaattagttgttatataagtctctctcatccctttcacactagattctcagacatgaatgaatttgtcgtttggaaggaaagctgggtaacgttttgggcacaggggaaggaggactccggtcttaactcccacgctaactttagctcaagtggagttttcaccgtggtcatttctacctccggagcaaggtgccagcgccagtactagagcctgcttatccacatttgccctggacaggagcaggaggaagtccacttctgtaccggcagacagagcatgtgaacacaaaacacatttctatggcatagtcaactgaacttcatttttacatttaatctaacatgttaacacgttctaacagggtttctatgagcagctgctgtaacatactcatcaactatgatagacttaacacttgttacctaatgaacaaggaggatgtgcatttcgggtttcttttgatattcgtggaggtgattgtcagtgtttaaacaggactactttctccactatgaagatgacttggaaatcgcaacatcatggtacattgctaagtccatgcttgtgtgtgtgacagtaggcttgataatttatcttaaaacacagcagcattgaaatttaggaaaagaatattaaatgcctttggaaacatgaaacaaagttaggagccagtaagaaagtgacagaagcaatgaatgtcttaatgcagtatagttaaaatggcttcccacagggtagataattatccaggatccttccttttccttcttcctccaggtttttcaggggtcacttcacatttctaaagaaagagtgaataggctgggcatggtggctcaagcctctaatctcaacgctttgggaggctgaggcaggaggatcgcttgaggccaggagtttgagaccaccttgggcaacataacgagaccccgtctctacaaaaaaaatttaaaaattagctgagcatggtggcatgtgccagtagtcccagctactcgaaaggctaagactggaggatcgcttgagccaatgagttggaggctgcagtgagctataatcacgccactgcactccagcctgggctgcagggtgaggtcctgtctctggaaaaaaaaaaaaaaaaaaaaggaataggtaaaagggacagaggtgaaattttgagtgacttgagtctcttgcagtccctgattacacagaacctttctgggctacttggagcatcacgaatagtctttcctgtacttaccagatttcaagtattcataacttgactccctaagtgtacaagttgggaatagtacagggccaagttcaagtcgcatatgctgtactgttcctcctgcaaatgtggggaaagaagagggagatactagaggaactgaggctccacccattcattcagttgctctaagcaccagaggacttgtttcagaaaaggggagtgggaacgccctcgactttgccctcctccggagcatctctgggacgcagggagtctggctagcgttaataggaaaggttgctcggcagagctgccctggagtactgacttgtctctccctcctttgtcaaggtccatgtttttctggctcttcctgcacactcatccctagattatgagcgttaatgtacgaaatgtgcagagcaaattgaggccaactgtggcatcaatactgcaacttaaacttgacaatcatggtttgctggtcctcaaacaggcactgaaatctcagtatgggtatacgatttaataatcggcccctcccttctatttgtcggttttatgtttctatccttcaatagctgcactgttttctaatgtgctgtagagtttttgaaataatttatgcaagtatttggtttccatgtttacaatttatacagctttcctagcattttaaatggaaatgtcaataaatgctatgaattggtgtcaaa

SEQ ID NO: 359 - DNA, 7053 bp, Homo sapiens
gcggcggcggctgcggtggcggcagccgaggcgagcggggcgggggcgcgggcgcggcgctcggagtccgttcggggccggaggcggtcggggccgggcccgggaagcgcgaggagcgcgcgtagcgccgccggagcccgccgcccgggacatggccaaggcgggccgtgcaggtggtcctcccccgggcggcggtgccccctggcaccttcgaaatgtcctcagtgactctgtggagagctcagatgatgaattctttgatgccagaggagaagggaccgcgccgtgcacatccagcatcctccaggagaagcagcgagaactgtaccgggtttccttgagaagacagaggttcccagcccagggaagcatcgagatccacgaagacagcgaggaaggctgcccgcagcgctcctgcaagacacatgtcctcctgctggtcctgcatgggggaaacatcctggacacgggtgccggggacccgtcctgcaaggcagccgacatccacaccttcagctccgtgctggagaaggtcacacgagcccatttccctgctgccctgggccacatcctcatcaagttcgtcccctgtcctgccatctgctctgaggctttctcgcttgtctctcacctgaacccctacagccacgatgagggctgcctcagcagcagccaggaccacgtccctctggccgcccttcccctgttggccatctcctccccgcagtaccaggatgctgtcgccaccgtcatcgagcgagccaaccaggtctacagagagttcctgaagtcctctgatgggattggcttcagtgggcaggtgtgtctcatcggggactgtgtggggggcctcctggccttcgatgccatctgctacagtgcggggccctcaggggacagccctgccagcagcagccggaaggggagcatcagcagcacccaggacaccccagtcgcggtggaggaagattgcagcctggccagcagcaagcgtctcagcaaaagcaacattgacatctccagtgggttggaggatgaggagcccaagaggccgttgccgcggaaacagagcgactcctccacctatgactgcgaggccatcacccagcaccatgccttcctctcaagcatccactccagcgtgctaaaggatgagtctgagaccccggcggctggggggccgcagctccctgaggtcagcctgggccgctttgacttcgatgtgtccgacttcttcctcttcggctcgccactgggcctggtcctggccatgcggaggacggtgctgcctgggctggacggcttccaggtgcgtcctgcctgcagccaggtctacagcttcttccattgcgcagacccctctgcctcacggctcgagccactgctggagcccaagttccacctggtgccgcctgtcagcgtgcctcgctaccagaggttcccactgggcgatgggcagtccctcctcctcgctgatgccctacacacccacagccccctcttcctggagggcagctcccgggacagcccgccacttctggatgcccctgcctcgccccctcaggcctcgaggttccagcgcccaggacggaggatgagcgaggggagctcccacagcgagagctcggagtcctcggacagcatggcacccgtgggtgcctcccgcatcacagccaagtggtggggaagcaagaggatcgactatgccctgtactgccctgatgtcctcacggccttccccaccgtggccctgccccacctcttccacgccagttactgggagtccacagacgtggtggccttcatcctgagacaggtaatgcgctatgagagcgtgaacatcaaggaaagcgcccgcctggaccctgcagcactgagtcctgccaacccccgggagaagtggcttcgtaagcggactcaggtcaagctgaggaatgtcacggctaatcaccgggccaatgatgtgattgctgctgaagatggcccccaggtcctggtggggcggttcatgtacgggcccctcgacatggtggctctgactggagagaaggtggacatcctagtaatggcagagccatcctcaggccgctgggtacacctggacacagagatcaccaacagcagtggtcgcatcacatacaatgtgccgcggccccggcgcctgggggttggtgtctatcctgtgaagatggtcgtcaggggcgaccagacctgtgccatgagctacctcacggtgttgcccaggggcatggagtgtgtagtgttcagcattgatgggtccttcgcggccagcgtgtctatcatgggaagcgaccccaaggtccggccgggtgcagtggatgttgtccggcactggcaggacttgggctacatgatcctttacatcacgggacggccggacatgcagaagcagcgggtggtgtcgtggctgtcccagcacaacttcccacagggcatgatcttcttctccgatgggctggtgcatgacccgctgcggcagaaggccatcttcctgcgcaacctcatgcaggagtgcttcatcaaaatcagtgcggcctatggctccacgaaggacatctctgtctacagcgtgctgggcctgcctgcctcccagatcttcattgtgggccggcccaccaagaagtaccaaacccagtgccagttcctgagcgagggctacgccgcacacctggccgcgctggaggccagccaccgctcacgcccaaagaagaacaactcgcgcatgatcctgcgcaagggcagcttcgggctgcacgcgcagccagagttcctgcggaagcgcaaccacctgcgcagaaccatgtcagtgcagcagcccgacccgcccgccgccaaccccaagcccgagcgggcccagagccagcccgagtcggacaaagaccacgagcggccgctgccggcgctcagctgggcgcgtgggccccccaagttcgagtcggtgccctgaggggtgggctgtgctcagagcagggagcggggggcccaatcaggctgcctgcggggacgggagggggctgccctctccccgacacaggcgttttcctgctttttccctcccgtgtctgtccagcagtgtccgaccagagcggggagggatcctgcccgagcccggggggctccctgagctgcgacggggtgaggtccggggatctcggtgcagccactgctgcctcccacgggcctgcgaccgcaagcccaagtcagggttcatgtttgtgtcatcctgggggcaggcttgcccggggctgaagcgtttgggcaaagtcgaccaccctcctgcgtccccaggcttcacagcgagctaggcaggccctcaagggggcagccccagcctcggcaccaagcgccgctggcaggcacagcctctgggctgtcttgtggaggtgtgagtggcatttgtgcccgcccttcctgtggtttgggtcaccattttggggttggcgctcttatggcaagatggccactttctgggagtgagagcacatccccgggctcatgttacgccgtctctgtccacagccctcgggggtggggtctggtgctgacggtctgtcctgcagctgtccattgtccccaacccccgttgtcctcagtgtcctcaccatttccctgtggccctggaggccagggcttcctcttcccggagccctgcctcatgccctcccttgggaggctgcagccttgggctctggctcagctgggctggctgtgagcccctgagctggttgcttgccctctctgggctccgtcttccttctgttattggaggggtccccctagctgagattggtgtgagtctttgactcccaagatgtcctgcagtttggcccattgaggctcttcaggcctaagggtccctccgagtgtcctgtgacccacacctttcacacagcctgggagagggggtctgggtgggctggaaaggaggggctcttaaaggagcctctctgggtgggctgggaagggatccctactccacggagaggtgcagctggtttgccttgcactgcgtgtcccagggacaacccactcaaactgggtgtcctagggacaacccacctccctctcctgccaaaaggttactgattgggctccccataaccccagctctgccaggacccttttatcctttttggctcccagaggcatagagctgagattccagggttctaggggttcctggaagtttggctccaactgttgtattctcttccctttcccctgctgctcagtttgtgcccataacctcctcctgggtagtcccctgaggttggcaggacttggcccttctggggcccctaaagcctgctcaggccctcctgctgctgaaccttggcctgggcactgctttcctgcatcctggaaaaccccgactccctggcccaggcccacacctgctgtgtggggctgcccacgtggccactgagcccccataggctgccatcaaggccggtcccagcaatttcagccaggctgccccagggcccagacgtctgtatacacagcaggcacctgtgtcagctcagtgtcgcttctgctcaatgtctacctctcgcggctcccatgcagccagtgacgctgctggtgggggcggctggcaccgccgttgtgaattgcctggcaaattgggtgccctcctggggctggaggggtctgggctcctaacccccatccctgctctccccactagaaatgtgtcttcagtctgccagctcttctgctctacttccagtgctgcatcctgcactcaagcccagggctgctggcgagtctatggggaggagtgcggatcaggctcagcctcagcctcagcctcagcctcctctatggtcctgtctcctggcggttcacaggtgcccatcccccctttaacatttcacagttcttggctttccaaaggcaccagctcatatggcatagccaccccaaccctaatccttcccccaaatatcctgatttaaacttgggcagacttagtctgattcttgaaaactctaccatctccttcttgcagaaggcactggttacactaaaatgataaaataattagtatggggtactttgctcccagttacattccctcttccctgagaaccccaggctaggcgagagagggagagggagagagaaagagagagagggagagagagagagagagagggagagagaaagagagagagaaagaaaggaagacagaggaaagaaaggaagacagagagaggaaggcagagagagagagggagaaagaaagacaggaaggcagagagagagagagagagagaaaggaagacagagagagagagagaggaagagagagagagagaggaagagagagagagagctcatgagccaggatccctggggaatttgaagtcagtgtgaccagggttctgtggctctggggtcagagctgggacacaggacccagcaggagggccaccaccccttccttttggaaacagctctggttccaagcagcaatcaggtaggaggatcggggctttggctgatgatgcacacacaagatgctgatggtgtacggtgagatattgtgaacgcaacaactggagctgtagttggcgtgtgtgagtgtgtacctgcggttctgtttagtggcgagacaaggtatgtttcagtactgctttcacggcaactgtgtaatgcatatgctctttctacactagcggtttgctcagttttgtctgtccggttaagttggagaaagaaccaagttgtgttgttctctggagggggtgctgctgcctctccttgagtagttctgtgacccccaatccagctgttttgtagagaatccttctagcttctggtatgcctgctctccagcagctggaaacagatcttcctgcctgaccaaagctccttgtttcttgcgtggcatgtttgttcttcccgatccggtggctgtcgtagccgagggcctgcctgccaccttcctttatcatttgccctgttggggttcagggtgcatccttagcccaggacctgctcttccagcatcatgggttttttcctaaagatctcaacggctcccttgggctccataaaatatttcttttttaaaaaagcagactcctttcatgcattgggatgaacggccctcttgtctgggtgctgggctacagcaaacaaatgtgtttgaatcccagtattccagagattcctggcggtgggctgtctagaagaggcgaggctggatctcacggtttttaaactgtatttttacccctttgggacccatacctgtgccctggagtctttcatgaggcacgtgggtcctctgcatcctcactctcccccctagcccaggtgcagccccgggaggggtgccctgaccccgccttaaacaaccaactttcccaccgaatcccatcggcgggcggggggggggggtttgggtgccaagtgccctggaaacctattgtcttttggctcagccaaaagaaacattccctccttcctttccttccgggcttgggggaaaccttcgtaaaaatcatagttagggttaagtccaagcagtgaggcctgacctgggctctgctctccttgttgagacactaacaggcagttgggaggaaaatctgcatttgactccaccctctttggggcaaaggagaaacaggtgacccgagggggggcaggccagaggagggcgactcgtgcacagggacccccacccttggaccccgctgtccttttctagttgtttacttggtggtggcagccagtctgaccttgtctgtggtctgactgttcctaagtgtgtaactttcagtattatctgtgacagatggttctgtggtgaaaaaggtttattatattccttatggctgccttgtacaaaatccgttagaaacgctaatgtaagatatcagatttctaacaagacaaaaacagcattatggagttaaaagatttttacaactgggtcttgattttgatgtgagctggtttttagctctcaaatgttgtcacttaaataaaaaccttctttgcctttaaaaaaaaaaa

SEQ ID NO: 360 - DNA, 5961 bp, Homo sapiens
agttgccctgtcagtgcaggtggaggccccggcggggcaaagtggcaggaacctcttaaagggcgagagcggcgcggagccagaacgcggtcggcccggtccccgccgcacccagcccagcaacatcatgacaacagagaagagtttagtgactgaggccgaaaattcacagcaccaacagaaggaagagggtgaggaagccataaactcaggccaacaagaacctcagcaggaggaatcttgtcaaacagcagctgaaggagataattggtgtgaacagaagctgaaagcttctaatggagacactcctacacatgaagacttgaccaagaacaaggagcggacatcagaaagcagaggactttcacgactattctcctcgtttctcaaaaggcccaaatctcaggtgtccgaggaagaaggcaaagaagtagagtcagataaagaaaaaggtgaaggaggtcagaaagagatagaatttggaaccagtcttgatgaagagatcattttaaaggccccaattgcagctcctgaaccggaactcaaaacagacccatctttggatcttcattcattaagcagtgcagaaacacagcctgctcaggaagaactcagagaagatccagattttgaaattaaggaaggagaaggacttgaagagtgctccaaaatagaagtaaaagaagaaagccctcaatcaaaagcagaaacagaattaaaagcttcccaaaaaccaatcagaaaacacaggaacatgcactgcaaggtttctttgttggatgacacagtttatgaatgtgttgtggagaaacatgctaagggacaagatttgcttaaacgagtatgtgagcatctcaatcttttggaagaagactattttggtctagccatttgggataacgcaacctctaagacatggctggattccgccaaagaaataaaaaagcaggttcgtggtgtcccttggaattttacatttaatgtaaagttttatccacctgacccagcacagttaacagaagacataacaagatattatttatgtcttcagcttcggcaggacatagttgcaggacgtctgccctgttcctttgcaaccttagcattattaggttcttacaccatccagtctgaactgggagactacgacccagaactccatggcgtggattatgttagtgattttaaactggccccgaatcagaccaaggaacttgaagagaaggtcatggaactgcataagtcatacaggtccatgactccagctcaggctgacttggagtttcttgagaatgccaaaaagttgtctatgtatggagttgatcttcataaagcaaaggacttggaaggagtagatatcatcctaggtgtctgctctagtggccttctggtttacaaagataagctgagaattaaccgcttcccttggcccaaagtgctgaagatttcttataaacgtagtagctttttcatcaagattcggcctggagagcaagagcagtatgaaagtaccatcggattcaaacttcccagttaccgagcagctaagaaattatggaaagtctgtgtagaacatcacacgtttttcagattgacatctacagacaccattcccaaaagcaaatttcttgcgctaggatccaaatttcgatacagtggccggactcaagctcagaccaggcaagctagtgctctaattgacaggcctgccccacacttcgagcgtacagcaagtaaacgggcgtcccggagcctcgatggagcagcagctgtcgattcggcagaccgaagtcctcggcccacttctgcacctgccattactcagggtcaggttgcagaaggtggcgtcctagatgcctctgctaaaaaaacagtggtccctaaagcacagaaggaaacagtgaaggctgaagtgaaaaaggaagacgagccacctgagcaagctgagccagagcccacagaagcatggaaggtggaaaaaacccacatcgaggtgacagtacccacctcaaatggtgaccaaacacagaagcttgcagaaaaaactgaagatctgataagaatgaggaagaaaaagagagaaagactagatggtgaaaacatttatatcagacatagcaatttaatgttggaggatttagacaagagtcaagaggagatcaaaaaacatcatgccagcatcagtgagctgaaaaagaacttcatggagtctgtaccagaaccacggcctagtgaatgggataaacgcttatccactcactcacccttccgaactcttaacatcaatgggcaaatccccacaggagaaggacctcccctggtgaagacacaaactgtcaccatctcagataatgccaatgctgtgaaaagtgaaatcccaaccaaagacgtccctattgtccacactgagaccaagaccatcacttatgaggctgcccagactgacgacaacagtggagacttggacccaggagtcttgctgacagctcaaactatcacatctgagaccccaagcagcaccaccacaactcaaattaccaagactgtaaaaggtgggatttcagagacacgtattgaaaagagaattgtgatcacaggagatgctgatattgaccatgatcaggtccttgtacaagccatcaaggaggcaaaggagcagcacccagacatgtcagtgaccaaggtggtcgtccaccaggagaccgagattgctgatgagtgagctcaggaactaacctaccccaactctgcccttctcccatccaagagaaaccagcaaaatgataaagaagctaacctgccatagtcagacttcagactttcaagattattctaaatcaccagaaaattaatttcagtttctattgggagtttataccaagagattcttctagatctcattgatccttttgaagagctttttctatattaggatatcagaattgttcaacttttcactctatagactgttttaagagttttggggtttttttaattgggtggtttgtaaccccttcagcctagcctctctgcccatttatttccaaccccaacagacactgacagggtccatggaattcttcgggaaatcctccaaggactcttgtcagctgtgttggaagccaaagccagcttagtgggacttccgcgtctctccctagtcttatcccctttggatgatggcagaaacttcatgaaccagccctttctcagagccagtgatgtgagtgtatcagaatgccagggagggcaccagccctgatccacagacctcggaaagatgcccctgttcctttgttgcgggtggttttggtaaggcagagccctctgctgagaatgtagtattgtttttcccctctccctcctgctttctttttggagcttctttgggtcaaagacatggaagttgcttcagatatctgatactgtgaatgtttgaacatatccgtggccttcacctctccagctacccttttacctcatcagaagcagtggctcagctaagtgctccccctagctcccatctcaggagaccaaatctcacagaaaaataggcactttgggccaaaagctctaatggaacatttttagtggtgatttggggaaggaaagttaatgaggtttttaaaataaggttttctagttttgagagtgtgcacttcacacaggggaatggggttacttctgtctgatcctgggcctttctttcatcccaaatgacaaggaatgtggctcagagaagggtttttcttttttgacctttcttctctcaacaggaacctgcctgaggacacccttctagagcaaggaattgacttttaggagccgttctccccacaagacaccacatgacaaggggtataagccccagccctgctcattcccactcaccagctgaggtctgtcaggttttgaaggcttgattttgtggtgggtttggggcttagttttcctttttttcattttgatttttgaaagtgaagatgatgccctaattcctggtaaggatttggggcatagttttttgtttttttgagacggagtttcgctcttgttgcccaagctggagtgcagtggcgcgatctcggctcactgcaacctccgcctcctgggttcaagcagttctcttgcctcagcctcccaagtagctgggatgacaggcgcacaccaccacgcccagcaaattttttgtatttttagtagaaacgggatttcaccttgttaggctggtctcgaactcctgacctcaggtgatccacccaccttggcctcccaaagtgctgggattacaggtgtgagccaccacgcccggccgatttggggcatttttatttaacagaacttctctaaccttccaactgcttcccacaaacacattggcctcaaggctccttagaatcccagttccagcttcctaaaatagacagtgggtatcgggcagcagtcactggggctcaagggcagtgagcaagagaaatgtctaaagctgcttctcccaacaccgtccaaagtctccactgcctgagttttgtttcggctggtttgaactcatttcgggtgtgtgcatttttcttttggtacccatgtgagacatgaacaacaggagggagggaaagagcccaggtgggacgtgggacaggcttaggggaaagagcttgtcctatctcaggaacaaaattataggctgtgggcagagggtctgaaaggtgggctttggggtagtgcccaagcctggtcgtgttgccaggagtggtgacaagaaatgcagcttacatcaaacgaacatgtagtgcatgcccactgcctgatggccagatggcctgtaggaagagctaccagggcttccagacctgtggaacgaagaggatggggaaaaggcagagggcactgagtgtccctttaaaaactaacccactgaatattccgtgtgatctagaacagtgtggcagctttcacagcacaggaccgttcatcgggggcctaaacgtttccctcagctctgtcaccaactcacttctctcggcttcgttgtctgtaaattggatgaaaagagctctaatgcctttcaggctcttagaagccatagatttggacaagcccagcaagatgggtgtccttccaggcctcttcccctttcctccatctctggcaacagttcttggggtttggcaattgtttggattttttttctttctgcagttgtgtgtatgtgtgtttgtgtgaagaaaaacagactctgtccaggtagaaatggtgaggagggggaagagaattacatttccagggtcagaaacttggcaacagttttcctagagtgactcagacacaccacagtaacaactctcgctgcaattttattttaatttgagaaataaagatttcctccaagccacatgaggactctggcacccacccacaaagcaagacctgtatttataagccgagggctcagggagcctaactgcgggacccgtcagggccccgtgacccatccccgtccccacccccccctccaccgctgggcccatcagtgtgtgttggggggatgcttggcagctgggggtgaggagacaacaaacctcgggaactggagccagagctgcggcctgactgacgccttttgatgctcacgggaaatttctgcccaggatctcagccccaggctggttgtttctacaaatctctctcaaatgtattattttggtgacaaaaatgaaggagctttgtaaattttttttaaaattatgaatcatatcaagtagttgtttacatttcttgaaaaaataggaactcgggcagcagaatcagattggcagaatctttagactacacaggcaataatcaagtctgctgttttggcctttcgtagtagaagtggttgtagtgtttagatatctgtttggtcttgcttcttgtattgcatttttttcaataaacaacaacaaaaagaactctcaaaaa

SEQ ID NO: 361 - DNA, 4647 bp, Homo sapiens
tttacagcagtagtgcgcttgcgcagctggtcccacaccaagtcgcccgcctctcctcgtccggctagcagagggcgctgtgaggtcggcatttccccaaacgtccaaagcatatgcttgtagtggaagcaaagtttgatggagaacagttggctactgatcctgtggaccacactgaccagccagaatttgctactgagttagcttgggaaattgacaggaaagcgcttcatcagcacaggctacagcgtactcctatcaaactccaatgttttgccttggatcctgtaacttcagccaaggaaaccataggttacatcgttctggatttaagaaccgctcaagaaacaaagcaggcaccaaaatggtaccagttgctgagtaataaatacaccaaattcaagtctgagatacagataagtattgctttggaaaccgatacaaagccaccagtggatagctttaaagcaaagggggctccccctcgagatggaaaagtacctgccatcctggctggacttgaccccagggacattgtggctgtgctgaatgaagagggaggctaccatcagattggaccagcagaatactgtactgactcctttattatgtcagtgaccatagcatttgctacccagttggaacagttaattccatgtaccatgaaacttccagaaagacagcctgagtttttcttttactactctttactgggaaatgatgttacaaatgaacccttcaatgatttaatcaacccaaactttgagccagagagagcatcagttcgcatccgtagcagtgtagaaattcttcgtgtttacctggctcttcagtctaaactgcagattcacctctgctgtggagaccagtcacttggaagtacagaaatacctttaactggattacttaaaaagggcagtacagaaatcaaccagcacccagtcacagtcgaaggtgcttttacccttgaccctccaaacagagccaaacagaagcttgcacctattcctgtggagctagccccaactgtgggagtgtctgtggctctgcagagagaaggcatagactcccagtctttaattgaattaaagacccagaatgaacatgagccagagcattcaaagaagaaagttttaacccccataaaggagaagacacttactgggccaaaatcaccaacagtgtcccctgttccatctcacaaccagtcacctccaacaaaagatgatgcaacagaaagtgaagtggaaagtttacagtatgataaggacaccaaaccaaatccaaaagccagttcttctgtacctgcttcactggcccagctagtgactacatccaatgcttcagaagtagcttcaggacagaagattgctgtaccagcaacatcacatcatttttgcttttcaatagacttaaggagtatacatgccttggagattggttttccaatcaactgtatattaaggtactcatatccattctttggaagtgcagctcctattatgactaatcctcctgtagaagttcggaaaaacatggaagtttttcttccccagtcttactgtgcatttgattttgcaactatgcctcatcagctgcaagacaccttcttaaggattccattactggttgaactatggcacaaggataaaatgagtaaagatttacttctgggaattgcgagaatccagctttctaacatcttgtcttcagaaaaaactcgttttttaggttctaatggtgaacagtgttggcgtcaaacttacagtgaaagtgtgcctgttatagcagcacaaggatcaaataacaggatagcagatctttcttacacagtgactctagaagattatggactagtaaaaatgcgtgagatttttatctctgattcatctcagggtgtatctgccgtacagcaaaagccgtcttctcttcctccagcaccttgtccttcagagatccagacagagcctcgtgaaacgttagaatacaaagcagcacttgagctagaaatgtggaaggagatgcaagaagatatatttgaaaatcagctgaagcagaaagaactggctcatatgcaggctcttgcagaggaatggaagaaaagggaccgagaaagagaatcactagtaaagaaaaaggtggctgaatatactattctagaaggaaaacttcaaaaaactctaattgacttggagaagcgagagcagcagcttgctagtgtggaatcagagcttcaaagagaaaaaaaggaactgcaatcagaacgtcagcggaacctgcaagaactgcaggactctatccgtagggccaaagaggactgtattcaccaagtagaactagaaaggttaaaaatcaaacagctcgaagaggataaacaccgccttcagcaacagcttaatgatgctgaaaataagtataagattttggaaaaagagttccaacagttcaaggaccagcaaaacaacaaaccagaaatccgtctacagtctgaaataaatcttctcaccttggaaaaggttgaacttgaaagaaagttggaatctgcaactaagtctaaactgcattacaagcagcagtggggacgagctttgaaagaacttgccagacttaaacagagggagcaagaaagtcaaatggctcgtcttaaaaaacagcaggaagaattggaacagatgagactacgttaccttgccgctgaggaaaaagatacagtaaaaaccgagcgacaagaattgttggatataagaaatgaattgaacaggttaaggcaacaagagcaaaaacaataccaggattccacagagattgcaagtggaaaaaaggatggcccccatggcagtgtattggaagaaggtttggatgattatttgactcgcctgatagaagaaagggatactttgatgagaacgggtgtgtataatcacgaggatcgaataataagtgaactcgaccgacagatcagagagattttggcaaaaagcaatgccagtaattaataacatttggaaaagctttatagagactctaagtctaaattttaatttctttgtaaaaacctcaaaagtgaggaaaatggatgttttaaaatggtattttcaattttttataagcaaaattttgtatgttattgtatagtatttatttgatcttatttactttatgctacctctcccacactggttttatttgtaatttgcatttatatactcattttaaatgacttttcagtgtttttcatagtttataatctgatggctaactaactttcaaaacagcttttaactaagtttgttgtaggagaaatgactgcggtaatttccagttctataatgtttcatgttgagccaaaagagtatatcttgcactttaaaaacgctgcgtcctattccatttgaatgtaaattcttaaaagttgagaccaattgtaaccagtttaactcattttagatgacctttttttcttataatatttgcaagtgacaagtttgaaaacaaagcaagatcagtgcagagaagccacatgacatgttgggtgacagattggtcatttatttaaataaagttaatacagattaaatttgtttcaagagctattgaattttcaaattttcagtgtatttataacttttaagaacatgaagtattagcttaatatagttttctctgttggtttcttcctcaagtttgcattgttttcttttgttaaaattagagatttctttttattttccagttatagtaatactagctgtcagcttaaaccctctgtaatagaacatggaaacagacacataaagacattagctgaaaaaatagagtgaaaatcaactattttttactcccgctaatttcaatcaatcgttttcaaaagcgcacgagattcactcattggatttatgcagtgccctgtctgtataaaaactcttaagagttcctttatatcatattcttcagagccaacatttgtcctcaaagcaacgtttcccacctccttttactgagtactgaaaaagttttagcaaagtcacagattaggttgaatttcaaaatatatgtactttaaaaagttctgatttccaaatataataaagttaaaattaagtatatactttaggaagttaccaataacttccatcaaagcagagtaggatatatggtaacattaattttcggtcatttcaaatgaggtatatttcttattagggaaattaaagtccctatatttattatatattttttccttattaacagagtattaatctagtaaaaaataacccagcagtaaataataaagaaattactgaatgagaggataatgaatctgaatcatagcaggaatttgcaatattaattatggttagctatttttctctcattgatttttgtgccacttgaatggaacagaagcaagccttatgttttggaaggtctgcggtaaaatgctgtgactgtttactttcaattgcattgtgtgttgcctgtgactgctttcaaacgctagagggggcctctgatttaaagaaataaaaaggacttttctaaaatggatgtgtagtttattttgccttttgtaaagctcttttggctattgtaacttaacaaataaaatcataattgtgtgcatctctgaaaaaaaaaaaaaaaaaa

SEQ ID NO: 362 - DNA, 4724 bp, Homo sapiens
gctcgcgcggccggacattgtgggtgtgcgtgctggatttctcccggatgctctccgactaacatggatgtcccaccattccttgcagtggaaggttgttccttggcgcagtgagtgaagaacatgcagcgattgctaatgggtttgggaagcggagactccttcctctctctatgaccatgccgtgatcgtgtctgcggtcaccactcgacgcatcctcatttctacccgaacccaggagccgaacgctagatcggggaagtgggtgccgtgcgtgtgggcacagaaacaccatgaagattattttcccgattctaagtaatccagtcttcaggcgcaccgttaaactcctgctctgtttactgtggattggatattctcaaggaaccacacatgtattaagatttggtggtatttttgaatatgtggaatctggcccaatgggagctgaggaacttgcattcagatttgctgtgaacacaattaacagaaacagaacattgctacccaatactacccttacctatgatacccagaagataaacctttatgatagttttgaagcatccaagaaagcctgtgatcagctgtctcttggggtggctgccatcttcgggccttcacacagctcatcagcaaacgcagtgcagtccatctgcaatgctctgggagttccccacatacagacccgctggaagcaccaggtgtcagacaacaaagattccttctatgtcagtctctacccagacttctcttcactcagccgtgccattttagacctggtgcagtttttcaagtggaaaaccgtcacggttgtgtatgatgacagcactggtctcattcgtttgcaagagctcatcaaagctccatcaaggtataatcttcgactcaaaattcgtcagttacctgctgatacaaaggatgcaaaacccttactaaaagaaatgaaaagaggcaaggagtttcatgtaatctttgattgtagccatgaaatggcagcaggcattttaaaacaggcattagctatgggaatgatgacagaatactatcattatatctttaccactctggacctctttgctcttgatgttgagccctaccgatacagtggtgttaacatgacagggttcagaatattaaatacagaaaatacccaagtctcctccatcattgaaaagtggtcgatggaacgattgcaggcacctccgaaacccgattcaggtttgctggatggatttatgacgactgatgctgctctaatgtatgatgctgtgcatgtggtgtctgtggccgttcaacagtttccccagatgacagtcagttccttgcagtgtaatcgacataaaccctggcgcttcgggacccgctttatgagtctaattaaagaggcacattgggaaggcctcacaggcagaataactttcaacaaaaccaatggcttgagaacagattttgatttggatgtgatcagtctgaaggaagaaggtctagaaaagattggaacgtgggatccagccagtggcctgaatatgacagaaagtcaaaagggaaagccagcgaacatcacagattccttatccaatcgttctttgattgttaccaccattttggaagagccttatgtcctttttaagaagtctgacaaacctctctatggtaatgatcgatttgaaggctattgcattgatctcctcagagagttatctacaatccttggctttacatatgaaattagacttgtggaagatgggaaatatggagcccaggatgatgccaatggacaatggaatggaatggttcgtgaactaattgatcataaagctgaccttgcagttgctccactggctattacctatgttcgagagaaggtcatcgacttttccaagccctttatgacacttggaataagtattttgtaccgcaagcccaatggtacaaacccaggcgtcttctccttcctgaatcctctctcccctgatatctggatgtatattctgctggcttacttgggtgtcagttgtgtgctctttgtcatagccaggtttagtccttatgagtggtataatccacacccttgcaaccctgactcagacgtggtggaaaacaattttaccttgctaaatagtttctggtttggagttggagctctcatgcagcaaggttctgagctcatgcccaaagcactgtccaccaggatagtgggaggcatttggtggtttttcacacttatcatcatttcttcgtatactgctaacttagccgcctttctgacagtggaacgcatggaatcccctattgactctgctgatgatttagctaaacaaaccaagatagaatatggagcagtagaggatggtgcaaccatgacttttttcaagaaatcaaaaatctccacgtatgacaaaatgtgggcctttatgagtagcagaaggcagtcagtgctggtcaaaagtaatgaagaaggaatccagcgagtcctcacctctgattatgctttcctaatggagtcaacaaccatcgagtttgttacccagcggaactgtaacctgacacagattggcggccttatagactctaaaggttatggcgttggcactcccatgggttctccatatcgagacaaaattaccatagcaattcttcagctgcaagaggaaggcaaactgcatatgatgaaggagaaatggtggaggggcaatggttgcccagaagaggagagcaaagaggccagtgccctgggggttcagaatattggtggcatcttcattgttctggcagccggcttggtgctttcagtttttgtggcagtgggagaatttttatacaaatccaaaaaaaacgctcaattggaaaagagagccaagactaagttacctcaagactatgtattcctccctattttggagtcagtttccatttctacagtgttgtcatcatcaccatcttcatcatcattatcatcatgttcttaataagtacatctaataaggtccttctgtagtgccatggtagaagaattgaggatgtccctgaagtgccagcgtcggttaaaacataagccacaggccccagttattgtgaaaacagaagaagttatcaacatgcacacatttaacgacagaaggttgccaggtaaagaaaccatggcataaagctgggaggccaaacacccaagcacaaactgtcgtctttttccaaacaatttagccagaatgtttcctgtggaaatatgcaacctgtgcaaaataaaatgagttacctcatgccgctgtgtctatgaactagagactctgtgatctaagcagttgcaatgatcagacttgatttacaagcatcatggatcaaccaagttacacggggttacactgttaatcatgggttcctcccttcttctgagtgaatgttaacatgcgcattttgtggctgatttcaaatgcagtccagtgagaaattacaggttccttttgaagctcaactgttgccaggagatggaatatcaatgcccaacagggcaaccaataaaagtgtcactaagaatataaatatttggaatcagcaaaaactgtagtgttacaggaaacagtacagtcttctgaacacccagatcatagaggtgatgatgttactagcccccaactactcagtataattattgtctgaatgcaaagtatgtgtttataggatgtgaaaaaatgtaatgcaaaacaaatttgaatcccatggcagttggaatataaagcagatgttcatcacttattttccttttttcttttcttatttttttttttgacagtctgtgtcactgattgagatagaaatgccaattatcaaggaaataatgttttcttaagttccctaaggcagaagatttaacatgcaattctaccagatcccttcctattcccccaacaccttttctctaacccccatatcccaaataataataataataataataataataataataataataataaaagcagttggttcagtgattctgaattaaaaggataatgttttgcaatgttcaagttgtaaaaactggccgagtattggctgtgtggaagactaaagctttcattctaacattcagacatagcaatccaaacccttgttcctgctgtaaatgaacttgatggagcatgggcagatttcagtgatacgagaaaggggactggtcatctatagaaaaatctgtgagagaacttggaagtggactgcgtttatcaatacagtcacaatgttaaatgaacaaaattcttgaacagttttttttcaaaaaatgttcaggtttatttgtggaaatgcaagatttctatgaaaatagtttttgtatggaaatttttgtaatactttttatcaacaaaacaagaacatgtgttcctgtcaggggtgtgatgtcaagcatgaatggtagtgcgtgtgcaccaccaacgtttggtgaaaactatttttatcaagaaaaaaggaatcatagaagagaaatattttcaagttagataatataaaagctaggtgcactaccaccactgcttaccatgccacacccctggtttccacgaggctgacaacatactgtaatgaacaattgtgtgtaaaatggtaaaagacacagacctcttgacaacattgtgataacagttgagtgcacacagtttgctgtttgaatccaatgcacaaaattaaaaaaaatcattaaaactatgttcattttactttca

SEQ ID NO: 363 - DNA, 8457 bp, Homo sapiens
gtgtgctgccgcggcgcgggaggagagtgtgcgttgcgctttctcccgcgatcgccctgccggtcgctagctccgagggcgcgcactggatcccaggctcctccgagagtgcggcgacctcggggctccgccggcaccggaggtggctctgagggcagggacgtgttggacacgctgactttgtaggctccgccaagaggcgccgcaggagcccgtggccacccaggagcccgatgtgcaaggcaggtgtgagtgccaggacggcattcctggagatgaaggcctggagctgcggtctgcggactcggcagtgcccgtggccatgacccaggctgccgtgcggccctgggcaccctgcctggagaacatgaccactgccccaaacggcctcgggccaggccccgcagccccctgtgcaggctcggacctgaaagacgccaagatggtgacctcccttgcgtgtggaaatggagtctgtggctgcagccctggtggcgacacggacacccaggaagccaaactcagcccagccaagcttgtgcgcctcttttccaccagtcggaagaggacgggtgcccaccccgagcggccccactccatggtcctggtggggaactcctccacatggaacaccctcgcctccttccggaaaatgggatcctttaagaaactgaagtcctcagtcctgaaaggaattcagagccgagaggggtcaaatgcctgttcaaagggagaggcttcggagcatggcctgggaaagtccatcccaaatggcgctgtcccaggagcccaggcaagcaggggctcccccttagcaccgggaccagcatgtggtgccctcaggccagcagagtggggcacattggatggctccgacctcgaggacacggacgatgccttccagcggagcacacaccgctcccgcagcctccgcagagcctacggcctgggccgcatctgcctgctggatgcgccccagaaccatgcgacacccacgatagccactggccaggtgcccgccgtgtgtgagattctcgtgagggaccctgaaaacaacagcatgggctacaggaggagcaagagcacggacaatcttgcctttctgaagaagagctcctttaagcggaagtccacctccaatcttgcagacctcaggacggcccatgacgcacgggtaccacagaggaccctgagcagttcctccactgactcccaaaagcttgggtcaggaaggaccaaacgctggaggagcccgataagggccaaggactttgacagagtcttcaaacttgtgagcaatgtgactgaggctgcctggaggagggagagtcctaggagtggggccccatcccctggagaggccagcctgagacttcaggcacacagccggctgcatgacgactactcccgccgcgtctccaggagcactgagcaggacagcaggcggggcggggcggtcatgcatgggaccactgcaacctgcaccgtggcccccggtttcggctcagccacctctaaggggccccacctagacgctgacactgccgtatttcctcttgaaaccaaaagttcctgggcggtggaaagcgacagttcctgcacttgcagctctttgccaagcccgattgtccaggatgtgttgagcaaagactcctgtgacccaaacgctggcagccagttgacatttgaccctgagcagcctcccacccctctaaggcccaccacacccaagccccagagccctcagagcccccagagccccggggcaggaagtgccagctgtcacagcaatcacagtgccctgtccgcgaattcagaggaaagtgaaggaagggcagaagagcctgctcagagagagccagggcctgtgtccttgcaggatcccctggaagccacacatggtgatgagggcagcaaggaccttctggtgaacattggtgtggcagccggcccagaagaaaaggagaaggaggaggtcgtccctgatggcccctggaggcgaagctcatcacaggatgaggaaaggacagaggcacagagaacccccaagaggagatggggctctgggagacggccaaggcctcggccattctctgactacggccagctggccagccgcagtttgtctattcctgaagactcggttgctgcagacccccagaaggaagaccgtgtggacgaggacccccaggcaagcatgacttctgccagccctgaagaccagaatgctccagtgggctgccccaaaggagcccggagaaggcgccccatttccgtgataggtggggtcagcttgtatgggaccaaccagacggaggaactggacaatcttctgacccaaccggcttccaggccgcccatgcctgctcaccaggtgccaccctacaaggctgtgtcggcccggttccggcccttcacattctcccagagcacccccattgggttggaccgtgtgggacgccggcggcagatgagagcatccaacgtttcttcagatggaggtactgagccctctgccttagtggatgacaacggtagtgaggaggacttcagctatgaagacctctgccaggccagccctcggtacctgcagcccggcggggagcagctggccatcaatgagctgatcagtgatggcaacgtggtctgcgcagaagccctgtgggaccatgtgaccatggatgaccaggaactgggcttcaaagccggggatgtcatccaggttctggaagcctccaacaaggactggtggtggggccgcagtgaagataaggaagcctggttccccgcgagcttcgtcagattgcgagtgaatcaggaagagctgtcggaaaactccagcagcacccccagtgaggagcaggacgaggaggccagccagagccgccacagacactgtgagaacaagcagcagatgcggaccaacgtcatccgggagatcatggacaccgagcgggtgtacatcaaacacctcagggacatctgtgagggctatatccgacagtgccgcaagcacacaggaatgttcaccgttgcgcagctagccactatttttggaaacattgaagatatttacaaattccaaagaaagtttctgaaagaccttgagaaacagtacaacaaagaggaacctcacttaagtgaaataggatcttgctttcttcaaaatcaagagggctttgccatctattccgagtactgcaacaaccacccgggcgcctgcctggagctcgccaacctcatgaagcagggcaagtacagacatttctttgaagcctgccgcctgctgcagcagatgattgacatcgccatcgacgggttcctgctcacaccagtgcagaagatctgcaaatacccgctgcagctggccgagctgctcaagtataccacacaggaacacggtgattacagcaacataaaggcagcatatgaggccatgaagaatgtggcctgtctgatcaacgagcgcaagcgcaagctggagagcatcgacaagatagctcgctggcaggtgtctatcgtgggctgggagggactggatatcttagaccgaagctcagaattgattcattctggggagctgaccaaaatcactaagcaaggcaaaagccagcagcggacgttcttcctgtttgaccaccagctggtgtcctgcaagaaggacctgctgcgcagggacatgctgtactacaagggccggctggacatggatgagatggagcttgtggacctgggggatgggcgcgacaaggactgcaacctcagcgtgaaaaatgccttcaagctcgtcagtaggaccacagacgaggtttatttgttttgtgccaaaaaacaagaagacaaggcgaggtggctgcaggcctgtgcagatgaaaggaggcgggtgcaagaggacaaggagatgggaatggaaatttcagaaaaccagaagaaacttgccatgttaaatgctcaaaaggcaggacatggaaagtcaaaaggctacaacaggtgccctgtggccccaccgcaccagggcctgcaccccatccaccagcgccacatcactatgcccacaagcgtcccccagcagcaggtctttggcctggcggaacccaagaggaagtcctcgctcttctggcacaccttcaacaggctcacccccttccggaaatgaaaacaggaggctgtgcttccatggagctgggtgtcaagagaagaactgtctttgtttcttgtgtgcttcaatccagggaaagtttcttggacccagtgataaaaacttccttttagggatcaatgaaggagagaaggtcttggaatcaccttcagtctttggagacccagctgcctttgtggaagggaggagacggtcatgacacaaagctttatcctacacagaaacacccgtgacccactatgagatggcccagatgtgggacccggtaccatgctctaaagcgagtgattaggcagcagctgaagccacccctgctgatgatgagcaagtgcctgctgcaggtccaaacacagcatccagggctttgcagttcctaaggagtgatgaggttagaggatcacttctgcatttgattttcaaggatgccgtcaagacggggttgacacaatgctgcacgtgtctggtcacacttagaaattgagctcttactctcttctgtaatactgggggacctacagctgccgtggggctgaccacggtgttccctggcatcgtctgtgtccacacagatgctaactggtagtgcaaatgtcatcctgcaaggttcctcttcctgcaagcaaagtggagagaaagaagatgcatctgtcaccttcatcagggtcctcagtgcagagcaacttacgcatcctcaagaatccactgcttttcaggcaaggagggagaaatcctgctgcacactggctttgtcccggagtcggattccctcctgcctgcacgccttcagtaactccgagcagaaatcacatcttgcccacatgctgtaacctaagaaactgctatgcaaggctgggtgctgtggctcatgcctgtaatcccagcactttgggaggccaaggcaggtggatcacctgaggtcaggagttcgagacaagcgtggccaatatggcaaagcccagtctctactaataatacaaaaattagctgggcatggtggcgcatgcctgtaatcccagctactgggaaggctgaggtaggagaatcttttgaatctgggaagcggaggttgcagtgagctgagatcgcaccactgcactccagcctgggagatacagcgagactgtctccaaaaacaaaaacaaaaacaaaaaacattcaaacaactgtttgcaatataaaaagctcatttactgtaatatttatgatacagtgaatatgaaaatgcactggtcagaaggcactctcaaagagccgcactgctcctgacatcgtccttagcaatgaagtcacaaagacagccaaagcagtcctgcttcttggaaatcagaagctgcctttatcacatataaagccaaacagggcataaccatgtcacgtgagcatgtcatcaggcttctgaggacttgttctttataaaaaaagaccttcacaaaatatcttggcttagagatagcagtctttattaacaaaggccacctaggctgacacctgcagataatcatctccttttctttgtctatgttgtacattttcatgatataacttttaactatgtctagagaaggcaggctctgcaagagaggtgccctttcaacccgctcagtgccctggacaggagatgctgtgttaaactgttaatggatatctatatgagaagctcatttttgtatgctatccctgcagtttttttttttctaacaggcccatgtttgagaataaacaagtctgtgatgtcagagacaaaggtgtattcttcagtctgcaggtgtgtggcacctcccttctcccctgcagccccccacatccagagccgttcctgagagtgacatcatgcatcaagaaaacataaccttggtcctcaggtgaacccttggaacattctgtgaccgcctgatgtccattctgagccaccttggcacacatgcttacaggcagcactgctaagggttcaggtgccccatggctgacagcccgagttgcttctgtggaccatcatgccgctcggcacgtcctgagacagaagttgctgcaggaaggagcttctggagaggtcctgtggcatgtgtgggggtgtgtgtgtgtatgtttccttcttgaacagacattccaactttagatgtgtttatagaactgacctttttactaacaaaatacaatgatatatgttggaaactacttaatatgcttttcctgcacaccttagcaataactgtaggggtctctgctagagttgtttgtatgtacagcaattttgaacaaattgttttaaatgtaatataagagaattagtttaaggaagtaaagagaatcatttgcttgtgttacattttcagtgaggattcagtttaagagtcattcttaggacttccatttcctaatatttattcatgggtaatgaagaaatggtttgcattttgtggccagtcctaatttattttccagctgagccctaacttccggctcccacctacctccacggacttcctaacagagacttatgaataccaggatgtgtttttgttaagtcaggttcaattcgttgcccctgtcagttttatagagtgtgagggtcactccattaaagatctctcctgggtggatcctacttggatgttcaggtgattttgaaaactgctaacatttttaaaaggctagaacatcctttgacttcttgaaaatctgcatgtctggcttgggttttattaccacatgcctgagttcttcaagaatggaaggctcaagtattctcatcttccatttgccaaacttccttcctgatttgagtcacgtgttccacttggaaagaaagggaacagagagcctcctccatggacagtgtatgaatttcattgggaatcttgctctctcccgcctctatgcctttctctctttttaaccttactttacataatattatagatgggccaagaaaagaaaagatgacataacattttgatgaatttcacctattccattcttcacgtttcagaattggtcgactttgttagaagataattgaagtagccttgggtcaaaagcaaccttttcaattgtgatcatacctaaaacatataaaaaccctgccgtagattaaaagcaattataaaatcataaaattgaatgtttgcagaatcctggagcagtagatttctttgtctttggcctgcggactagaaagagggcagcagtagtatgctggagcttccctgggataccagccacatggtttcttttcattagatctgatttttgtttcccactgtagatctgattttgtagttgaaaacatttcaccaccatcaaacactatttctgaatattgtgcctttttatacctagcctagatgaaaaccgatgccattcttattcagaaaatccccccatcctacatgactgttatctagacataaagcaaagtgcatttaattcaaaatttggttcacaatataagtattttgtaaaagccagctgaaccagcattttatcaggtggaaatctctgcaagccaaattgctgatactccttcatgcagatcaacttggtgtcccagtcagaatagaacagcataattacctggagttagggggagtatttctgcactattacttgtcagggagagaagaaacttagaattgtccctcaaaggagtgtcaagaagtatgaataaatgtcctttcaccagctcacaggccagaaatggaggacccaagtcaactaggtgaaactactagcagacccagctttcccataataacctaatctgcaaattgttctattaaagtctcattgttttcaggatgcaatgaaagtggatttcaaaaggctttggaaaaataagtggaacatgactgatcttgaaaaaaaaagcaaaagcttaaatatttgatacaagtttacttagctacaacatactttacattgttgcctttagttatctcacaggcactgacattttatatttagaaaatacttttaatctttctaatctttttttgtaaatattagtgtccattctgtatgactcgctaacctactttgcaaggctttgggcaacattttagctcattaacttcaagatgatgtgtcatctgtataggtcaaagaatgggacttctgaactgaggaatttgctgttgacagccaaagtatagtgtacaagattgatgtaacttgatatgtatttttgttgaagttttttgtaaaaaaaaattatttacaatgttatttgaatgatttttttaaatgctgtgaatctatatttgttgttttgtatattaaaattcatttgccaaactcgt

SEQ ID NO: 364 - DNA, 777 bp, Homo sapiens
aaggggcggagctccgtggaaaccggaagtaactcttgacgggcactcggagcagttccgatgactgtccacaacctgtacctgtttgaccggaatggagtgtgtctgcactacagcgaatggcaccgcaagaagcaagcagggattcccaaggaggaggagtataagctgatgtacgggatgctcttctctatccgctcgtttgtcagcaagatgtccccgctagacatgaaggatggcttcctggccttccaaactagccgttacaaactccattactacgagacgcccactgggatcaaagttgtcatgaatactgacttgggcgtgggacccatccgagatgtgctgcaccacatctacagtgcgctgtatgtggagctggtggtgaagaatcccctgtgcccgctgggccaaactgtgcaaagtgagctctttcgctcccgactggactcctatgttcgctctctgcccttcttctccgcccgggctggctgaagcaacctacctcaagtctcaggagaattcatgtctgcctggggcccttccgaacctgtgccaactaagggcccccactgtaagcccccgcacccccaccccctgcccagagcaacagcctaaaggcctgccctgatgctctcctcctaccagagtgaagcccacagagtccctccacctccacaccaggccctctctccagttttatcccctgcctaatgctgcgagaagcacagaataaactttttgtcactctctgcgaaaaaaaaaaaaaaaaaa

SEQ ID NO: 365 - DNA, 6132 bp, Homo sapiens
actgccccgccccggcgcagactgcgtgaggcgccgccgaaggcgcggggcttgccggggatcgtggtcggcgagcgcgcccgagcccactagcggagcccgcccgggactacatttcccacaattaccgccatgatgcccattggtgggggaagccatgggaaccggaggccgtcagggggagaggcgggcggcgctcacgcctggcctgagggggccgagactgaggcggttgcggaataggactgctagccccgcccagagtccctaccctttggagaactgcgcttctctttcggagggagtgttcgccgccgccgcggccgccacctggagtttcttcagactccagatttccctgtcaaccacgaggagtccagagaggaaacgcggagcggagacaacagtacctgacgcctctttcagcccgggatcgccccagcagggatgggcgacaagatctggctgcccttccccgtgctccttctggccgctctgcctccggtgctgctgcctggggcggccggcttcacaccttccctcgatagcgacttcacctttacccttcccgccggccagaaggagtgcttctaccagcccatgcccctgaaggcctcgctggagatcgagtaccaagttttagatggagcaggattagatattgatttccatcttgcctctccagaaggcaaaaccttagtttttgaacaaagaaaatcagatggagttcacactgtagagactgaagttggtgattacatgttctgctttgacaatacattcagcaccatttctgagaaggtgattttctttgaattaatcctggataatatgggagaacaggcacaagaacaagaagattggaagaaatatattactggcacagatatattggatatgaaactggaagacatcctggaccctattataaaaatagcttcagatgtgcaaataagactgcatcttggaatccatcaacagcatcaagtccagactaagcaaaagtgggcacatacaaactctgcttagagcatttgaagctcgtgatcgaaacatacaagaaagcaactttgatagagtcaatttctggtctatggttaatttagtggtcatggtggtggtgtcagccattcaagtttatatgctgaagagtctgtttgaagataagaggaaaagtagaacttaaaactccaaactagagtacgtaacattgaaaaatgaggcataaaaatgcaataaactgttacagtcaagaccattaatggtcttctccaaaatattttgagatataaaagtaggaaacaggtataattttaatgtgaaaattaagtcttcactttctgtgcaagtaatcctgctgatccagttgtacttaagtgtgtaacaggaatattttgcagaatataggtttaactgaatgaagccatattaataactgcattttcctaactttgaaaaattttgcaaatgtcttaggtgatttaaataaatgagtattgggcctaattgcaacaccagtctgtttttaacaggttctattacccagaacttttttgtaaatgcggcagttacaaattaactgtggaagttttcagttttaagttataaatcacctgagaattacctaatgatggattgaataaatctttagactacaaaagcccaacttttctctatttacatatgcatctctcctataatgtaaatagaataatagctttgaaatacaattaggtttttgagatttttataaccaaatacatttcagtgtaacatattagcagaaagcattagtctttgtactttgcttacattcccaaaagctgacattttcacgattcttaaaaacacaaagttacacttactaaaattaggacatgttttctctttgaaatgaagaatatagtttaaaagcttcctcctccatagggacacattttctctaacccttaactaaagtgtaggattttaaaattaaatgtgaggtaaaataagtttatttttaatagtatctgtcaagttaatatctgtcaacagttaataatcatgttatgttaattttaacatgattgctgacttggataattcattattaccagcagttatgaaggaaatattgctaaaatgatctgggcctaccataaataaatatctccttttctgagctctaagaattatcagaaacaggaaagaatttagaaaaacttgagaaaacctaatccaaaataaaattcacttaagtagaactataaataaatatctagaatctgactggctcatcatgacatcctactcataacataaatcaaaggagatgattaatttccagttagctggaagaaactttggctgtaggtttttattttctacaagaattctggtttgaattatttttgtaagcaggtacattttataaaatgtaagccctactgtaaggtttagcactgggtgtacatatttattaaaaatttttattataacaacttttattaaaatggcctttctgaacactttatttattgatgttgaagtaaggattagaaacatagactcccaagttttaaacacctaaatgtgaataacccatatatacaacaaagtttctgccatctagctttttgaagtctatgggggtcttactcaagtactagtaatttaacttcatcatgaatgaactataatttttaagttatgcccatttataacgttgtttatgactacattgtgagttagaaacaaacttaaaatttggggtatagaacccctcaacaggttagtaatgctggaattcttgatgagcaataatgataaccagagagtgatttcatttacactcatagtagtataaaaagagatacatttccctcttaggcccctgggagaagagcagcttagatttccctactggcaaggtttttaaaaatgaggtaaatgccgtatatgatcaattaccttaattggccaagaaaatgcttcaggtgtctaggggtatcctctgcaacacttgcagaacaaaggtcaataagatccttgcctatgaatacccctcccttttgcgctgttaaatttgcaatgagaagcaaatttacagtaccataactaataaagcagggtacagatataaactactgcatcttttctataaaactgtgattaagaattctacctctcctgtatggctgttactgtactgtactctctgactccttacctaacaatgaatttgttacataatcttctacatgtatgatttgtgccactgatcttaaacctatgattcagtaacttcttaccatataaaaacgataattgctttatttggaaaagaatttaggaatactaaggacaattatttttatagacaaagtaaaaagacagatatttaagaggcataaccaaaaaagcaaaacttgtaaacagagtaaaaatctttaatatttctaaagacatactgtttatctgcttcatatgctttttttaatttcactattccatttctaaattaaagttatgctaaattgagtaagctgtttatcacttaacagctcattttgtctttttcaatatacaaattttaaaaatactacaatatttaactaaggcccaaccgatttccataatgtagcagttaccgtgttcacctcacactaaggcctagagtttgctctgatatgcatttggatgattaatgttatgctgttctttcatgtgaatgtcaagacatggagggtgtttgtaattttatggtaaaattaatccttcttacacataatggtgtcttaaaattgacaaaaaatgagcacttacaattgtatgtctcctcaaatgaaaattctttatctgaaattttaaaagacattgattccacatgtaaggatttttcatctgaagtacaataatgcacaatcagtgttgctcaaactgctttatacttataaacagccatcttaaataagcaacgtattgtgagtactgatatgtatataataaaaattatcaaagaaaattaactgccagtcatttgtaaatgctgtctactcctgaaagccttccttcatctctatttagttaataatgtgctctctcctcctgttttgaaaccccatagctctctacacctcttattgtacatcactctactttgcattggagttctgtttctatatgtacttattcacctgttgcctaaacatgcactgttcctaaaaggtacagtttttgctcaaaatatatgaaaggaaagataatcagttcttaaagtttggtatgctaaataagcacccagggaacttacctgctccacctcaccccagaaattgattattcaggtctggaatatggctcaggattcttaattttcaaccaacacaatatagaatcctgtcagttatccttggatcatttgctaagtgatcttgcaaaatcaaaactcctttgagactatttcattttcagaaatattttaaaacttgttcagaaacatcttaaaacttgttagcatataggaaaagtacaatgcttggtgtaggtaggttattatttggtcatttccctcaaaccatccagacaagccactcttctaccacaagctggtagaaatccttaggcacctttctgcttctgcactgctatcactttcaggtgtctaaggcttctggaaggctgttgtcataacctggagccatacacctaatgtacgtctggggaaaggacaccaattaaagaatctagagctaggatgatgttacataagacagggcacaatggagatggactctggatccctgcatctgaaagaaaaaggcaagaaaatgcagggcagggaaaatcctgaaggtcttcactgaccatgaattaaaatcctaattgacagttttacaaacaaaaaccctcgttttagtacttgtgttgtttttgtttctgttttaacaagcttagatttattattgtgccttttatggaagatgaggaagaaataggaaagcagtaaaatgaacaatgagaatctgttacccaaactgatataaactccctcagaaagaaagatactactccctaatcctggaagtgttaagtggcaataatgatcaaatgttgtaaaggggattgttactacagctaatatgaaatgggaggctggactaaatctaacctttctacccttgatttcaattctaaaaggacacgtaataccattgcagaaagaaaagacagttccaaatgataaattttagagttgttttgctaggatgcaagagaaattggataagtggaccactcatacgttgctggtgagatatgaaatagtagagccactgtggaaaatattcttggcagtttcttataaaactaaacatacatttaacatataactggcatttgtactacttgacagttatccctgagaagttaaaacttaacattcacaaatgttacatagcaccttcatttataatagccaaaacccggaaacaacctggatgtccttcaaaaagagtgaatggtttagtatgtccacaccatggaatactaaatagtaatatgaaggaacaaactactgatacatgtaacaaattgcatggacctcaagggaattatgcttgggtggtttggggggacaatcctaaagttttacacactgtatgattctgtttttgtaacattcttaaataataaagctatagagatgggaaacaagattcgtggttgccaggtcttgggactgaagggaaggagaatgtggctataaagggagccttgtggtggaaaagttctgtagtttgattgtggtgattacataaatatacatgtgaaatgttagaagtatttatagctgaaacatattagtatgttggtatatacatatttctgactaattaatttcgccatgttgcccaggctggtctcgaactcctaagctcaagtgatgtgcccgcctcaacttcccaagtgctgagattacaggcgtgagccaccatgtccggcctgttttttcctatgcatgcataattacgatcaagtttaatttgtaattaggcacattaagagattaacaatagctaacaaaatggaacaattacaacaatatattgtaataaaagttatgcaaatgtgaaaaaaaaaaaaaaaaaa

SEQ ID NO: 366 - DNA, 10981 bp, Homo sapiens
atggtggagccagggcaagatttactgcttgctgctttgagtgagagtggaattagtccgaatgacctctttgatattgatggtggagatgcagggcttgcaactccaatgcctaccccgtcagttcagcagtcagtgccacttagtgcattagaactaggtttggagaccgaagcagcagttcctgttaaacaagaaccagagactgtacctactccagcactattaaatgtgaggcagcagcctccatctactacaacatttgtgctgaatcaaataaatcatcttccacccttgggatctacaattgtaatgactaaaacaccacctgtaacaaccaacaggcaaaccatcactttaactaagtttatccagactactgcaagcacacgcccgtcagtctcagcaccaacagtacgaaatgccatgacctctgcaccttcaaaagaccaagttcagcttaaagatctactgaaaaataatagtcttaatgaactgatgaaactaaagccacctgctaatattgctcagccagtagcaacagcagctactgatgtaagcaatggtacagtaaagaaagagtcttctaataaagaaggagctagaatgtggataaacgacatgaagatgaggagtttttccccaaccatgaaggttcctgttgtaaaagaagatgatgaaccagaggaagaagatgaagaagaaatgggtcatgcagaaacctatgcagaatacatgccaataaaattaaaaattggcctacgtcatccagatgctgtagtggaaaccagctctttatccagtgttactcctcctgatgtttggtacaaaacatccatttctgaggaaaccattgataatggctggttatcagcattgcagcttgaggcaattacatatgcagcccagcaacatgaaactttcctacctaatggagatcgtgctggcttcttaataggtgatggtgccggtgtaggaaaaggaaggacgatagcaggaatcatctatgaaaattatttgttgagtagaaaacgagcattgtggtttagtgtttcaaatgacttaaagtatgatgctgaaagagatttaagggatattggagcaaaaaacattttggttcattcgttaaataagtttaaatacggaaaaatttcttccaaacataatgggagtgtgaaaaagggtgttatttttgctacttactcttcacttattggtgaaagccagtctggcggcaagtataaaactaggttaaaacaacttctgcattggtgcggtgatgacttcgatggagtgatagtgtttgatgagtgtcataaagccaaaaacttatgtcctgttggttcttcaaagccaaccaagacaggcttagcagttttagagcttcagaacaaattgccaaaagccagagttgtttatgctagtgcaactggtgcttctgaaccacgcaacatggcctatatgaaccgtcttggcatatggggtgagggtactccatttagagaattcagtgattttattcaagcagtagaacggagaggagttggtgccatggaaatagttgctatggatatgaagcttagaggaatgtacattgctcgacaactgagctttactggagtgaccttcaaaattgaggaagttcttctttctcagagctacgttaaaatgtataacaaagctgtcaagctgtgggtcatcgccagagagcggtttcagcaagctgcagatctgattgatgctgagcaacgaatgaagaagtccatgtggggtcagttctggtctgctcaccagaggttcttcaaatacttatgcatagcatccaaagttaaaagggttgtgcaactagctcgagaggaaatcaagaatggaaaatgtgttgtaattggtctgcagtctacaggagaagctagaacattagaagctttggaagagggcgggggagaattgaatgattttgtttcaactgccaaaggtgtgttgcagtcactcattgaaaaacattttcctgctccagacaggaaaaaactttatagtttactaggaatcgatttgacagctccaagtaacaacagttcgccaagagatagtccttgtaaagaaaataaaataaagaagcggaaaggtgaagaaataactcgagaagccaaaaaagcacgaaaagtaggtggccttactggtagcagttctgacgacagtggaagtgaatctgatgcctctgataatgaagaaagtgactatgagagctctaaaaacatgagttctggagatgatgacgatttcaacccatttttagatgagtctaatgaggatgatgaaaatgatccctggttaattagaaaagaccacaagaaaaacaaagagaaaaaaaagaagaaaagtatagatccagattctattcaaagtgccttattagcatcaggtcttggatcaaaacgacctagtttttcatctacaccagttatctcacctgctcctaacagtacaccagctaacagtaacaccaacagtaacagtagccttataacaagtcaggatgctgtggaaagggctcagcagatgaagaaagacctgcttgataagctagaaaaattagctgaagacctcccccctaataccctggatgaacttatcgatgaacttggtggccctgagaacgttgctgagatgactggccgcaagggacgggttgtgagcaatgatgatggaagcatatcttatgagtcaagatctgaacttgatgtgcctgtggaaatactaaacatcacagaaaaacaacgatttatggatggagataagaatattgctatcatctcagaagctgccagctcgggtatttcattacaagcagataggagagctaaaaatcaaaggcgaagagttcatatgactttagaattaccttggagcgctgatagagcaattcaacagttcggacgtactcatagatcaaaccaagttactgctcctgagtatgtctttctgatatctgaactggcaggagaacaaagatttgcatctattgttgctaaaagacttgagagtttgggggcacttacacatggtgatagaagggcaacagaatctagagatctgagcaggttcaactttgataataagtatggaagaaatgctttagaaattgtcatgaaatccattgtaaacttggattctcctatggtatcaccacctccagactatcctggagaattttttaaagatgttcgacaaggactgataggcgttggcctgataaatgtagaagatcgctcgggaattcttactctcgataaagattataacaacataggaaaattcttaaatagaattttaggcatggaggtgcatcagcagaatgcgttatttcagtattttgcggacacacttactgcagttgttcaaaatgccaaaaaaaatggaagatatgatatgggaatcttagatcttggttctggagatgaaaaagtgcggaaaagtgatgttaaaaagtttctgactccaggatattcaacctctggccacgtagaattatacacaattagtgtagagaggggaatgtcatgggaggaagctaccaagatttgggctgagctgacaggaccagacgatggcttttacttgtcattgcaaataaggaacaacaagaaaactgccatcttagttaaagaagtgaatcctaaaaagaaacttttcttagtttatcgaccaaatactgggaagcagctcaaattagaaatttatgctgatctaaaaaagaaatataagaaggtcgtctcagatgatgccctgatgcactggttagatcagtataattcatctgcagatacttgtactcatgcttattggcgcggcaattgcaaaaaagcaagcttggggctagtttgtgaaataggtcttcgttgccgtacatattatgtattatgtggttcagtgctgagtgtctggacaaaagttgagggtgttctagcatctgtcagtggcacaaacgtgaagatgcagatcgtgcggctaagaacggaagatgggcaacggattgtaggtttgatcattccggcaaattgtgtgtctcctcttgtaaatctcctatcaacttcagaccagtctcaacagcttgcggtccaacagaaacagctatggcaacagcatcaccctcagagcatcaccaacttgagcaacgcatgaagaacagacaggtttcaacatggatggatctgaaatgctgttgaagcatatcatttgcataaaaatcagggacagtttccaaagaattatatatttttttcagttgtgctctctagttagtttttttgggagtaaggacaaacctggaatagatagcaaaactgaaaatcagcagtgctgatggtggtacatatgtctttcctttagcttctcccctgataattcccatctgcttttacttcgggtgagcagagggggatgtgtgtgtgcgtgtgtgtcagtctgtttgtgagtgtgttaaaggctacagaccacagttggtttaaaatgcttggaacttcccaaactggctttactttatgtttatacagtgctcagggttaacgcagtacatccatgccattgctgtgggaggtatccccggatgcatgtgttttgagtctataaatatagaaaatatatattggtttctttttccaacttaataggtttattaaagcatgaaatgaaaggttgcatatcatgcattcaggttattttctaatttttgttctgacagtgcatgtctttggaagcatgctgaaacaagattaacacaggagtcgagtaacagagagaaacatttgttagatgtacagcattggttattgcatttttatagtgtttatacctgggtattgcttcaaaccctgcagacccctccttccccttctccctgccctgggtttctggtcaaggtaatgaatacatacatttttctgtgataaaactcttaaaagttaattttaatgtattaatagtattcctaatgtgtgctgcagaaatggctatgagcctcttaaatttacatttgcaacttaaaggtagttttagaaggaagtacaaattggctttcatcttgcaaacaatcgttttttacttcattatcttaatttgctttgtcactcataaaaaggaaaccatacctgagttgtagacaatgaggaaacacttgaggcttctgctgtgtgttcttttgttattgttgttattgttgttactcagtaacttgaatattgtttaatgtgttgtaagacgtagagtttatctcaagctgttaaaaatggtaatgtacaaatgtgaatagacacttatctatataatatgggtaagttttgtttcgcctataatagatgtttataaaaacaagtgaggggacagttggtctttttatcttttctttctttttctttcttttctttttttctttttttttttttttttttttttttttgcttccacaggttgcactattgaaaaatcgagattgtataaacctggtaaaaagctgcaagatgccaaaatcttgtagatgtcaaataaaaagttattatactaacaagaagtggactcttgtttaggccctcactggtgaccttcagaagtagtctgtgacggggactcagcagaatttgtgtgttgtctcagcattccaggtagccttatagtttggcttaaaacttatccctaaaatgtaagatggcattgagggaaagggtataatgatagtacttctgaatgttttttaagttgaattgtttgtaaacttcttgcagaattgggtgagatgtgtgttaaaactgacaaacctggctgaaagcttagggcgttcatcctcttgtgtctcctttagcctgagtttggttatgtcaagcttaccgtaagttttcttaggatttatttattcttggtgcctaaaagaataaattgaaagtactttctgttctttggcacattttgcccagcggatgcaacttctatcctcagtccagttcatatatctcaggcagtgatccattttgtatcagccagtttcccttgttagggccgctagacccggctggcagccaagagcagcactctccccaccttcagcagaacttctcagctcatgtgtgtgtttttaaaagcagtaggcagcttccatcagcaatggaagtgtcccccactccagtggtggaggtgcagtcgctggacctgaggaagtggggaagcattacaaaccctcctgcagtaagaatggcagagttgggaaggatcttctctcgcaggctgttggcccaactcctcttttctgtgtatgagggcatcttagttttttatggcgttttcaaagcagcatatgaggattcttagcatgcagctaagtgacaacccccatggcctatgatgtaatgtttgctctggactagccatcttgataaataggagtgtatgtatcttaggttctttgtagaacagctatttttttttctcattaaaaaggcctctgaaagccctctcaaaatggacctcacaaaggcaaccagtgtgaatggatgggagctggggtgctgcatgcccaggctggtcatggtgtgtgcagcacccagagagttgcacccaccccttcttcaggtggacatccgacctttacactgtggtcttgcaaaaatcagcgagttagtttggccgccctgtgaagcttcagcattcaaggtcctcttctgttaaaacccaactcgtagccgggcgtggtggctcactcctataatcccagcacttcgggaggccaaggcaggtgcatcacttgaggccaggagttcgagaccagcctggtccacatggcaaaaccccatctgtaccaaaaaatacaaaaaatttgccgctgacttctgtaaaataggtccattcattgcaggatctaaatgccacacctgaattcagaggccttgtttaattaaccccatgtccactttgcctctgcaatgcctttttctttttagcaatatggctctgagcacaaagatttggttggaaatcatgttcgtgttttcagagtttacagcgtcaattgtactgaaaaccacttccagagtctaaagcagctcagatgttatctctgggggaattagtgttcccctcatttagcaacctccataccacaaggtctctgtctgtagttactgggattatccagatacactatcaatgatacaaattcataggagtattaatgcatttctttaaacacaacttgattaagaagcaaatatgttaagcagttttctttttctgctgctaaattacagttagacacttcagtatcttctctttacatgtgtatataaattagtaagaacctgcatccaaagcaatgtagtgtgtgtatgtatctatatatatttattctaactcagcacttcagaagcctttttgagttacaacaatattttagtttgcctcatctgtagaggtaaaatttctatattaccaagctccagaggaatatgatattttacaggcacaattttctggctgtagtccctggggcattcatttgctggcctccatgggatgctgttagaacaattgttagccggcaagagaagaaaggctaccaggacagcatttataattgtagaatgggagccttcttccctctcccctccactttcattttagcatgagataaaaaaatagattggaaatgattgttgcatctcacttcatggaagtaggggcagaagttccctctggatccttttcttgacaagcagtcaagaggaaggtccccatacacatgtacctgtgtgatacttggtagtttctaagaatggtgctacataagcgttgctgttaggctgggatcctattaatgaacgtttgattagttcaggcctcccaatggcaaaggcagacaccgtggagatggacatttactgactccccttctgtgtggcttcggtctccctggctaacaccacacctgtgcgtactgcgctcggcccactttgctgcagaaacgtagcaagcgtttcatgtcagggctacagctgagagcaaaaactgcaaaaaaaaaaaaaaatgtctcattgaatgccagttgtctgatacaaatgcagtgtcttttaagtgacagaaacacacctaaatacctgcaactcaagctcgctagcattttttttttgagtacttgagataaaatccaaaacccaccctctaattttgtgctgtatttatatatatgtacataaatgtatatatagagaaatgttgagttcttctggattctgaatgtaaataattcttgtaaattgggactctgcccacctgtttctcccttttccctcttcccttcagctctatttattcttttcttgactttcccatatggggcatcttatgacttttttttttttttttttttaagaaaagtatggaaaacttttcatttagaaaagtatttgttcctgtattttagaattcagttttgcatctttgctgtagaattcctgttttgtgttaatgttttttactatgtcttattgtgttgtgtgcaatgcattgtactggggggatgcacttgagtgccatttctgatactgtcattgtatgactgctgatgctcgtttatgttgttctttggaagctatagtgagcctgatgttttcacattttaaaaaatgcttcctgagacttctttaagctcctctaacttcttcagtgcatttgggatcaaacttagctcttagatcagcaaacctgacttgcttctacttttgcaatttttcaggccttaccatatttcttatctctgtcttcccacctgataggaaaatcttgcagatttgaaacagtggtttctggcctgctgctgcagcaaattccctatgtttatttaagaagtcgggcctatgcttttaacctacaaatgatgagtaatttacttgcaatgaacacaggtagcctgctgctgtttataacctgttgaggatatttatagcaggcaggaggcaggcctagtgtgttattgacaggtgactttagagaatgtacattggccgggtgcggtggctcacgcctgtaatcccagcactttgggaggccgaggcgggcggatcatgaggtcaggagattgagaccatctcctggctaacacggtgaaaccccgtctctactaaaaatacaaaaaaaaaaaaaacttagccaggcgtggtggcgggtgcctgtagtcccagctactcaggaggctgaggcaggagaatggcatgaacctgggaggcagagcttgcagtgagcccagatcgcgccactgcactccagcctgggcaacagaccgagactccgtctcgaaaaaaaaaaaagagagagaatgtacattaaggaacaattgtcctccaaaagagagccaagcaactgctctggagcctcctaggctgactctgctggagggtgagacaagcagattcccattgcagcactggtccctggggtaccctgaacggctgtgctctccacccttgtatcggtgagtggatcttgtctacatcagccgtaagcctagaagcagagcgggatcgaggcgtttttaataattcgagttgggaagacccggatggttcatcaaaatgatggtgttgagcacccgggaggcagacattgggtatttgttcacaattttgcacctgtaagaaaatgttcctttataactttcaaggattgccgtgagcgtctttggggccttttcattcatgtacaagtttcattcattactattcaacttggtagacttggtgaaaaatgtaaaagcattctgtatttggatcagtcttgggaactaaatttgtcgtgaattggggcctgtcacagattgcctccagtgtgcatcctccacgcagaccctccttgctcagtctccctctggcgcccatggggaagccgtgctgtggttggcagtgcggccatctgggctgccgcaacgtggcagggcaccgtccagcaagactgccccttagtgcagggctaagcaaggaaaagaagaagcccaaaaaggcgggttctttttgatacttgtaattcaggcgtcctccagagtgaaggccactctgcaggcccctggtgagaacctgtctggcttttccactgcgggcccctaaccagtaccctgcccttgtggcccatttgtgcctgggcagatgtttctggccagcagacactgaaggcctttttgctgtgacagtatttatggcactgaagaggataaagaagcttgagccctctttctgactcccactttatggggcagagagagctttttttctacatagcacattgcagtctcaccgctatcagaaaaatatcctgttcatggtttatactgaatttgcaaactactgatatgatttttcaataaccacttgtatcttccatcatccatgagaggtgggaagaggtacactgtatctctgcaataaaactttggccaggttctacctcctctgagcaaaggatacttttctatgtaggtgtagatggttctcctttactaatctgacatggtgcatctggagacaacatctgatgggatccaaagacaacttgaaacaaaggtggatgtcagctcttggtgtgttttcatttggttctcttttttaaatctcccttttgttatcgctcctgttgtagcgtgtccatcagtgtgtgaagggtgcgccctgttccaatgatactgcattgctgcatccagcctttcgtgggagcacggtaccaagcgtccggaattgattatcccaatcatttttgatatgtaactgaaaaatttggtctcatgcaataaaaatgtactggctgcattttagcaaggtttatttactcttgcaagtaaaaacgatcaaccgtgaagcgtaacaaattctgtatttagtttttttttctgttgtggtggtttttgttttgttttttgtttttgtaagattctaaataaattaaatacgagtca

SEQ ID NO: 367 - DNA, 1117 bp, Homo sapiens
tgggggagcagagggcagcacttcctccagctccaaaagagtgcacccaccccaacgttaccaatacactcgtgcaggcggaaagctccgacgccggtgtgcgtctacgctgggggcgtggcctgactgcgcggccagacgccagcgccatggaggagtacgctcgggagccctgcccatggcgaattgtggatgattgcggtggagccttcactatgggtgtcatcggtggcggagtcttccaggccatcaagggtttccgcaatgcccctgtttgcagattgctgtctgaagctcccttgtttatctactcttgctcaagatctgtgtctcccaccgttaatgtgagctctgagagggcagagagcagacctaccttgttcatggctgtatccctgcatatggcatggtgcttggcacatataggaattcggcaccggttgagaggtagtgccaatgctgtgaggatccgagccccccagattggaggtagcttcgcagtgtgggggggcctgttctccaccatcgactgtggcctggtgcggcttcggggcaaggaggatccctggaactctatcaccagtggagcattgaccggggctgtgctggctgcccgcagtggcccactggccatggtgggctcagcaatgatggggggcatcctgttggccctcattgagggcgttggcatcctcctcactcgctacacagcccagcagttccgaaatgcgcccccattcctggaggaccccagccagctgccccctaaggatggcaccccggccccaggctaccccagctatcagcagtaccactgaggaagccactgccaccatgggagctacttctcggttccctccccgatggtctacctcgaagggagggctggctcccagttagccctgggaccctccagagagggtttctactctgctccctagtcccagggtgggggtggggcaccccagctgccctgacagatgggtcccctttttctctctcagggcaccccagccccacactcacatgtacgaagttctcaccccagctcctttgtgtggcaccctgatgagtatttaaagcccgttttgaaatgcctaaaaaaaaaaaaaaaaaa

SEQ ID NO: 368 - DNA, 4188 bp, Homo sapiens
ggagcctagcgaaataaccctttgcttctacctgaatgggttgttcactctggattctgagcctgcagccagctccaaaatggggcctctgaagaaaagatttgagttgctcttgtgtcttagtcaaagatctacatccctaccagtgggtaaccaagactgtgaataagcacacaccaacaggggcatgtggtgacatggagcctgaaataaactgctctgaattgtgtgacagttttcctggccaggagctggatcggagaccccttcatgatctctgcaagacaacaattacatcttcccaccacagcagtaagaccatctcttcattatctcctgtcctcttgggtattgtttggacttttctcagctgtggacttctgctgatacttttctttcttgcctttacaattcactgcaggaagaacaggattgtgaagatgtccagtcccaatctgaacattgtgaccttactgggcagttgtctcacttacagtagcgcttacctctttgggattcaggatgttttagtggggagctcaatggaaactctcattcagacaagactgtccatgctgtgcattgggacctcccttgtgtttggccccattctgggaaagagctggcgactctacaaggtgtttacccaaagggtcccggacaagagagtgattatcaaagacctgcagttgctggggttggtggcagccctgttgatggctgatgtgatcctgctcatgacgtgggtgctgactgatcccatccagtgcctccagattctcagtgtgacagggaaagacgtgtcctgcacttcgaccagcacccacttctgtgcttcccggtattccgatgtttggattgctctcatttggggatgcaagggtctgctcctgctgtatggtgcctacctggctggcctgactggccatgtcagctcccctcctgtgaatcagtccttaaccatcatggtgggggtcaacctccttgtactggctgctgggctgctttttgtagtcaccagatacttgcattcctggcccaacctggtctttggactcacatctggagggatctttgtttgtacaactacaatcaactgcttcatcttcattccccagctgaagcaatggaaggcatttgaagaggaaaaccaaacaatcagacgcatggccaaatatttcagcactcccaacaaaagcttccatacccagtatggtgaggaggagaactgccacccgaggggagagaaaagctccatggagaggctcctcacagaaaaaaatgctgtgattgaaagcctgcaggaacaagtaaacaacgccaaagagaagattgtgaggctgatgtcagctgagtgcacctatgacctcccagagggggctgccccacctgcctcttccccgaacaaggacgtccaggcggtagcctcggtccacaccctggcagctgctcaggggccttcgggtcacctctctgactttcagaatgatcctggcatggctgcccgggattcccagtgcacttcagggccctcctcatatgcacaaagccttgaggggcctgggaaggactccagcttctccccagggaaggaggagaagatatctgactcaaaagacttttctgatcatttagactcaggttgtagccagaagccatggactgagcaaagcctgggtccagaaagaggagaccaagtccccatgaaccccagccagagtctcctaccagaaagaggcggctcagatccccagagacagaggcatctggagaactcagaggagcccccagagcggcggtcacgggttagttcagtaatcagggagaaacttcaggaggtcttacaagatctgggcctgggccctgaggcttccctctccaccgccccctcttgtcatcagcaaacctggaagaacagtgctgccttcagcccccaaaagatgcccctctccaaggagctcggctttagcccttacatggtgaggagaaggcgggcagctcagcgggcccgctcacactttcctggctctgcaccctcatctgtggggcatcgggcaaacaggactgttcctggggcacacagcaggctacatgtgcagaatggggacagccccagcctggccccacaaactactgattccagagtacgaagaccttcttccaggaagccttcactaccttcagatcctcaagacagaccaggtaccctggagggcagcaaacaaagccagacagagcccgagggggctagagggagcaaagcagcctttcttcgccagccttctggttctggccgggccccaagtcctgctgccccatgcctctccaaagcctcacctgacttgcctgaacagtggcagctgtggcccccagtgccctcaggctgtgcctccctgtcttctcaacacagctattttgatactgagtccagcagctcagatgagttcttctgccgctgccaccggccctactgtgaaatctgcttccagagctcttctgactctagtgacagtggcacatcagacactgaccctgagcctactggggggctggcttcctgggaaaagctgtgggcccgctccaagcctattgtgaacttcaaagatgacttgaaacccacgctggtgtgaaaagcaacagagctggtctagacacagaggtcagtccaagagaagctgtaccaaggcccacaggagaagagccaatttctggtctttggggaacagattagtgccctgcatttgaccagcccataccatgtttcagctaggctcactgtgttactttgagtacttcttgatctataaaaagagaggcattgcctgtcctgttactacctcgcagccttactataaaagactccagttgagtgactatgaaagacactgactccttggataaaaggtgctgaatgaacacataggattttctgtccaggtcagcctacattctgtaaaactcttaatatattcagatggatggctgaatggacagacagatggagagatgcatgggaaatttctgtagaacttgaggtgtggactgtgacccatcaaactggccttttggtggacagacctaccaggaagataagtctcctacatccttgggcctcccactcctggaaggcagtggttttatttctgctgaatgttgtgaacagcacctccctagattccagcttctggccagacccagctcagagccacccctacaccactatttcttgatggtgtctttccaccattatggcactttaccctcctctctgagacagatctccatgcgcccgcaggcttcccagatctctcccctgggatcggatgtacctgaggtcctgactgtccccactgtccccttgtcctgtggctcatcctcgattcacccactgatgcagttttgtactgcggggaggcacacaccagcaatttctgttggggtatgggagaacctgttggtcaagagtgcttttggttccattggggttacatgactaccaacagacacataaacctggaagccaaatggagaaataaaaaggaagacacgagggacacgaaaacaggaaagaaaacaggatttgaatatttcacttgagtccagcatagtacttggcaatatcatatttttgtgattccttttgataaccctgtgaagtagacactttcatttttacagacaaggattatgaggcttagagaaatgaggtagtttcccgcaacatcacactgctggacagagatgtacacacagctcctgggactcaagtaggtgggttttcccagggacacatggcttcatgtgttcttctgggaatggcaggtgacgcttggcagacgagacaacaaagcaaggctcatgtaagaaagctgggatgtgctcccctatagtccagaataatagacctgggtcctcacctcaggaaacgggcctccacttcctcactgccaaaggccacactggcacctcccaagggagctggggagctggtgaaggatgagtgcgaggaactcagccaccaccagagccacagggagagcacacctgggtccactgtgcttattgctgagctggctgtcatgtccaggctgtcccctgccccgagtcctgtgtatacatctgtgggtgtgcacatgtttgcatgaaggaattcaggccttattaaatattctcagagggggaaaaaaa

SEQ ID NO: 369 - DNA, 2109 bp, Homo sapiens
ggagctgtttacccccactctaataggggttcaatataaaaagccggcagagagctgtccaagtcagacgcgcctctgcatctgcgccaggcgaacgggtcctgcgcctcctgcagtcccagctctccaccgccgcgtgcgcctgcagacgctccgctcgctgccttctctcctggcaggcgctgccttttctccccgttaaaagggcacttgggctgaaggatcgctttgagatctgaggaacccgcagcgctttgagggacctgaagctgtttttcttcgttttcctttgggttcagtttgaacgggaggtttttgatccctttttttcagaatggattatttgctcatgattttctctctgctgtttgtggcttgccaaggagctccagaaacagtcttaggcgctgagctcagcgcggtgggtgagaacggcggggagaaacccactcccagtccaccctggcggctccgccggtccaagcgctgctcctgctcgtccctgatggataaagagtgtgtctacttctgccacctggacatcatttgggtcaacactcccgagcacgttgttccgtatggacttggaagccctaggtccaagagagccttggagaatttacttcccacaaaggcaacagaccgtgaaaatagatgccaatgtgctagccaaaaagacaagaagtgctggaatttttgccaagcaggaaaagaactcagggctgaagacattatggagaaagactggaataatcataagaaaggaaaagactgttccaagcttgggaaaaagtgtatttatcagcagttagtgagaggaagaaaaatcagaagaagttcagaggaacacctaagacaaaccaggtcggagaccatgagaaacagcgtcaaatcatcttttcatgatcccaagctgaaaggcaagccctccagagagcgttatgtgacccacaaccgagcacattggtgacagaccttcggggcctgtctgaagccatagcctccacggagagccctgtggccgactctgcactctccaccctggctgggatcagagcaggagcatcctctgctggttcctgactggcaaaggaccagcgtcctcgttcaaaacattccaagaaaggttaaggagttcccccaaccatcttcactggcttccatcagtggtaactgctttggtctcttctttcatctggggatgacaatggacctctcagcagaaacacacagtcacattcgaattcgggtggcatcctccggagagagagagaggaaggagattccacacaggggtggagtttctgacgaaggtcctaagggagtgtttgtgtctgactcaggcgcctggcacatttcagggagaaactccaaagtccacacaaagattttctaaggaatgcacaaattgaaaacacactcaaaagacaaacatgcaagtaaagaaaaaaaaaagaaagacttttgtttaaatttgtaaaatgcaaaactgaatgaaactgttactaccataaatcaggatatgtttcatgaatatgagtctacctcacctatattgcactctggcagaagtatttcccacatttaattattgcctccccaaactcttcccacccctgctgccccttcctccatcccccatactaaatcctagcctcgtagaagtctggtctaatgtgtcagcagtagatataatattttcatggtaatctactagctctgatccataagaaaaaaaagatcattaaatcaggagattccctgtccttgatttttggagacacaatggtatagggttgtttatgaaatatattgaaaagtaagtgtttgttacgctttaaagcagtaaaattattttcctttatataaccggctaatgaaagaggttggattgaattttgatgtacttatttttttatagatatttatattcaaacaatttattccttatatttaccatgttaaatatctgtttgggcaggccatattggtctatgtatttttaaaatatgtatttctaaatgaaattgagaacatgctttgttttgcctgtcaaggtaatgactttagaaaataaatatttttttccttactgtaaaaaaaaaaaaa

SEQ ID NO: 370 - DNA, 4022 bp, Homo sapiens
cctgcgagattctgtgccccttgtcgggccgcttgtttggctgctgccgtcacctcatggcgacgcgggtagaggaggcagcgcggggaagaggcggcggcgccgaagaggcgactgaggccggacggggcggacggcgacgcagcccgcggcagaagctggaggagagcaggagtgttcagaagcaaatgaagatcctgcagaagaagcaagcccagattgtgaaagagaaagttcacttgcagagtgaacatagcaaggctatcttggcaagaagcaagctagaatctctttgcagagaacttcagcgtcacaataagacgttaaaggaggaaaatatgcagcaggcacgagaggaagaagaacgacgtaaagaagcaactgcacatttccagattaccttaaatgaaattcaagcccagctggagcagcatgacatccacaacgccaaactccgacaggaaaacattgagctgggggagaagctaaagaagctcatcgaacagtacgcactgagggaagagcacattgataaggtgttcaaacataaggaactgcaacagcagctcgtggatgccaaactgcagcaaacgacacaactgataaaagaagctgatgaaaaacatcagagagagagagagtttttattaaaagaagcgacagaatcgaggcacaaatacgaacaaatgaaacagcaagaagtacaactaaaacagcagctttctctttatatggataagtttgaagaattccagactaccatggcaaaaagcaatgaactgtttacaaccttcagacaggaaatggaaaagatgacaaagaaaattaaaaaactggaaaaagaaacaataatttggcgtaccaaatgggaaaacaataataaagcacttctgcaaatggctgaagagaaaacagtccgtgataaagagtacaaggcccttcaaataaaactggaacggttagagaagctgtgcagggctcttcagacagaaaggaatgagctcaatgagaaggtggaagtcctgaaagagcaggtatccatcaaagcggccatcaaagcggcgaacagggatttagcaacacctgtgatgcagccctgtactgccctggattctcacaaggagctgaacacttcctcgaaaagagccctgggagcgcacctggaggctgagcccaagagtcagagaagcgctgtgcaaaagcccccgtccacaggctctgctccggccatcgagtcggttgactaagatgaggtgtgatcactgtattgagagatatattttgtgtataactttctctgttagtagttaactattggttttgtggtgaaaattttcttactttttctaccatatctgtattttcttagaactactggacttatgtggtacaggaggctgcttagcagttttgaatagtttaatctataaattttcctcagctgtgttgcacatcagcctcgttctccctccactggaatgcatgtgttcattgccttgtcctttctctccctgctccttgcacattatcatcctaatgaaaatttcactgacagggccgaccattacaagggaactttgttctgacgatggttccttgatgtgaaaacaatattaatttaaacgtcttagcccccccccccataatattattcagaaaaacaaaataccaaggcgattagttttgtctaataacccatttaaatgccaagtaaaaataaaactcctagtgttgggtcagaagcatatttgattgaaattagctttttgaaaacatttatatctcgggacaaattgagatggccacatgcctagaatcctaagtttcggcagaatatgtatataaagatgtcacttgtggacaaaatagtacatagaggcaaatcactagacaaataagcttagtgtttacgtgactgaacagtcatcctgctttggtttcaggtgtgggatttggaccatgaggggctcccgtagaggatggcggtttgtgtttgattctgatttgggatttcagtacatattctccacttcccatagaaggccacttattctttgaaaactggtgttcatgtttgccgttcaatgaagtcccttgtcaaagacaaggacggtcaattcacgtgtcactttcactaggcagaagtttctccaataccttctggctacttgaaagttactacaaaaattccaccagcaaagtactccaggtttttcaaaagggaattttcattatggatcagtaccaaccgaaattgattttcatttccaaaacaaacactggcaccaacatttttactttgggaagacttggcagagtgttagtcatgatctgttacttacgtgttcagtctgttttctcacccccttcttagttaccatctcttttttaagaagaaaaaagaaaagccacagtattatcaaggtctctacacttggactgggggaaaatttgaaattaagcacataacttttgaattagttctttgtttcaatgttgaatgtggcgcagttatgcagatgattaatcaggctgcactgatggaagttttgactttgtccctggtataatttgcattgaaatgctttatgaaataaaaggttctactagaactgatgttagcacattccactgagcaaaactatcagactgacacttgttaaattgcttactggactgaataaactctgttttgtccagttaaaagggttttctctttgttacaagtgttatttgtaaagtcctgtcacattcatggtcgaaactgggttgaaagaattgaaaattgtccaacagatagatagataggaaaccgcctggagtggaggagggttgtatctaagcctccactatcagtcatgttaattcaaggggccacagtggaggaaaataaatccacaaagtagattatctaattaccatcaaaatgagtcagaagcaaaaaacaccaccctccaacagcctcttaggagtacaccctgttctgctactaaaatactagactcatttccctggtggtgggggggaatgcaggtatagatcagaaatataatccaccttaaaattagtactaatgatcacattatttcacaagaactctgctggatgtacagctcttaacattttattaagccatttgtgtagcccaccacgtttctttgtggtgcttgtcctgtgtggaagattgtaaatcttgggcctgttgcatacttccaagggctttaaagcaatgtgattaacagtacttggcctgctgcttttggcttactttgtatttttagctagatgctattatagtgttgaaaggatatggattctgtctgggatgcatttgttgtcctttcagaacccttcctcccattaccctgtgaataaaaacaaatgggaccccctgagaaggacatcttcctacagtgatcacctcaccagcccagtgttgtggctttgtagcgcaccccgtatctaccatattctagaacactgtaatgctactaggctggcccagaaaaggtttaaatgttgaattcacttaaattgcaattgttgcaccatcatggaatcgtgatgtgtattatttatattggcggtggactccaaggtgtagagaaaacttgggtcttgggtaatatggaccatttcatcctcagacttgttaggagtacatttcttggtcttgagaccagtatttttcagttatgtatgcaactgcctttattacacctggttatcacaattcaattctcaggtgttgcagaaaaatctacctctttcagactgtagatggaaataactgtgaaaaaaatgatgcagatatcttctagtttgtgctaaacacactgctttatttttacagcccacgtctttcatgaggatacgaattgttaagaggcagtctcgttttgcttttcaaagacattttgtagagatttttcactaatgtgaatctgattttatctacttgattctgtatagattaagtaaatatgtatgataaacttaaaaaaaaaaaaaaaaaaaaaaaa

SEQ ID NO: 371 - DNA, 9032 bp, Homo sapiens; identical to SEQ ID NO: 10

SEQ ID NO: 372 - DNA, 13641 bp, Homo sapiens
cgccgcctgtgcagccgctgccgccgccgccgccgccgccgccgccgccgccgccgccgccgccgctgccgccccggctgccgcgccgcgccgctgcctctgccccggccgcccccgccgccgctgccgccgccggcccgcagccagccaggcgggcggcccagcccgcctgagcccgcagcggctgccgccgcagcgtcgggtcgctgggtgcgcgggctaccgcggaccgagcggacccgagtgggcgaccaggcgcttgcccgcccagtgccactgccgccgcttcctcgccggagcacaggaccagacacctccagcgcccgctgctgctgccgatgcggcccggacacttttagctgggcgggagggctggagagccgggggccgccgagaaccgccagcgagctgtgccgagagccgcgccgacccgctgcgatcagggacaggcgcccgcccgccgccgccgcctggccgctatggatctattcgactttttcagagactgggacttggagcagcagtgtcactatgaacaagaccgtagtgcacttaaaaaaagggaatgggagcggaggaatcaagaagtccagcaagaagacgatctcttttcttcaggctttgatctttttggggagccatacaagacaaacaaaggtgatgcacttgccaaccgagtccagaacacgcttggaaactatgatgaaatgaagaatttgctaactaaccattctaatcagaatcacctagtgggaattccaaagaattctgtgccccagaatcccaacaacaaaaatgaaccaagcttttttccagaacaaaagaacagaataattccacctcaccaggataatacccatccttcagcaccaatgcctccaccttctgttgtgatactgaattcaactctaatacacagcaacagaaaatcaaaacctgagtggtcacgtgatagtcataaccctagcactgtactggcaagccaggccagtggtcagccaaacaagatgcagactttgacacaggaccagtctcaagccaaactggaagacttctttgtctacccagctgaacagccccagattggagaagttgaagagtcaaacccatctgcaaaggaagacagtaaccctaattctagtggagaagatgctttcaaagaaatctttcaatccaattcaccggaagaatctgaattcgccgtgcaagcgcctgggtctcccctagtggcttcctctttattagctcctagcagtggcctttcagttcaaaacttcccaccagggctttactgcaaaacaagcatggggcagcaaaagccaactgcatacgtcagacccatggatggccaggaccaggcaccggacatctcaccaacactgaaaccttcaattgaatttgagaacagctttgggaatctgtcatttggaacactcttggatggaaaacccagtgcagccagttcaaagactaaactgccaaagttcaccatcctccaaacaagtgaagtaagccttcccagtgatccaagctgtgttgaagaaatcttgcgggaatcgcagcatctgaccccaggattcaccttacaaaagtggaatgacccaaccaccagagcttctacaaagtcagtgtctttcaaatcgatgcttgaggatgacctgaagctgagcagtgatgaagatgaccttgagcctgtgaagaccttgaccactcagtgcactgccactgagctctaccaggctgttgaaaaggcaaaacctaggaataatcctgtgaacccacccttggccactccccagcccccacctgcagtgcaagccagcgggggttctggcagctccagcgaatcggagagcagctctgagtcggattcagacactgaaagtagcaccactgacagcgaatctaatgaggcacctcgtgtggcaactccagagcctgagccaccctcaaccaacaagtggcaactggataaatggcttaacaaagtgacatcccagaacaagtcttttatttgtggccaaaatgaaacacccatggagactatttctctgcctcctccaatcatccaaccaatggaagtccagatgaaagtgaagacgaatgccagtcaggtcccagctgaacccaaagaaaggcctctcctcagtctcattagggagaaagcccgtccacggcccactcagaaaattccagaaacaaaggctttgaagcataagttgtcaacaactagtgagacagtgtctcaaaggacaattgggaaaaaacagcccaaaaaagttgagaagaacaccagcactgacgagtttacctggcccaaaccaaatattaccagcagcactcccaaagaaaaagaaagtgtggagcttcatgacccaccaagaggccgcaacaaagccactgcccacaaaccagcccctaggaaagaaccaagacctaacatccctttggctcccgagaagaagaagtacagagggcctggcaagattgtgccaaagtctcgggaattcattgaaacagattcatctacatctgactccaacacagatcaggaagagaccctgcaaatcaaagtcctgcctccgtgcattatttctggaggtaatactgccaaatccaaggaaatctgtggtgccagcctgaccctcagcaccttaatgagtagcagtggcagcaacaacaacttatccatcagtaatgaagagccaacattttcacctattcctgtcatgcaaactgaaatcctgtcccctctgcgagatcatgagaacctgaaaaacctctgggtgaagattgaccttgacttactctctagagtacctggccacagctcactccatgcagcacctgccaagccagaccacaaggagactgccacaaaacccaagcgtcagacagctgtcacagctgtggagaaaccagcccctaagggcaaacgtaagcacaagccaatagaagttgcagagaagatccctgagaagaagcagcgcctggaggaggccacaactatctgcttgctccctccttgcatctcaccagccccaccccacaagcctcccaacactagagaaaataattcatccaggagagcaaatagaagaaaggaagaaaaactatttcctcctccactttccccactgccagaggaccctccacgccgcagaaatgtcagtggcaataatggtccctttggtcaagacaaaaacatcgccatgactggacaaatcacatctaccaaacctaagagaactgaaggcaaattctgtgctactttcaaagggatatcggagggagacactccaaaaaaggcatcctctgccaccatcactgtcaccaatactgctattgccactgctactgtcactgctactgccattgtcaccaccactgtcacagctactgccaccgccacggccaccaccacaactactaccactaccatttccaccatcacctctaccatcactactggcctcatggatagcagtcacctggagatgacgtcctgggcggctctgccccttctatccagcagcagcactaatgtccggagacccaagctcacttttgatgactcggttcacaatgctgattattacatgcaagaagctaagaagctgaagcacaaagctgatgcactgttcgagaaatttggcaaagctgtgaattatgctgatgccgccctctccttcactgaatgtggcaatgccatggaacgcgaccctctggaagcaaagtccccatacaccatgtactctgagactgtggagctcctcaggtatgcaatgaggctgaagaactttgcaagtcccttggcttcggatggggacaaaaagctagcagtactatgctaccgatgtttatcactcctctatttgagaatgtttaagctgaagaaggaccatgctatgaagtactccagatcactgatggaatattttaagcaaaatgcttcaaaagtcgcacagataccctctccatgggtaagcaatggaaagaacactccatccccagtgtctctcaacaacgtctcccccatcaacgcaatggggaactgtaacaatggcccagtcaccattccccagcgcattcaccacatggctgccagccacgtcaacatcactagcaatgtgttacggggctatgaacactgggatatggccgacaaactgacaagagaaaacaaagaattctttggtgatctggacacgctgatggggcctctgacccagcacagcagcatgaccaatcttgtccgctacgttcgccaaggactgtgttggctgcgcatcgatgcccacttgttgtagtgggtgttctcagatctctagcatcacgacccatcactctacctctaccagcgcactgatggtcactggtggaactccactcactggggaacgttctctttggttatgtttgtttttatgcttcttttgttatctgtaaaaaacagaagtcattgtaagttgacactacaacttaagggcagtgtacgttttattacttagtcattttttttcttttagcatttgatatgcatttctcagattccaccatctttttgtgctttatggaatgacagtccctacaatattgttttaagcccacactacccaaaacaaagaatgggaagcacttgtgataaagacaggctcctgagaaatgcaacaagtggtcttacatatacatgagaacttagacacaagggaccatcccccaaactctactcttatacccagaaaagaacatatttcagaatctgtcaaacttttgtgtatcccacagattcaatcttcaggtgagaattttcattgtcaaaacccactggttagatgttgtagcaacatcataaaatcaagagtatcaagaaaataaatgagcatagcaatgctactcttaaaaagatgctatgccacacaaccagaggactttcttgttagcatccctttcctgattccctattttgttaattttaatgataagaagaaagggtgacatttattttgacaagttttaggcatcagctggcatcagtgtttttcaactccattatttgaagtgtaaatcctcacctggggttctctgtgtgcaaagctgtccttttgaagaacagtttggttgatgcatgccttagtagccaaaatgctacactctagacttacaagtgggagttaagagaggtctggaaagtgtccaacaaggaattcacacctctgcctcctttgcaacaacaacatttacacagttggtaagtgggtccataactggcaggatttttaaattgtattttgctcaaatctatgggaacaaaagtcaaggtatcactacctagaagtaatgatatacagttttcttcctagtggcttgaaaatctggacttcctcaattattattcacattttctctcttataggttttctgttttctactttcttttttctcttatctgtgtttccctttcctttgtttggctcattaacttttgactgaattacaattactccttttattaaagtccatattattgtgaatcatttccatgaaaatttctaagaaaactccaaactctctaaatagtagctaacttttatttttttaaaatgagtcgtggggtagtgcttcaccttgagatgctttgaaagagccctaaacattgggaaccattcacctaatttggagacatttctcactggttgtgactacccccttatgatccttcacattcattttatgtccctaaacatcacaatgtaaatatcatttttgatgttccagctcaccagaagattcttacacttggggtaaacactatccatgcattacttactggtaattacctgctggtatataattccatgtagcctttaatatgctgggttatcaaattctgttcactgagttatgaccagataaataatagatatgcacatgaaagatgcaaacttgtgtgattattaaagccagccatgcaggtccatgatagaaacagcaggtgatgactctgcactctcattgtcaaggttagatatatccccagttgcaaaacagccagacttgagctgtgctctggtcatctttgagtttaaggccttttgttgtataaggctgtggaagttgtactccaatggctgaagccatgttgttaatatggctgatgggagcatccctgcagctgaacccagcactttttatgctcccactgtggttgagctttatgtttacagtctcagcaacaacacttatgcatccaaacactcacaaatgaaacctgaaagaatcttttctgagcctcttaaaagaggaaaatgatgataacattaaagactctgaacacccaaggttggtgtcacatataaaaattaagctgatgactttgcagtgactcaagttgtctctttatcatggtttaccaggtagagtgcctggctattactatataatgaagcccactggcttgacttgtaagttcaacctaaaccacaatcctagaccatcatggatttaggagtagattcttcttgaaatcccacatccagaaactagacattagaatgttgaggcagtttcccagagaaacaagcatattgcctcatggatgaaagacttgtagttctagtttcagtgacttgttatatctacttacatacaacagggaggcaagaggattctctgtcatctctggtgactgagtgtaaaatatgtgccaagtctgcagcacagtgaccaaatctgacaatcgagctctggatcaccacttgattatgtagtagactcatttataaagcagcttaggaactaattaaacatggaggatgaattaccttcctatcccttgagataagacatctttcagtttcatgattaaggattgttgctgttttatagttactctgttcatcacagtgtaaatggtgatgcgtgtcgtaggtgtgcagctatttgagggactaagggatggagatattctgtcaaatgaatctcttcagtataccagtttgtgggagggatatgagacatgtggatggcagtgagagatcgtgcctctagatcttgatggaggcttggtgagacacacttaaataagcacgtggaggttagaatagagggcagagtaaaaggaagctccatctgagcaagtacaccaaatgatctcagccctgcaacttgacccaggtagggccaccactacgccttcacttgtcacccaagctccaaccacagagagtttgacaagtttgtgttatgatgttggcttggctttgtatttttaattaactttggatttttagtggttttgtcatataactgtctgagtttggtaggtaggattactttgaaaagggtttactagtgtggtcctccgggtagaatttagctgtaagcatgttgttagccagcctgtagactgttaattacttaataatctcattgggaaaatactagtagttttatatttggatgacataattggaaaagcagattagctgctactacttttaaaagacttaaggtcgggatgcctttttttccatgtaaggaaatgaaaagaccaaaatcttcaggcaaaaagcaagttgcaaaattagaaaccattggctaaaaatgtgttttgttgagtttccaaatggatgaattttcatttggacattacatcactaaattcattagattttgtctgcattggaaagatactcttctagcatatctttcccaaagatatctaatttggattctgtttcatgcaaatttgcatcccggaggttgaagttggagtttgaggttggaaaatatctttgaaggcagaatcagttgagttgtgagggtgaagcctcacatacttctcaacagacatgataaaattcacctgcatgagttggcaggtgggagaaccaaactggatcactgggtaagactactcagtaaagcaatgaactgcttgcttagagaagcatcactatccccattgagaaaaatgtgtggcaagatgatacagctacacagtatcaaatgaatgggtcaattcagcacccccaaatttaattctgtggggaaaaattattgagccagttgtcagtgttctgttacatgactggcagactaaattcttcatcgttgttgttattgttgttgttgtttctcattttcactcgcacggccttattctcataattaaaatctaattcattttctctttagtgttagtagactccaacaacagaagtggcatctgtgtattcataatcagcatttaccctggcaggagactaatcagataggccggtctcagacattaatcctaccatctgatatttttggtgaaggaaaaagtattaattctctttccatcctcctcctcagaaatatagaagccctctttaccaaaatcatcacattttactctgtaatctaccagctaaaagaaaattgcattgtggggagggcagaaagggggtgggggtgggggcgggggggtggggggtggggaagccccacaaagccagattgcagttcttgcccctttttgcgtctgacatgagatgttaaagaattattcatagtgctcacattgggttaggggacactgaactgctttttagatccatgatcagtcatcattcttctaagagattggagctttgctgtttcattaactgtgcagtgtagactaatggtgtttaataaaaatcattcaaaatttcaaactcttttgccagtgacctcaattttgttggctctgtgatttgtatcagactttgaggagggaagggggaagtgaaggaagcctacgtccaggcccctgacaggatgctgcagtagcaagctcaagctcgcctgcctgccagcagttgctggtgagcagcagcatgcagaccagctgtgggaagcctcctgaagaatgccccagctgatgctttcagctgggaatagtttgttcctattggggaactcattgttctccagtctctgcagcaggaagccagctgtcatattcggagggaatttcagatgctttacctttttggttttgtcctgcatcactcatgtggctacgaaagtgtctctgagaatagagcccaatgtggtgacaatgggtagtcaaatgcaccccagatgctcaagccctgttgtggttctgcagtgtttatgaaattgggaggaaggagaccctggacagtaagcaaaattggagacactccaacgaggctaagttaatgccgtgttgcccagaacaagatctagcttctcatttggtcagcctagcatgcaaccagtggtgtgctggtaaaatgtttaacaaccagctcgctgagaatagaaagcacctggtttgcaccatttgccaatttccatggcataaatactaccactttagatgattttaagctaccaactgtgatgtcactgaacacatggttggaaagagatgcacgcagttggctcttgcaagcctgggcaaaaatgcttcaacacgccactggatgcagccagtcagagggttcatatttaatatatgtgttcatgtggacacacacagacacacacacacaaactcacccttacacacacacttcgatgactaaaacaattacatagttttaagatatgaatcaatgtgtgaatgtagaaagcttatgataaggccctagaggtatgggttgccctggaagcctaggttttaagcaggagaatagctgagaagaatgaagccctcctgagctgaaaggagagatggatcaatggagatggttccatcatctccttccatatctcacaggtaaaatgggcactcagaaaaccctcacgattgattttttaaaaagataagtgagtgttttttattttattattattgtcatcattattttgatttacaaatgctatttgtaacttttacatgtaactaggataaagtatttacgggaactctatggagaatagcacaatccagaatttactgtgtttttcttttatgtgacgtggaaactcagtaattctcccaccttcacattgttgttcataagaattttactttagttattagggaatctaagttttttgttaacatttgtttttagttaaaagtatctacttactgttttagctctgaactcaaaccagaatatctctgtatcaattgcatgactattcagaaacaataatccaaaccaaaataattctttttccacccagtacgaagaaaactaagctcagtaacaagaaggcataaactaaagtatataatgaggctttcattaaatacacacacacacacactcacacacacacacatacactttttaaatttttaaattaggcctccacacataaatcattttgaaagtagaatagaaaatctcaaagaattcattctcctggtcctgtgcatcttctgcagttaataagaggtttgtatctggaaagatggaagaacttgttctaaaatcttatttttcaaaaaaaaatttccattttctctctgggcctgtatccatggttgaatgttagccctggaggagatccatgtcttactcgctctttctggcccttctgtcttttgcctctgcaattctttttgtagctggcacgatagcagggactgggggtctatcctttcatggtattgctacaatatttgtccttactggaaaatggtaacatccgggtctgatttaattggcattacacttacacagggactctgagcacccccgtcaccacaccagacagtggaccagttttcacagctacaaagagctagaaatgtgtttaacatcatccagtgcatcccctaattcaaaaccatcctcactaatcaatcatattcacccataaatattacaaatgagattgattccatctcaagacaatttgtcaaatacttaattttcttcctggatgattctacttactggatattttagaaagagaaatgtctgagataaaatccctcacatttactcaatataacaaattactgtttctactcctattctgagtagtgcttctgaagattgtttgctgtagtgttgtctttgataaaatgaatgtcagtagtgagccttttagagataccatgctcagaaatcctctttgggatcagaagatacctaaaattctccccttttgcccacttggttagatgagtgatatattctttggatcctgcaaagaagagattggtttattttcttttctggtggtggtagtggttgtatctgtggctgtgatggttgttgttacttgtctctctctctctctggctctggcttttgctttcctgctagtgttctttctctttccaaacaaatagttaaattaaatgtgagcttctgaattgtacttgttcatactttcaaaacataacagattaataaaaatagatgtgtcctgatttaaaacatgccccctggaaaggcatgctgtattatgaaatcgtgataatataactgcattattacatggcagtataaatattagtctgttgaattcatttgtccaattgtataactttgtggagcagtgttttgacctttgatacataattctggagcaagtggagtggttgcaggcagatgagacagtgttatatcaggatttttcaatcaactttagttggaggcctggcaattacaaacatcttcagatgtttctgtaaccattataaatatgaaaaaaacctcttcaaaaaatttcccatagtacttcagtcaagactttttaggtttatcttttttttttcatttctccttttccttttccattatttttcgatgggggggttgttatcattgactgaagaaatattttgattgcaatggtctctctctctctccccctctctctctctctcctctattctttcctccttccctctgtccatcacccctcattaaaatattgaaatctggagtctttgataaatctgcattagaccaggctatatgctaggaatgaaatctgggcaaatatcgatgggttttcaaagaatgctccatgttcattgggccctttcacaccccacagtgataaatgaaaaggatagaggtagttttttcaaaagagcactttaataatatcctctgagacctaatgcagtttaacaaatgactccacctatttttccagtaggtaaattgactgagacttgcaaaatacccctgagagttgtcaggggtgtcttctgcctggtctatagcgtgtgtgtttgctttgtatctaacaggcacattcacgtctcgtgtactcatatgaagtatttcctaacattcccattagcctgtatataagaatcagaaagataatcccaacatgttgtaaatgaagatgtgactctataacctttctcttcttcctggaaaaaaaaggacattttcatgcatattttaaacagaaattttgtatatttaagtgtcatagaaaatatttattgagtaactgggacacaaatgggaatttaattgtcatcatatgctttgtgtgtggggatgcttaccaacaccatgtcgctggaccattgtggcaagccataactgcacaaagagtacacatcgtcagtgtgtgtgtgtgtgtgtgtgtgcgcgcacacacgtgcgtgtgtgtgtccctgcatgtgcaacatgtctagcttgctgtccttcatgggattttagctttcccttcttgaaaaacattattttacagttccaggaggccctggttacattactatatgaaggcagtgatttgaaatgaaaattcctttcctcttggaagctttggtcataatatcatggttcaattaaacggattccaccggactttgtgatgaaaaaggctctgttaaaatccaattgagtttccaagaggaaattgtagtaggtcaagatgcatgagagggaagatggaggccacctcaactggagaacatgagctgagttgagccctcagtgttgaagttgacttgctccaagctgcagtctaaaaccctggggcccgtgcctggcctatgctccctcccaagtaagtagaggagcagaaccatcaggaacagcctgcctggctcctatgaagaaaacttcctgacgtcctgtccccaaaggaagaccctttccccaagggcaccccaggtggccattaaattgtgatgatcattcagaaagtgcccccttggctttatgagaatccaattagtcttctgaaccaccttttcttgggtgcagatttccaacattcatgctcattgcagatccaccaactgtcactgttcttaacaagcatgctcgtcttgtcagaatttcagtaagttccaatttcctgtacagaccagggtaaactgttctaaaatcaatcaattaatgaaatgttatctggtttttaaaagctggtttcatgtgctttatgtgtataaaactatatctgcctgtgtggctttgcatttcaaatgtgtggcgcacaagcgttttgttggtgctttgttctcagtacagtaactctgtgtacaaacattttaatgtggttttgttgttttccaacaagatgtctctgtaaaaatgatattggctgagctggtgcgttggtttctctcatagaggcattaactatactgccaatgcattgaattatttaaaaatgcaaaataaaatttttatgaaaatctca

SEQ ID NO: 373 - DNA, 1609 bp, Homo sapiens
actcggctcaaactctgggatctggaacatgctctgggctgtgaggacaagatgttacgtagtcaaggcacagctggggccaacggtggccctggaaggcagagcaccccgggctccgggccctagttgcttgggcaacgggaactgtcagcgacctggcccaatcacctctcggaacgtcactcgggcctccctccctgacatggagagtaacctgtctggcctggtgcctgctgccgggctggtgcctgcgctgccacctgctgtgaccctggggctgacagctgcctacaccaccctgtatgccctgctcttcttctccgtctatgcccagctctggctggtgcttctgtatgggcacaagcgtctcagctatcagacggtgttcctggccctctgtctgctctgggccgccttgcgtaccaccctcttctccttctacttccgagatactccccgcgccaaccgcctggggcccttgcccttctggcttctctactgctgccccgtctgcctgcagttcttcaccttgacgcttatgaacctctactttgcccaggtggtgttcaaggccaaggtgaagcgtcggccggagatgagccgaggcttgctcgctgtccgaggggcctttgtgggggcctcgctgctctttctgctggtgaacgtgctgtgtgctgtgctctcccatcggcgccgggcacagccctgggccctgctgcttgtccgcgtcctggtgagcgactccctgttcgtcatctgcgcgctgtctcttgctgcctgcctctgcctcgtcgccaggcgggcgccctccactagcatctacctggaggccaaggggaccagtgtgtgccaggcggccgcgatgggtggcgccatggtcctgctctatgccagccgggcctgctacaacctgacagcactggccttggccccccagagccggctggacaccttcgattacgactggtacaatgtgtctgaccaggcggacctggtgaatgacctggggaacaaaggctacctggtatttggcctcatcctcttcgtgtgggagctactgcccaccaccctgctggtgggcttcttccgggtgcaccggcccccacaggacctgagcaccagccacatcctcaatgggcaggtctttgcctctcggtcctacttctttgaccgggctgggcactgtgaagatgagggctgctcctgggagcacagccggggtgagagcaccaggtgccaggaccaggcggccaccaccacagtctctactccaccccacagacgtgatccccctccctcccccacagaatacccaggccccagtccccctcaccctaggcccctgtgccaagtttgtctgccgcttcttgcccaggatcctgggggtcgtggctaccccctcctctggccggctccttgctgctcctgtcatagtgagcttgtgccgtccccctaggatggggggcatggccctggctgccagatgcccacagcaccctggcatgacctgccacctctgcttccacaccggagccagctacctctcctgtgcctgccactcaataaacagtgtctgcgccccacagttgtgaaaaaaaaaaaaaaaaaa

SEQ ID NO: 374 - DNA, 10370 bp, Homo sapiens
gcgcggggccgcggcggaggctgggccgggcgggcggcagaagatggcgagggtgtgtaggcggcagcaatgctccgttgagagacgcggctttcggcaagaactggattcgtggcgccacaagctcattcactgtgtaggtcccgtttccctctgtgcggcggccggcgggaccataagggcttaactcatatatttaacccccctccaaaaaggtttgaaagtattcttgaagggctgtttggacctgcattattaaaagatctcagtttatttaaagactgtgaacctgaaagcatttctgattggacttttgatgaaaactgtttattctgttgcttgagaagagataaagtaaagggacacttagtcggtctggatgaaccagcttcgggagctgggcaagaagctctgcttaaacaagagcaagcaaaaatcattcgattcgagagacaagcagaagaattcctcaatgcagtcttttatagaaaagacagtccctgggtctccgaccccaatattcccctagtggcccgtgagatcatgcagcgaatgatccaacaatttgctgctgaatatacctcaaaaaatagctctactcaggaccccagccagcccaatagcacaaagaaccaaagcctgccgaaagcatctccagtcaccacctctcccacggctgcaactactcagaaccctgtgctcagcaaacttctcatggctgaccaagactcacctctggaccttactgtcagaaagtctcagtcagaacctagcgaacaagacggtgtacttgatctgtccactaagaaaagtccatgtgctggcagcacttccctgagccactctccaggctgctccagtactcaagggaacgggcgacctgggagacccagccagtaccgcccagacggacttcggagtggtgatggggtacctccaagaagcttacaggatggaaccagggaaggttttggacactccacatcactcaaagttccactggctcgatccctgcagattagtgaagaactactgagcagaaaccaattgtccacagctgccagccttgggccatctggattacagaatcatggacaacacttaatattatccagggaagcctcttgggcaaaaccacattacgagttcaacctcagccgtatgaagttcaggggaaatggtgcactcagcaacatcagtgaccttccttttcttgcagaaaactctgcctttccaaaaatggcacttcaagcaaaacaagatggaaaaaaggatgtgagccattcatctcctgtagatttaaagataccacaagttcgaggaatggatctttcttgggagtctcgcactggtgatcagtacagctatagctctttggtaatgggttcacaaacggagagcgcgcttagtaaaaaattaagggctattcttccaaaacaaagtagaaaaagcatgttagatgctggacccgattcttggggctcagatgctgagcagtctacctctggacagccatatcccacatcggatcaagaaggagaccctggctccaagcagcctcggaagaaaagagggcgttacagacagtacaacagtgagatactggaggaagcaatctcagtggttatgagtggaaaaatgagtgtttccaaagctcagagtatttatgggattccccacagtacactggagtacaaagtaaaggagaggctgggcactttgaaaaaccctccaaagaaaaagatgaaattaatgaggtcggaggggccagatgtttctgtaaagattgaattagatccccagggagaggcagcacaaagtgcaaatgaatcaaaaaacgagtaggaatactgtagagtgccaattactgtacaaactgggtgagcactactgcatcattgttcagctatcattgcttgcacgtaatttcatttactgtgacacttgcttctttgcagattttgcattgacttgtgtgtacagagatgaaatgtgcattctgaatgttgcatattttaaatttttcatgtgcagtatggctcggaatatgtttggccttttgcatgtttctctacaaaagagaattgagttacctcacagagaacagatacatggaagtggactccttgcctgtagagcctgcatgcttttttgtttttttttgttgttgttgttttttcttaagttatatttgtttttactttttaaaaaagaagaggaaacaaagcccccttttagaaactacgtctgtcatactgggagctttatcactgcaaattggaaagccatcttatacaaaattattcacatttttcatctacgattcaactaatcgaaggattaaactaaagaaaaaactaagaagaacaatgaacctttgactttgagaaatttggttattcactgacataattattgggtcatttatagttacattttataattttcttctcactattaaatttatttaaattagcaagctattagtgctcacccagaggggaaggtggtggaaaatgtgcacacactaccttcagaaatgcttcagttaattactttgaacactacctttgctgtaatttcatttgagattttctaagggtagaatttggtctcaccaacaagtgaggatatagccttatctcatggaggacgagctccgtatttactcaggagcagtcagggtacattacataaaacaatggaggatgcctcattttagcaaactaggtttctttgtattcttcagtccttttacagaattgatgtgctaactgaatatcattgcagcaactagactaagatattcaagatctctttattggggatgggagaaatagggaaagaaatgtgtataagtaattatgatattgcaaaagtgatacttagattttacagcctcagtagtctgcccagtgtccacattaatgaaggatccatgtttgtagtgagagaaaaaaaccccaaggtaacccgatatgatttaggatgcatatcagttctaacaattcaatcagaagtcaagctcattggaattccttttttaactgatccaaatactagtagaagggggagggagaggtgttgggttttttttttaagtttttatttaattttgttggttagaatttttttctgtttttggcatcctacataataccccccttcttgactttttctgataattagctgatattcatggttgtttagcacacagttcaggacctttgagatcatgtttgtataagcactccttgaagaatatctaagctttttctgagatgggcttttaaaattataataagggaagtttattttctgcggtttttgcaagaataagcaaagcccatggaatttaatttttcattgtgatcagattaaaattactatttgtgcaaaacaaattccacaccacatgtactgtatattctaatctgctgagaaaggtggtcaggcccttctaaatgcttaaccaaaaacaaacattattggagtttcagtgtaaaataaaattaaaattggagggttggttagattgatttcagatggatactaacagtttgaggggaggtccagatatttccaaggcataaattcttgcctggaaactttggagcaattaattaaattaggttaagttttccctcagcaacctgtgtgttcaaaggttaggcacaccattgctgttactaaaatacatgcactgctcattcttgacatagcttgggtgtgggttcctcttgttttggttattttgtgtagcagtttaatcagtggataactgagcctgtttcctcttagctttctagacttcttaacagaaaaaacagtttgggttcaatagcattttatgattctacaatattttgtcacctagctggaagttgcaataaaaattccttatgaaatatatggttttcatctgtaattgaaggaaatcatagaaagtttgctgaaagcaaagggctaagcttatgaaggaatgcctcctttgttacacactcaagaatttgtcagcacacaattaattgcagccatagtacctttttgcgtaatgtttgggatattcagtagcccaggattgctacaaaaaggtcctttgagaaaattaatttgtgcttgcttttatcccctctcagaaagacatcactaaaggcccattaaaaatctggccctaaaagttcaacttttgtagagtttattgttcagagaggtttaatcctatgtggtagtctatataagtgatgtatgagttgagttatgtaaattttgtcattgtagtgtacatggagtgatcattttactaacataaatattttctatgtgtgtttcagtggatgacaatcgagcagcagaagaatggtgtgcctaccctttaatgctgcagtttaagagaacttgtattgtgtcatttcagattgtaggctgagagttgtaaatagtgaaaatttgagtacttctattatttgttttggttagaaagtgaatttaaaaaacaaaccaaactctaaactttctcagattaaaagtcctgagacctgaagattgtaatattcatgtctgtgaagcttttaaacattacacttgagatcagtcatgacttgatattcaggtaaattttcttttccaagaagcttttgaataagcatatttcctccaaaggtctctctctttctctctctttttttgagtgtagattattttaaagcactaattgcattacattggtaactgcaatataaaatagccattattgttttgtgaagcatggttgaaattagctagtggtcccttttgaatttcatgagcctctcaaaaaagaaaaacttaaaaaaaaaaaaaaaaaaaaacaaaaagctgctggaatatttcaaaagatatatattttaccttattataggttttgtaaagttagtttgtaatattcaggtgcacttttaatgttaaattttgtgttcagagttccattataccatgtatttctcggaggtggctcatcacacggctggtggcagtcttggtgccgcagtgattccttaatatttgatttctctcttgatttgccactattctgtattggcactttcagtgtagatattctagtttggggatgtcctcacaatgtgtaatagagattggtctattagcatgcttaatttctgctaatcagagttttgcatggcccaaacaacagttgaccatttttatggtatgggaaagtgtagttcacaactgtctttgtcacgaaagccgtttttcctcacattttccagtaggcagataacattacttaaattattaatatataacactcttggaactattgataggaaataatgtatttaaaataattttttgcattttcagagaccttgatgttatagggtagataagctatggcactataaaatcaaaaacactaattctgtggaaggatatctagttggtatttttatctttagctttctcatttctgagacagcatagtcatccagcttgatggtaatgtagtatattactttgttcagtgggcttataagtgactctgaattatgtttgtgatgagctatacactttttttctgttccccaaataccatgaaggacaaggtcactctttcaggaaaaataatttatatttgtgtataatactttttaatattaagtttgttgttctgaagtttagatgttgcttgataaacctttgctgcagcagatcatgaatatgagtaaggctttgtgtgataataggggtccttatgtgaagttaattactgttcagttctggtgagcaagctcaacaagtgtgaagtgtgtattagctttatttggtacacttttactttacaatatcgaagtgcttttagaactctggttatcttatataaaccattacctcaaccaattggcatttcttttccccaacatttaccttagctataatatgagctatgtgggatcagatggtaaaactataaaaggcacaatgagaagtttagttcccaagttttggagagaactctaaattagactaaaaacaactacctgttaacaccaatatcataactaccttctgtcgttaggcagtacatagcaacctttgagctgctagtgagctatctgttctccccctacccccaagtaagcacacagtgccaggcctggttctaagcctttgtgattctcttacatctcattgacccataatagtgaagcatggattcatttattttcataagacaaattgagtcagctcgatgtcagaagttgaaaatattttgagtagtttaacagttatatgagagattggcatcattttctttaacagcttttatctttgtagatttccttttgagacatgtatttttgcttttataatcctttcattaaatgccagaggttgttttcatattaatcactcttttctgtatattcaggttgctgtcattggtgatagaatatggcaatagacagaattgtgctccactttatgttttttaggagatattgaaagttataggttaaattttggccttcttgaagatatcaaagattgttttccttgttacctttaattagaatttggtcttcattaatgctttggtcaggctagcattactaaaaacttgatggcttcagcagaacagcccgtttaggagactattaagctatctagggattttttttcaaattaattgctttcaaaatctgaaaaggaaaaaagtataattgtggtacaaagaagacagatctccaggctctttcttctcagtttattttggtttaattctgtactggagacttgaataggatttgtgaacatggtgatggaaagaaaaatagaggacattatttgtgtaccctcattcctgaataatcttgcagtcaccttttaaagaagcagacattagccctgtaacacaacactgtagctataaactctaagtgttaggaaggagattggggtggggagggtggagtaggatggaaaaagcatgtagacttctgagaagaggctaaaaattctgccctataatactaaaaatgagtcacaagataatgtggtgaagttaggccatcttgatttgatagaaaaatcttttacattgtttaaaaatgagaatcgaggctaattaatgttgatttgacaatagaacatgagctaattctgcaaccgtttggggggtaattttatggtttccagttcatttagagctgtatcaagaaaagctaaaaagcaagcacttttagttaatcatagatttattggatatagcaaatattattataatatttaatctctattatttgaatgtggaaatgaactcttttaccccatcttgaactgtcattgaacatgctcaagatgatcaacactggaaatgaccctacacacataccaaaaaaatctaaagcagtaagacatatttgaagatccatacctcttaaactttttagatttgtcttgggaaagaatttatgaacctgtaaccagtattagtgcagtcttgggttccttgttctgcataattgcaccctttctcaggtatgtcctgacaacataaattttaaaataatctcattagagattagattctcagtggatagtgtgtaaggggactaggggtggggggttgggggtagttggacacaggacactgacacagtagagcagggatttttaacagtcaatagccaaatagaatttcaatctagaatatttttaccccctcagaatgagtgaaacaacttctattatttggtgtacccggtgctacactcctaaaagtcttttttttttttcatccaggtgacgttttttatttttcctgcttggtggtggaaggttatatagtaaacttcactgtcattaagaaagcgcttgtccaaaatgtttaaagtactagaaaagggataattcagcactttttctgttacaacactaaagtcttaatttatcttcagagtcttaggtactgtaagtttttggatgattatttaaaaatataaaacatactacataatatggggtcagatcacatttatataaataattcttattttaaaaaagacaataacattttgtacctttctagcaattccaagtgattgcctcattttctcttgttaagcatttcaagcttaagaatttggaatttgagagaaggtgagggggaaaattccctaaaataaaaatttgtttcaaaccattttagaaaaataaatcactaggaaaataggtagggattctctccccctttaagtcttcagggaatgagcagtatttagaatctttggctgaaattcaagcctttttactttgtaaatttttaatattaattcactgacatgctttttacaccagaggactgaaaatggatcttaatgtttttaagttgtggaagggtatatttctaaaatgaggggggatgattaactaggttagtattaccagcattagtaagtttaaggaattttagtatgtaatagcaaagtgtttgattaaaagtctaatcctatattactagtcaaaattagttacattctgatctaggaaagataatagtcattggatattgatatgctgtgctgtcagaaaaccagactaagatagaaacctttatctgactcccacatgttgcttgttgtgatgggatgtatactttacagcagcttattgctgctttgaaaaaaaatgtataaactatacatttggagtgtttgcatataattctttataacctccacttaaagctgtcagacattggtattttatcagtccacattgttgaataaaactaatgttcttaggaatccagcttgtacacactgtttaaaaaccctcagggacagtttacacactcttctcactcaattcaggtactttgatgctattcttaaacctaacagtgacttgtatttttctgttttgcttttatttcaacgtgctggtagcacatctgatgaatgtcaacttaaaaaactcagttcaggtatccaggtataactcagccaaacagattttaaagctgcatataactctccagcacatggtgcctcacactcttatagtggcattctatatattcagttattactactgagcagataatatgggggttcctgttaacagtgtattttttaaaaaaagcgcataaatgtatagccagcacactacacacacacacacaaacatgcacagttaaactatatatttttaaatgccactaatagccagcacaactaaaacaaaagacattcctaactgctctgtaagctgttaacagatgcagttccttcttgatgtggctcttgcttcttcacgataactactactaaattcaagcactggtccttgggtgtctgacctctacattctagtttatgcaatgtctttagagaattttgtgcactggccactgtgatggaaccattgggccaggagtgctttgagtttatcagtagtgattctgccaaagttggtgttgtaacatgagtatgtaaaatgtcaaaaaaattagcagaggtctaggtctgcatatcagcagacagttttgtccgtgtattttgtagccttgaagttctcagtgacaagttttttctgatgcgaagttctaattccagtgttttagtcctttgcatctttaatgttaagacttgcctctttaaaattgcttttgttttctgcagtactatctgtggttaacaaaatagattatttctctgctttaatatttgatatcttacatctaaaataaattctctccacatataaaacccatagcctttggagatatggaaaatggtatctttcagatttctagaagttcaagtgtcatacaacaaaacaggaaccccctttactcttatggacctcatttcaatatactgtttacagtttgatggaattgtataatttaatatttctcttgtactgtagtttatatttatttacagatttttttgtactgtgtgatttgaactttttgttccttgctatgatcaatgtttatgtagtagagcacttatgatcacaaattaagttttttggtttgattgcactacattaaattttttaatgcagttctgatttttgactggactaaaactgtgtcttaatgtatgtgatgagtacttaaaattttaatccatgtggtccccccccttttttttttttttgcattgtatgtcaaaagcgcttgttctttcgtgcatgtgtaagatttaatggttccattgtattatttgaccatgacattttggagaaacattcccagctgtaatgttgtgtatggtagttctcactggatgctagagttttcaaaaccactattcttctaataaattttgttgtgaaaaactgttaaaaaa

SEQ ID NO: 375 - DNA, 1799 bp, Homo sapiens
tgcctttctcctttccttcccggatcccagacctgcctcgatcccaccacctgctgaggagaaaaattcttcaagactcagagcacacagccagcaccagaggccccatgaccctggacagaccaggggagggggccaccatgctgaagacattcactgttttgctcttttgcattcggatgagtctgggtatgacatcgatagtgatggaccctcaaccggagttgtggatagagtccaactacccccaggccccttgggagaacatcacgctttggtgccgaagcccctctcggatatcaagcaagttcctgctgctgaaggataagacacagatgacctggatccgcccttcccacaagaccttccaagtttcattccttataggtgcccttactgagtccaatgcaggtctttaccggtgctgctactggaaggagacaggctggtcaaagcccagtaaagttctagagttggaggcaccaggccaactgcccaagcccatcttctggattcaggctgagacccccgctcttcctgggtgtaatgttaacatcctctgccatggctggctgcaggatttggtattcatgctgtttaaagagggatatgcagagcctgtggattaccaagtcccaactgggacaatggccatattctccattgacaacctgacacctgaggatgaaggggtttacatctgccgcactcatatccagatgctccccaccctgtggtcagagcccagcaaccccctgaagctggttgtagcaggtgggtgtggctatggctgctggcatctggcaattgttgtcccaggtatcatggctggctgagctagggtttctgattttactttcctcagccagtttctaggccctgcaaggccccatgagctacagtcgtttgaagttttactgagatataaattagaatggcatgtgctgcaaggcagatgtatgggagccaatcatttggctagtaaaggagcccagccaactggccagcagcttcagctcatcacagctttgttgttctcaacttgttgaatatcatgcattcattcattaattcaaccagtatttattgagcacctaatatgtgccaggcactgccactgcaatcttataaatggagttttaaatttgcaaatgtattttatttgtaattgttatttttatgtgtggaaaacagaatggattgctagtgttggtgagtaaaaacaaaaaaaaacaaatgacaaagaatgtgatagctcatattttagaaatggctttataaatcaccttggttccctatcagtagagctagtaaggcagcaccaatctctaaatatagaagaaatttccccaaaatgtaaaatgccagacatgtcccagcccgaactcccccaccccatggcctggaggtttctagatggaattggccacatttgctttagtctctctatccagctaaataggcttggggaaagctgtggtgctacagaaagtaccctagacttagaagcagtaatactggtttctagttctatttctgacactgcctccctgtgtggtcttgagcaagtcacttcacttttctgtgctttggcttcctctactctaaaaatgggataacagtatctatctgatctactgtgtaatgcttctctctgtgcctcagcttcctgatctgcaaaattggtttaataataatgcctacctcacagggttgttgtgaggatttgcctaaatatatatgtacagtgcctggcatataagttctcaataaatggtagatattaaaaaaaaaaaaaa

SEQ ID NO: 376 - DNA, 6409 bp, Homo sapiens
ccggagccgcgagcgccaccagggcagcagccgccgcagccgccgccgctgggcagaggagccggagacgcgagcgggcgaggtggcggcggcggcggagcgggagcgggtaccgggcgcgggcagagcgcggcggcgcgggtgtgttccagagaacaagccttcagacatttgctatattgacgctgagctgtcaggggactcaggcttatgaggaggtattgttacacaaaacagtgtctagtgaagacgacaagaaagaggggaaaggatcggaaaaagaagctaaaatactatagaaaaccatgataaacaagaacaaaagaggcaagactgttcataaaaaattgagaatgttttagtttgcgatggacttcaaaacaaaatatttaccatgtactaacatataatttcatagatctattcgatcttttgctaatgatgatcgccatgttatggtgaaacattcaacaatctatccatctccggaggaacttgaagctgttcagaatatggtatctactgttgaatgtgctcttaaacatgtctcagattggttggatgaaacaaataaaggcacaaaaacagagggtgagacagaagtgaagaaagatgaggccggagaaaactattccaaggatcaaggtggtcggacattgtgtggtgtaatgaggattggcctggttgcaaaaggcttgctgattaaagatgatatggacttggagctggttttaatgtgcaaagacaaacccacagagaccctgttaaatacagtcaaagataatcttcctattcagattcagaaactcacagaagagaaatatcaagtggaacaatgtgtaaatgaggcatctattataattcggaatacaaaagagcccacgctaactttgaaggtgatacttacctcacctctaattagggacgaattggagaagaaggatggagaaaatgtttcgatgaaagatcctccggacttattggacaggcagaaatgcctgaacgccttggcgtctcttcgacatgccaaatggtttcaggcaagggcaaatggattaaaatcatgtgtaattgtcctccgcattctgcgtgatttgtgcaacagagtccccacatgggcaccattgaaaggatggccactagaacttatatgtgaaaagtctataggtacttgtaatagacctttgggcgctggggaggccttgagacgagtaatggagtgtttggcatctggaatactacttcctgggggtcctggtcttcatgatccttgtgagcgagacccaacagatgctctgagctatatgaccatccagcaaaaagaagatattacccacagtgcacagcatgcactcagactatcagcctttggccagatttacaaagtgctggagatggacccccttccatctagtaagccttttcagaagtattcctggtcagttactgataaagaaggtgctgggtcttcagctctaaagaggccatttgaagatggattaggggatgataaagaccccaacaagaagatgaaacgaaacttaaggaaaattctggatagtaaagcaatagaccttatgaatgcactaatgaggctaaatcagatcaggcctgggcttcagtataagctcctatctcagtctggccccgttcatgccccagtcttcacaatgtctgtagatgtggatggcacaacatatgaagcctcaggaccatccaagaaaacagcaaaacttcacgtagcggtgaaggtattgcaggcaatgggatatccaacaggctttgatgcagatattgaatgtatgagttccgatgaaaaatcagataatgaaagtaaaaatgaaacagtgtcttcaaactcaagcaataatactggaaattctacaactgaaacctccagtaccttagaggtaagaactcagggccctatcctcacagcaagtggcaaaaaccctgtaatggagctcaatgaaaaaagaagaggtctcaagtatgaactcatctcagagactggtggaagccatgacaagcgctttgtaatggaggtagaagtagatggacagaaattcagaggcgcaggtccaaataagaaagtggcaaaggcgagtgcagctttagctgccttggagaaactgttttctggacccaatgcggcaaataataagaaaaagaagattatccctcaggcaaagggcgttgtgaatacagctgtgtctgcagcagtccaagctgttcggggcagaggaagaggaactctaacaaggggagcttttgttggggcgacagctgctcctggctacatagctccaggctatggaacaccatatggttacagcacagctgcccctgcctatggtttacccaagagaatggttctgttacccgttatgaaatttccaacatatcctgttccccactactcattcttttagcaaatgacagaagctaattcctattgaacaacaatacagtacaacacagaatgttagagaaaaagcctttttatcctgctttctttgaacacatacttgatcaaaattatttgtaaagaacatctttcctactttttgattttaacaaatgcaaatttagttctctaaaacttgaaaaaaaaaaaagaaaccagttctgtgaaaacggtacctcatttctggaaaataacttataccagcccttctgttctagggaaataaaagtctagcagttcaaagtttaagttttaagagacgtatcagattatgtaaaattaaatttgtgaaggatgtatagagtctcaaacactgatcacaaataaactgctttgttgtaacacagagtactgcctggttcctgatgcagtcactgattcttagttgattgatatgtatttgccccagggcactttaatttgggctgtagttattttttttaatacaatagagacttttcatttaactttaactttgtaaatattgaagtgtgtaataaagccaataaaatatgggtttgaatattgttttagcttattatttttgatatgttttggtatcaaattacaaggaattgaaaactaataacttagccctagaagcccattcacttgtaagcaaagtgctaaaacaaagcaaaggtgattgttagtttgagccagtctactcactttgtaagccctttgtactcctgttgtacaagggccatccccatgataaaggttccattctgttatttgagcattgcttattaaaatgatggcactacccagagatggggaaggagaatgtgattatcctagtttatgaatttccaagtttttaaaaataataaattaatcaatcaatcaccctctcttgttcttgtggccttcttcactctgtaagatattgtgttcactccctggcttttttcatgcagatagaagattagtgattttgctgggattcattgaagggtctcctttcctcttcaattacatcagaatctaaagcagcaacagggtccccataaaaacttgctcttcgattgtcccagttcttgttgagtgctgctgtgaaaagtgacaggtttcagccatgggtcagcatttctttttaagacacctgatgatgctggtggaaatggatcagtgggtaacattgtgctgttctgtaaagggtgcagacctaagtcctccacttgcattctcaccttgtttggaaagccaatgatgttactaggtcaatggtttcattaaggtactcacccccatgaaggagcagcagtgtggtcccctgtcaatatttataaggcaccatgtcttaaaaatgtctgtttttagtatgaattagctttcattttccctattcagttctgcttttgggaacttgacagggcccatccatgagaatgggcttcacaaaatatggcaaatgtatgtaccaaattccttcgggaccactaaataaaggtgaaatgggcaatgtacaacaaatgttagtgtcacttctcagatatatattacacaatgattagtttgtttcttctccttggtcttttgtctttattagtggtgggtgatactttaataaaacctcatcacttgctggaaatagctgtaacttatcattctcatcctgtgcattagtggctagacataaacaagagggcccatttcagctgggagttttcatgtttcattgatgcgttttgctgacctatggatgaaacagagccatcactgagaagaaaaagcatggctgatagtgtccagtttttattaattaaatctttacagtagtcctcattgtctttggaatactattaattggcagctgcggctgtattgttatttgaaattggtcatcaaatttggattccacgttggaatctctagatatttctcgttagaaaattcttttgaagtagctgactctgcttcataactcacgcgctctgtaatggtgaaaagggagctgtgctgttttccaacatgatggcagtcatttcaaatggtttctaccaagtcttttttttttttttttaattttgttgtttgttggaagttactaaccatgttgtaaacctgcccagttgctgcaaacttttacatttctctgctttacttaaaataatcgagctgtcagtcctttgttagaagtggtaaccatgcaagttcaactgtttaaattctgtaatgaattaagtgtccccccacctgttgcccttcccacccttccattttgtaatgaaaattccacttacagctgaaagagcagagaaatataaatgaagctcttggcttcaccaaattgcctgagattaacatgaagttttgcttctctgctcttttctccactgtaggtggttttttcattgacagcccctattgccagcctctgagcgtcgcaccatttattattcacttgggccctcaagatttcttctctgacttctagaaccatcaggttgtctggcttgaaatggcaatttctatgtcttggtcttaagagcaatgtgacaccctgaggctatccagctttcagacactccactctgacaccctctttttgaaagcaatgactgatcattttaaagaagagcaatactttgttcaaagccacggtgtctgttttaaaacttttcctttggaaacctagcaatatctgtacttaacccctttttagcatagtttcttgtcagggagtttacaggtcagtgtagagcttaaaattagcgtgtgagctgtgctatgttctgacagttttttacactttttagcacataaatagttacattcctgactgcgtcagttagcgttactataatttctcagagataggggtcctccttgaagccatatcctctgcacggggactggcccctagccagggatgtggcttgcagcttgtgtttcttcaggctgcaggagtaccccatctcttgtgcaaggtaattggtccagtagatttccaacatacctcatgctgactagatgaagtgcatgggtggtgaagtaaggagttgagtttatatagttctgaagtcgtttgtagtctctctcaaattgttagcctggggaacaaaccactgagagattttgctggtattggccttttctttttttttttttttttaattttgggtgaatgtttgaaaatcatgaatcagccaccattattaattgaagagctgggaatacctcgttaatgtatttttaaaactggtgttggaccctctgtgtatttcaggttaatacttttaagcagttttcagcacgtttatctcactttattctcgttctcctcggaccttcgtagccatatcacttgtataaaataggctgagatatagtgactgtaagctgtgatctcagtatacaaaggtaagctcttttattttctgattaaagagaaaaatagtcaattaagacaacatgcatatatgacaatcatatatgatgtatttgatctcttaggtcatatgtcatcgcattacctttaaaaattgtatggtctaaatgtaaaatagttatttttcaacatttgttttaatacccttgtaactgctttttactcaagacagacatttcacttacactaagtgtgtgtgtgtgtgtgtgtgtgtgtagaaacttaggatataacacgtatgtaaattacacacacatacctgtttaaatgtaagaattcagtgataggaacagttcatctaagaagattttaatgacagggcactcttttggccaaagcagtggaatttcctaagcagcaaggttggtaatagtgctggtaggatctgtatgtgtaagctgttacacaagctgaggatcaaagtgccaatttctcaaggagaaaaacttctccgagaaatgaaagtctctgatctgtgttgtatgccctaatacaacaacagcaagaagccatagaaaaaagcaatagaaaatgaaaaaaaaaaa

SEQ ID NO: 377 - DNA, 2054 bp, Homo sapiens
gaggcggggaggtcgctcgactcgccggcgctgtggcctcccgcggagccgctcagactttccctgccggcacatggacctggcccaaccctcacagccagtagacgagctggagctctcggtgctcgagcggcagccagaagagaacacgcctctcaatggtgccgacaaggtcttcccttctttggacgaggaggtccccccggccgaggctaacaaggaaagcccctggagctcctgtaataagaatgtggttggaagatgcaaactgtggatgatcatcacctccattttcctaggtgtcattacagtgatcatcataggcttatgtcttgctgcagtaacttatgttgatgaagatgaaaatgaaatacttgaattatcatcaaacaaaacattcttcatcatgctgaagattccagaggagtgtgttgctgaagaggaattgcctcacctgctcaccgaaaggaatgaagtgatggaggctggtctctgtctgaaagcagtgctctaccaagtcctggagatgaagggaattcactctgttttgcagaaaagattctgtggattaatacagaagcaccagcaacaccagaggggtggagactcctttctctcccgattctacagtctggctctaagcccagtaaaacagctcccgagcactgcttcagctgggtccagtcttgacaaaggcaggaagccagctagggtgggggcgatagggtcagcgggtatgtcccactgttggaggtcactggtattctgtttgtttttgttttgtttcgttttgttttttgagacagggtctcgttctgtcgcttagctggagtgcggtggcgtgatcatggcactgctattcttgaagcactccacccacctgggctactttttctttagtgcagaggtgcactgtcttcttttaggtgggatcgcgtaagcatgagctggtagagcacggagaggcaggcagccaggttacgaagactaagccaattattcactgaagtcatcctcctcccccccaccattcgatttgatctacctctaagccaggctgtgaagaaaaggaaggcactttagaagacctcagcagtgtggttctgtgtctacttccatgacctgtacctgagtatcttagccagccagccttaggaacaccaccaaggttactttgaaatctatgtatatagctagttacagacgggagctatgtgtttcttcattattttgcagctcctcgttgttcctgtgattcctgaacacctttttggaaatatgggtctctgtgagttttgagcacactactatcactttggatagtcactccatttatatttttataaacttccattagagaatcattaaggctgtttaatatctgctctggatattacgcattggctttttgttgcctagtgctacaaaccttcctgtgggactcagtgtcttcaggcaatgattgtgtatcctgttacagatggttgtgatacaagaagaaccactcttctttgaaaataaactcttggaagcttttgccagctatttggggggtaggaggaatattagcaactgtattggttgtctacagatacagaattgcctgttgtgagggaactgattgttttgttgggaaaagaaatttaccaggagaaagagttttgtgctgtattgtgagagatctcgcctctcagttaaatgagccctgggttaaagtcagtgtgaagggcagctgtgtgcgggcacgagccagagtgtctgcctcagactagatttgacttgagttctttatgacccaggactctggataatgtgaatttgctttcctatttaactagaagatacatgtactatagatcattgtctcattttagtgattgttccttaaactagtgaaactagtggatttctcttcttcctctttattttctgcatgttaaatgtgaaccttagtgtatttgtattttgtagaaaataatgaaaaattttaatggagaatgatttaaaaacatttacaatacattatttttgcatctgtgttgttgcattcccat

SEQ ID NO: 378 - DNA, 11788 bp, Homo sapiens
attggttggctgccgcctgatggatagacgagggaggagtgtactctcttcagtgtgttctgacggagccgaagtacagaaaccatatttacaggtacatgtgacagcgttgcagctatgagtggaattttaaaggggaagtttgaagaagtcaacggctcctcaccctgctcttcagtgcaggaatcagatgatgaagttttcagctgtgacagtactgagagtgttgatagtgtcaatcgttcagttttaatgattttaccagaaaaaatgaggaaatatcaacagactgaaaatatgttttcagaggcatagaatcttcaggaaaatactggagttcctgagatctcaaggtacatgtgacagcactgcagcgatgagtggaattttaaagaggaagtttgaagaagttgacggctcctcaccctgctcctctgtgagggaatcagatgatgaagtttccagcagtgaaagtgctgacagtggggacagtgtcaatccatccacttctagtcattttaccccttcctccattctcaaaagggagaaacgactgaggacaaagaatgtacattttagttgtgtcaccgtgtactacttcaccaggaggcaaggcttcacaagtgtgcccagtcaagggggaagcaccctggggatgtccagccgccataacagcgtgcgccagtacactcttggcgagtttgcaagggagcaggagaggctccaccgggagatgttgagagaacaccttagggaggaaaagctgaactccttaaaactaaagatgactaagaatggcacagtagaatcagaagaagccagcactcttacactggatgacatttctgatgatgacattgacctggacaacacagaggtagatgagtacttcttcctacaacctttgccaacaaaaaaacgaagagctctgctgcgtgcctctggagtgaaaaagattgacgtggaagaaaagcacgaactccgagccatccgcctctcacgagaggactgtggctgtgactgccgagtgttctgtgatccagacacgtgcacctgcagcctggctggcattaagtgccaggtggatcgtatgtctttcccatgcggctgcactaaagaaggatgtagtaacacagcaggtagaattgaatttaatcctatccgtgttcggactcactttttgcacacaataatgaaacttgaactggagaaaaaccgagagcagcaaatccccacgctgaatggctgccacagtgagataagtgctcacagtagttctatgggccctgtcgctcactccgtagaatattcaatcgcagacagttttgagattgaaactgagccccaggctgcagtgctgcacctgcagtcggctgaagaattagattgccaaggagaggaggaggaagaagaggaggatgggagcagcttttgcagcggagtcacagattctagcacgcaaagcttggcacctagtgagtcagacgaggaggaggaggaagaagaagaggaagaggaggaggaggatgacgatgatgacaaaggagatggcttcgtggaaggtttgggcacccatgccgaagttgtccctcttccttcagttctttgttattctgatggcaccgccgttcacgaaagccatgcaaagaatgcttctttttatgccaactcttcaactctgtattaccaaatagatagccacattccaggaactccaaatcagatctctgagaactattctgaaagagacactgtcaaaaatggtaccctttcgctggtgccttacaccatgaccccggagcaattcgttgactatgcccgacaagcagaagaggcctatggtgcctcccactacccagctgccaacccctctgtaatcgtttgctgctcctcttccgaaaatgatagcggtgtgccctgcaatagtttatatcctgaacacaggtccaatcaccctcaagtggaatttcactcatacttgaaaggcccctcccaagaagggtttgtctctgcattgaatggtgacagtcacatttcagagcatcctgctgaaaattctttgagccttgcagaaaagagcatattgcatgaagagtgcatcaaatcacccgtggttgagacagtccctgtttagtagcttaaattattctaggaccaactcttctcttatttaaggcactgtatttaattggatttcctgggctcatcattgtttaaactgaagaccaagaaaacttggacggtggttaatcttccagactgtattttgttttttcctttctagccacatgactgtggcattgcacaaatacagtctctgtagggattttaaaagatttcagactgttttgatagaaaaagctaaattttaaaatgcatatctcacagttgcctacctgtcaaactgtgtgaaacctgccaatctgtgtagatcagagctccaaattttggattatcgggcctgtgcaagattgttaactaaggctgggaaataataagatttagagtcctaattttcaatatatctgaagataatgatgactttttaatgtaaaagtaattattgtaagaaaaagatttaattgttccatgtgtattttatttatggtagtttagaagacatgttttgatgaaaatgaacagccgcatgttcattcaagctgaagatgcatagctagttccacagagcatgcccacatggattgcatctggaatccattcacatttttatgatcatgactgatcagatttgcaaattcttaagggtgaaataggcctatttttgctattttggacaaataaatgattctatatgtgcaggtccttacacagttttctctaaagttaagagttaggacaatcctctggggagagtctagttcactgccctccctcagctgactccagagatggaggtagaaggaattgcctttcttttttaaacagcatcatcttgattcttagcttggacagcacctttaagctctaccccctacatcaaaatgcactttagtgccccttcacggtacctcgtgtggggtggggactgagaactctttgagatgaaaaaatttaaaaaaaaattaaaaagatctttaactattataaggttcatataattaatatagaggaatcatccaatgatacttatgaagggaaaatgacctattttccttcaccactctgaggacctaactcagtaaatgcagaggaggctgaggaaacatggaagagacacgacctcagcaaccagccttttctccagcgtgatcaatccatctctacaaaatcagtgtataatgagatttccacttagtgactagctgattgaaggggggcctctacccaaatactcaactaggcctttcttttctgaagcattttgatttgtcttgcctgggacaactagcagaacagtccagaatgcattgcatactttctaattacctcacattctcttattaaagagaacagatagaaataaaacatgcactccccacctttagattacctgcacttggttcgtcggaggacttctaggatcccgtttccctgtaaattaatttaggtaactaaatagtgtaattctgcctttttttttccaatgcaatatgactatgctaaacctgtttcatatttttgaccttctattgttatatcacttcacatgttttataactatttgaaatgcggacatgacttgctattcagtgactgcatcgctacttattttttatgtcttttagacttgggtgtttagaattatggatataaatatattgtagatctcaatttctaaaaaaaatattttatttaattgaacttaaaaatgcttgatctagagaaagtcctccagtggaaaagtttctactaaactttgttttggggaaaaaatgtttacttggcagctcttccactgtgcagttggtttctgccccttctcttcccccctacattgggccaaatttataactcttaatattaacattaaaagagctttgggtttgtctttatgtaggttgcagtaatgagagcagggttgttccttttgaatgattggccctttgggctaatcagaatgaggatttgttgaaatctcaaatatacatatatatatatatatatatatatatatatatatacacacacacacacacatacacatatatatacacatatatgtatgtgtgtgtgtgtgtgtgtgtgtgtgtatatatatatatcccatgttgtctgcaaagtgacagtttttagtgcttaatctccaaaattttccccctactgatacaatctaaagagcacaggcccaaagagaaaatgacaagaggctattgttccttcattcaagcacatgaaaggatcatgtgtactgtatttgctggaccattacaagctcttgaaggatctgcttgtgaagtactctgaggttattcttggaacacagagtgtgggagagtggggaagagccagctccagcctgagcaaagctgaagggtagaatgacagtccagtttctgaaaagagatattttaattttagttcagctttattttcctaagacgatatgaagcctacttttttatttttggctaggtctttgttttctagctttgtttccaaaaggatgcttaagaaaacagagtttttttcccctatccatttatctagggtagaaagtcactgccctgtgagaagaattacccttccaatcatgacagcttctattccaacttttcatatacctgactaacctgtaaacatatcccacaaaccacatacacaggctacctattaaaactctcccatatacctaacacatacacatgcacacacatacaaaatatatacatatcacacacttagagaatgacagatttcaggcaatggccaatagtcagtattgagtttttctaaccccagaatctggttgggctttatgatctaaaaaaatgtggtttagaaaagaggataattggtagagctgtagtttgaaaatatcaggtcaaagttgcaaacatacttatgatggaatcatttcatttttagttcctttcccagaaaagctgagagagcacactgttccagctgacttttttttccattaatagccgttctattcaacaaagagctgcccacatgccaggaaagtgctacagtccttctaagcttttaaaaatggggatcaagctacatgcagccagttggaatacttaagatctttatgccaagacacaataacctgacctgcagctgttgtattgcctccatagtatatctagccaaactgtagtctttgacacacaactttttagtcattcactatcaattgcaaagcttcatgctccagccctggctattctagtaccagtcctatacctttaaatgggacttaattcccagttataatcctggccgaattgatttgaaagtcaagtggctgaagcagcttgcatctcctttgtcattcccaatttcctttgggagaagtcaatgaaagagatttacttaagtttttcctccttatctcttgatcattaattattaagacatgggtaaaattcatttgtctcatgtcttttggttgattgaataatatagttactttttgaaagcccatcatttctttgtgataaaaccattttctcaatgtgacagccacatgtaaaatgtgaaactaatgtttcttagtatgtttaaaatcttcacaatcatatatggccctgcaatactccctgaattccttccctccaaaaaaaaactatgagttgcaaaaacactagttacgaattaatcaagaagcaaagagagtatgttaagtggctatgttctttaaaattttacattctaatagatgacttctaggcaaaattttggtatgattaccattaaacaggaaaacataccatgatttactttctataacttgctaatcactgtttcttttatttcaatttttgatattgttgcacaagtttatgactctttggtctttatattcaaaatttattaagtatcaattctttctttcaacaaatatgtactgaacacatgctgtgttagaacaactgtcttgggtagtaaaaagaggggaacactacaaattataatggataatattaatgaagggtggcatgaaataatcaagctttctcaaatcctcttaatatgtgattttatcaagtgacattagaaaaactgacatcagttcttgtctaattatatgtgagctgcaactaaaagatgcttcctttacctaaattatagaactcactggatcgcccttcatctctctccctccatctgaaatgtatgaattaaatcaggactcagctaggactgaatcaaatgaaaaagaaattttcgattaattgcttcttcaatgttagacctatataagtgatgctaaatttacaccagcaaactcctatcagacagtttcaaggaggatttgactcatgcataacccaggaaacatttcaggaaacttttaagacaacagtgtggaacacaatcactcttacttctatttataaaaagcctatcaaaacagcaaaatcctgttgcaaattccaaagacatcactttgcagcaggtggaaaacagagaggttgttagactccatcactttcagctggagttacaaaccatcaaattagcaggtggaaaatttatattctcagaagccaacaggagactgcctttttaaaaggtgtcatgaagccttctatttctccaaacaactcaatatttctctttaaaatggcatctctgttccttattctcttgatgacagtttgcagtgccattatagccagtgtattaaataccaggctttaatgggaagcacctttgtgctttcaaaggcaagacttgtctgtaattttaaattagaactgttggttgtattcttaccacaaccaaaacccaaagtttaaaggcttgattactctatattaggtctaatatgaattttcaccttctgattgcattactttttctgaaatctgctaactagtgctggaataacaaaaatgcctaagccaaaatgctgtagctctgcaccaacagcacagctcatcagatgttttctatagtagtaaagaatttgattgacttaattgaatatcagcaattttaatacccactagaattatggaagtatcagagtggaagtgaggacgcaataaaagcttaataagtggtggtgtcttctaggaattatgaaaaaaaaagctcagcagagctaagccagatcttattacatcataaagactagagttacaaatggcagccccaaacctagaaggggcagttacaatgtggacaccctttcagcccagttggtgctcacatctgctgaccaacattcatatcaattacatttttacagtctgtaagtcatttgatgctttagaaaataaaaacacacacctacagcattctaaagaaactattttgttaaaaaatttaaacacattttatattaaaataagtgatcaatgactttcatgattgtcaaaagtaaaaagtgcagacatttaaaaaagctcttctttcacattttacctaccaaatctagatattcaacgtgagtccttaaaacagtcacttctaaattttattttgactcctttcttggctttttcaaactggaccatgagacccccttcctaaacaatgcagttgttttgttttattctttttttccagaaattcaagctgaaacatttgatatgacctgtgttttacctggtgatcagttctcaggctagtctaagtctgtgctgtcttggcatgccttgggtttcctatcctgagagtggtaatgccagtagaatgatgggaaccaggagagtgaatacgaccagattcaaagcctaaaacaatatgtttcagtttacttttatatgtagattttttaaatattcacatctagcctggaattttagtaaatacagatacttgttgtatccatgggaaatgaggtcatttcaaagatgtaagtcacgttggtgactactttcttttacttgtgataaatatatcactatacagggtaattgcttttataaatttgatcctttgcattggcttataattcaagaaatgtcaacttcactgtgtcactttatgtcatctctcataaaagtttctggcaggactaaagtttcaaaggaatgtgatagaatttattttggataacatttgtattcagcatgctaatgatgtaactcctctctttatcattaccacggtgatagttaagttcattcgttaactcattttagtgacatgtgaggccatttaaatatttttaagataatgtatattgattagaaagggttagaaggagacaaatttatggtagaaattagccttgccattgtctaagttaatttatgtgacctgattgaacagttttagttgtaactttagagtagcttctttgttagaggatctctttcctttctcttttggttttctcccaatatttttatctgtcttgggattatcttaaaaggtatttattaatgagtatttggaagaaaattgacctagaaaatgtctcttttaaatttatctaggtacttgtatcaccagagaccttcatcaagtcctactgccacactggataaggccactacccccgacccttcttgtcagggacatggcttcctaataatggttttgctgttgtctctacataggggacctatggaaaaggagtttgaaatttctacctttgtagtacattgtatccaattttgttttgctcctccttttcatgtggtcaccaagcttttttccttagccattaaaaaagccacccctctttaaaacaaatttaaagatctatatacatttttgcaactttatttaataaaaaagagaagaaaaaataaaatctaaatctcaattaccctaaagtggaaaaacctaagtatctaacctaggaacttgttgcctggtggtggttgttgttgttgttgttttttaatttatttagtgttgatccttgagttatttaatggtatccaaatgatatctgaaagtgattgattttaagatgtaatagttggcaaagtcatttcatttgtgtctcaaacaaataaagcccactgccatgggttaccatctgaaccctgattcattaggcactagtcatgccaaatggggatctcagaatagtttaatcttttcaaagatactcacaatggccaactgtgtgtgaatactggaaagtttgagattcttctatattcttcaaatttatggtcctgagactaggagggatctccagaggtcatatggctcatcgatctaccaccagggaagactgtcacttaggcatgcccaacaggagagatcgccatctattcttaacatctctagggaaggcagtttccttggcaacacaattcagctctcttaggttttctcacaataagaaaatatcttggccagtctttgagggttaggcacctggcaacagttgtggtgatttgggccattgtactaggggattcaagggaagttgggtttccccctacatttggtgattattacattaatatatgatcattccataagtctcctaagaaatcagatttttaaagaaagacacggattcagagacaatggtctgtaacatgaccaacttttgacaaatatggctgtactaggttttcatttttgctgttgttgttgtttgtttttgtgattgctcttatgtcggtaggtaatgtcaggaaaagtgactgtttcagatccccagtacaaacatcagaactaggatcaaatgacttgacttttaagctgttccattttctaagaagttacaattacaaaaagtaagcattttctacattcttacttctaagtaatgaccttctcattaatctttccttggcttaaaatgacaaataagaatccaaagtttttccactcctcctgtgggagataggaatagttgtgaagagtctgatggaataaaatgactccagagatttacacagccaccatttgatcccagcctttgtccttgtgttatttaaacaatggcttcctgctttctcaggggtcaggaaaatgatttaaaaatttgtcttcttgacaaggcctgaaaacgaagggaggtgtcgtggagaaatggtgatttttctggttacatcacttgattcaagcactccctggagctttcaaagccttttttatctgctcagagttgacacccaactcagagtcagaactcaccagaagatgaggaacacccccgaaatcaatgtttcctttctccatgggatttttttcaatcttggtacagctgcatatctcccaaactcggatgctcttgtgaaatgacagccacatcagtgtggttactccccacaaataacactagggggaaatgaccttttttatttaaaaaaaaaaaaaaggctaatgctatagaatgatcatgtaaagaatgttgaataaaatttggcccatgttttaattgactctaggcacctctattgaaataagtctgaggcatagtttgtgaaacatgtttcaaaagtgtttgatgtataataaatgctagaaatttacagtacagaaatagtaaaaaaataaaataaaaataaacctgtagattacagctctgttcctaagaacctcagcctttattgtgtcttagtaaagttgatctgctttatttttagtttattgaatttctggtgtactagcctcttaagatagaacttttaatacatatgtactggttaatgcctgtttacgcagaaaatggcactttgttctttcagtgtgtttccctcagtgtcacagggtatatcaatttgatagatcatttgacatttgtcaaaaatacgtttcccattttaaaaatatgtataattggttgcatagacatatgtcactttttgcagtgtcttcatcttgatcatagttttagacatcaactatgtctcactttccaactgccatagaaatttggtacatttgcaaattctggtggaatctagtgagctgaatgtattggtagatcaaatgatccaaaggacttgggtgttatccttcagtctgtgttgaaccattcagatattgggaatggtccttacacaagggaagtcttttgagaatatttgttctcttattttttgtttgtttgttgctggcaaaaaaaaaagtaactttaaaaactcagaaaagccactgaactgtattttgtgaccttatgattagttttatctttcaactgatttttattgttacttttactcaatatcaacagtacttcaatagatatttattagttatgttcaatctaatgacttaaaacagttgaaaaggaggaaaatcaactccagtccacacatacagtcatgttacattaagatgtcatgttgtatgtcacacagtttctagattgatttctcttgtgtataagttataacatcaaaaatgccaaagggtatataaaataagctacaataatattcaacagaacttaacctggaccttatgttgtaataatttattcatattagctgtagtcttctgtatttatattttcagtatttattatgaatgacatggaaattcgtgtatttattgtggctttttattgcagtgtgtatatatatataacaaataagcatttttaagtcttatccttaagtttcttttattagtggcacttgtattatgctgtactttttattacatattgtacaatatcttgtccatttgtttgcagcagagtaaaaccggtttctaagttgta

SEQ ID NO: 379 - DNA, 2393 bp, Homo sapiens
attcttctattagataacagtagctatttaaatacttctgcagaagctcacatatttttagtttgttgaagttcgtgactgcttcactctctcattcttagcttgaatttggaaatgacttttgatgacctaaagatccagactgtgaaggaccagcctgatgagaagtcaaatggaaaaaaagctaaaggtcttcagtttctttactctccatggtggtgcctggctgctgcgactctaggggtcctttgcctgggattagtagtgaccattatggtgctgggcatgcaattatcccaggtgtctgacctcctaacacaagagcaagcaaacctaactcaccagaaaaagaaactggagggacagatctcagcccggcaacaagcagaagaagcttcacaggagtcagaaaacgaactcaaggaaatgatagaaacccttgctcggaagctgaatgagaaatccaaagagcaaatggaacttcaccaccagaatctgaatctccaagaaacactgaagagagtagcaaattgttcaggacttcatccagcaagcaatttcctattccagttttccattctggatggggctgtctcggaggaaccccagctacccatggctctgggaggacggttctcctttgatgccccacttatttagagtccgaggcgctgtctcccagacatacccttcaggtacctgtgcatatatacaacgaggagctgtttatgcggaaaactgcattttagctgccttcagtatatgtcagaagaaggcaaacctaagagcacagtgaatttgaaggctctggaagaaaagaaaaaagtctttgagttttattctggaatttaagctattctttgtcacttgggtgccaaacatgagagcccagaaaactgtcatttagctggctgcagaactcctttgcagaaactggggttccaggtgcctggcacctttatgtcaacatttttgattctagctacctgtattatttcacctagcttgtcccaagcttccctgccagcctgaagtccattttcccctttttattttaaaatttgactcctcttcaagcttgaaaaccctctgaactcagtcttctttacctcattatcaccttcccctcacactcctaaaattgcatgaaagacagaacatggagaacttgctcaagtgcaggcagagagcaaaaaggggaaatatgtctgggaaaaagtgcacgtgaagaaacaaagaaggacagaggccattccgaaatcaagaaactcatgttcttaactttaaaaaaggtatcaatccttggtttttaaactgtggtccatctccagactctaccacttacggacagacagacagacagacacacacacacacacacacacacattttgggacaagtggggagcccaagaaagtaattagtaagtgagtggtcttttctgtaagctaatccacaacctgttaccacttcctgaatcagttattatttcttcatttttttttctaccagaggacagattaatagatttaacccttcacaacagttcttgttagaatcatgggatgtgtggcccagaggtaagaatagaatttctttccctaaagaacataccttttgtagatgaactcttctcaactctgttttgctatgctataattccgaaacatacaagacaaaaaaaatgaagacactcaatctagaacaaactaagccaggtatgcaaatatcgctgaatagaaacagatggaattagaaatatatcttctatttttaggcttctatttcctttccacccactcttcacaggctattctactttaaaggaagcctttttattttgctgcacacaatctagcaggaatctttttttttttttaagagctgtgtcatccttatgtaggcaagagatgtttgcttttgttaaaagctttattgagatataattaacataaaataaactgaacatatttaaagtgtactatttgataagttttcacaccttgtggagaacatgcatactacaattaagagagtgaacatatccatcatccctcaaagtgtcacaatgctcctcctgatgactcctccccagaaaaccaccaatcggctttcattttgcattttgtagttttatgtgaatggaatcatatagtatgtcttttttttttgtctggcttctttcactttgcataattattttgagattcatatgtctccatcttgatgctcgtatgaattcattcttttaaatgttgaatattcccttgtatggatataccacaattcatttacccatttacttgttgatgacatttgggttgttttagttttgggatattacaaataaagctgctgtgaacatttgtgtacaagaaaaaaaaaaaaaaaaa

SEQ ID NO: 380 - DNA, 2735 bp, Homo sapiens
cgcccggggccaccccgccgctccctccgagggttctgcggaagcaggcggcacagcctgcgaggggctttcgtttcccggactcagccgcatcgcctcggctcgggcgcgcctgcatcctgccgcccgtccgcgcgttgaaggggcggatacaaacaacgtggacttccgagcccctgattggcgagcgtgcggccggcgcggggcgcaggcggcgcggccatgggctcgcagggcagtccggtgaagagctacgactacctgctcaagttcctgctggtgggcgacagcgacgtgggcaagggcgagatcctggagagcctgcaggacggcgcggcagagtccccgtacgcctacagtaacgggatcgactacaagaccaccaccatcctgctggacggccggcgcgtgaagctggagctctgggacacgtcgggccagggccggttctgcaccatcttcaggtcctactccaggggcgctcaggggatcctcttggtgtatgacatcaccaaccgctggtcctttgacggcatcgaccgctggatcaaggagatcgatgagcatgcacccggagtcccccggatcttggttggaaaccggctgcacctggccttcaagcggcaggtcccgacggagcaggcccgcgcgtacgcagagaagaactgcatgaccttctttgaggtcagccccctgtgcaacttcaacgtcatcgagtccttcacggagctatcccgcatcgtgctcatgcggcacggcatggagaagatctggaggcccaaccgagtgttcagcctgcaggacctctgctgccgggccatcgtctcctgcacccccgtgcacctcatcgacaagcttccactgcccgtcaccatcaagagccacctcaagtccttctcgatggccaacggcatgaacgcggtcatgatgcacggccgttcctactccctggccagcggggccgggggcggcggcagcaagggcaacagcctcaagaggtccaagtccatccgtccaccccagagccccccccagaactgctcgcggagtaactgcaagatctcctagcggggatgggcggggccgcctgtgcagatgccaggagggctcgagctggacactcctggctggacgccaggccagtgccgcctacgtggagactgtccacacagctgcctcagaagcgccgggctttcctcacacctgagccgggtgcgaggaggagcatgcacggaccaagcgcggcaggcgggaggagggggcgcggctgggctgctggtgcttccgggaatcttggtcggaaacaagccgggcctccccagctgcctgggcttgaccggcggggagcctggttggcctttcttatttatatagagaacacttcacttttttgtacatttttaaggggccttcagggaagcctgggtgtggcccggtggtggtgcactggtgacttcatggccacgccagctgcggggacgcacttgggactcctcgagaggggactcgcggccgcgatggcaaggcatcctgtgaattcatgcgctgcgagtggcggggctgcccagaggccgggggagcagacagggccggtgctccctctggaagcttgggtgaccggggccctggctcccacgggatggagggtgtggtcctgtggtcagagcccaagcagcactcaggagaggggagaaaggaggtgcacctggcagcccacatttttgttgctccccaaatccctccccacgtggggatgagaaccttcctgctgtgatgtgacaccttcggggacattgaccactcaaaactcagatcatctcgcccaccctggagagtgcagagctatctgtagacttaggaatacttgatgggcagcggtgcagaccccgggcacctgcgtgcagcctcctgttctcggcagcttctgtcgctggccctggggtccccacagctgcagctctcctgtgaggttgcacggcatcagaaccatcctgaccttcttagggacgtgcctggaaccacctcgtccacgtccacgtccacctgggggcctcgggaggctaggcccctcctcaaaggcccaccagcccggcgctcatgctgagccccaggcacgcagggccggccacctctctcctgaagccattggccgctcctccacccagtgcttctgcccatgcctgccccagcagcccctctgcacggtcaccatcgcctgggcctgcccacagcactggtgctcacctctacctcctgtcctcaggccgtgcggcacgacatggccagcacgcagaaggagccctcccgggacccaggaccccccgtggtggactccgcggcacatgcttcccaaggtggtcccacggagggtgttactgggcaccagtggactcgccccatggcccgttcctgggagatgagggccgtggcctgcatgaactaccagatgagtaagggaaccccaggcaggcggccctgccacagcccccaaagacactggcctcctgctccagcttccctgtcctggccccacctgtcctgttgctgccagcagggcccttgtttgggattatgaacaaacctcacagactttgaggacctggatggtcctgcattcacggcatcaacactacccgcgctgctgttagacactccgccattcctggttctctccgaaccgttctttgtacagtaaatgtaattcagctgtggtccccacaaaaaaaaaaaaaaaa

SEQ ID NO: 381 - DNA, 4565 bp, Homo sapiens
tttctgcagttccggaagcggatcgtgttgggtgcgggtgacgccgccgagcgtgagtgtccctcagtatggattaaacttgcgaaccgccgtgccccgtttccgcagccagttcccgggctcgctacagacctttttttttttctttttttttttttttggtgagacggagatttactcttgttgtccaggctggagtgcaatggcgcgatttcggctcaccgcatcctccgcctcccaggttcaagcgattctcctgcctcagcctcccgagtagctgggattacaggcatgtgccaccacgcccggctaattttgtatttttagtagagacggggtttcaccgtgttgcccaggctgatctcgaactcctgacctcaggaagaacccttgaagaagaggaagaggaaagaaagacaagtcaggcatggctctcacccagggacaggtgacattcagggatgtggctatagaattctctcaggaggagtggacatgcctggaccccgctcagaggactttgtacagggacgtgatgttggagaattataggaacctggcctccctggcaggaatctcttgttttgacctcagtattatctctatgttggagcaagggaaggagcctttcactttggagagccaagtacaaatagcaggaaacccagatggatgggaatggatcaaagctgtgatcacagctctctcttccgaatttgtaatgaaagatttactacacaaagggaagagtaatacaggagaagtattccaaacagtgatgttggaaagacaggaaagccaagacattgaaggatgttccttcagggaagtccagaaaaatacacatggccttgagtatcaatgcagagatgctgaaggaaattacaaaggagtgcttttgacccaagaaggcaatctcactcatggaagagatgaacatgataaaagagatgcaagaaacaagcttattaaaaatcagcttggattaagccttcagtcacatctgcctgaactgcagctttttcaatatgaagggaaaatttatgaatgtaatcaggttgagaagtctttcaacaataattcctcagtttcaccacctcaacaaatgccttataatgtcaaaacccacatttctaagaaatatctcaaagattttatctcttctttattactcacacaggggcaaaaagcaaataattggggaagcccttacaaatctaatggatgtggcatggtctttcctcaaaattcacaccttgcaagtcatcagagaagtcatactaaagagaaaccttacaaatgttatgagtgtggcaaagcctttagaacacgttcaaacctaactacccatcaggtgatccatactggcgaaaaacgttacaaatgtaatgagtgtggtaaggtctttagtcgaaattcacaactctcacaacatcagaaaattcacactggagagaaaccttataaatgtaacgaatgtggcaaggtcttcactcagaattcacaccttgtaagacatcgaggaattcatactggagagaaaccttacaagtgtaatgagtgtgggaaagcctttagagctcgttcaagcttagctatccatcaggcaacccacagtggagaaaaaccttacaaatgtaatgaatgtggcaaggtcttcactcaaaattcacaccttacaaatcactggagaattcacactggagagaaaccttacaagtgtaatgagtgcggcaaagcctttggtgttcgttcaagcctagctattcatctggtaattcacaccggagaaaagccttacaaatgtcatgaatgcggcaaggtctttaggcgtaattcacaccttgcaaggcatcagctaattcatactggagagaaaccttataagtgtaatgagtgtggcaaagcctttagagcacattcaaacctaactacccatcaggtcatccatactggagaaaagccttacaaatgtaatgaatgtggcaaggtcttcactcaaaattcacaccttgcaaatcatcaaagaattcatactggagtgaagccttatatgtgtaatgagtgcggcaaagccttcagtgtgtattcaagcctaactacccatcaggtcatccatactggagaaaaaccttacaaatgtaatgagtgtggcaaggtcttcactcagaattcacaccttgcaagacatcggggaattcatactggagagaaaccttataaatgtaatgaatgtggcaaggtctttaggcataattcatacctttcaaggcatcagcgaattcatactggagagaaaccttacaagtataatgagtatggcaaagcctttagtgaacattcaaacctaactacccatcaggtcatccatactggtgaaaaaccttacaaatgtaatgagtgtggcaaggtcttcactcagaattcacaccttgcaagacatcggagagttcatactggaggtaaaccttaccagtgtaatgaatgtggcaaagcctttagtcaaacatcaaagcttgcaaggcatcagagagttcatactggagagaaaccatatgagtgtaatcagtgtgggaaagcctttagtgtccgttcaagcctaactacccatcaggcaatccatactggaaaaaaaccttacaaatgcaatgagtgtgggaaggtcttcactcagaattcacaccttgcaagacatcggggaattcatactggagagaaaccttacaagtgtaatgagtgtggcaaagcctttagtcaaacttcaaaacttgcaaggcatcagagaattcataccggagagaaaccatatgagtgtgggaaaccctttagtatctgttcaagcctaactacccatcagacaatccatactggtgggaaaccttacaaatgtaacgtgtggaaagttctaaagtcagagttcaaaccttgcaagccatcacagaattcatagtggagagaaaccttacaaatgaaggtggtaacttttgcagttagaattcattcctttgacaacgtcagagaatttatgcctgagagattccttgaaaatgcaatgactggctgggtgcagtggctcatgcctgtaatcccaacactttgggagtccgaggcaggtggatcacctgaggtcaggagttcaagaccagcctgaccaacatggcgaaaccccatttctactaaaagtacacaattagctaggcctggtggcgtgcgcctgtaatcccagctatataggaggctgaggcaggagaatcacttgaacccaggaggcggaggttgcagtgagccaagatcgtgccaatgcactccatcctgggcaaaaagagcaaaactccatcttaaaggaaaaaaaaaaaatgcaatgactgtggcaaactcctcatgagttcaagtattaatagacatccaagagtccataataatgagaaatcacataaatgtactgtgtgtgacagaggctttattcaggcctcacagctttgcaggcattaaaatctacgtatttgatggaaccacacaaatgtaatgtgtaagagcatcctgaagctcttactctaagactgtaactgtaggtgaggattcatacaaagagtgactcagtctctagttctttgattcacttttaaaatgataaactgcacaataattacacgttccaatatggtaaaacttaagacattatatatttcaaaggtcaaaggacatttggaaatggctacttaccttcaggttataaaatcttttattccattgtttgaggtttctcaaaaaggctactgtttgtgactttcaacctgaactatggatctgtggctattttgcatccttaagcacctttcgtggtgcctatctgggaaagaaccacagtatggaaaggcttacttcattacatgaggatcatttttatccatgtttattgaagaaggaggactctgccttgtaaaattaaatattctctcaattgagagaccatggttttggggcagaaaataatgtaaaactatgatatcaatcatcatactgattgtgttcagggtgcttttctgagagaaagacaccatgggttttagggaagtaaggctctacctgcattgagcaggccaagacctcaggacactggaatttttatgagaggagagtaataagttattagtgactgattatgtgatgggaatagtgcaggggaaatggttgccactttctctactgaatggcaatagctgttttatagcagagattgatgaaaaataggcttatttttgaaattgaagaggtaacagttattagagtggagagcttggtcagaaaaaccagaataccatggttttttttgttttgttttgtttttagtagaattcacactaattgctggaattacattttgctacagttttattaagaatgtgtcacagacataatgttttgctaaaaaaaattcaacgttttcttataactataaacaaatcacattctttgtaccaacatcattttatcctacctcagtaggatacttcatagcagataataacaatacactcagtcttttaggttggaaaaaaaaaaaa

SEQ ID NO: 382 - DNA, 4371 bp, Homo sapiens
gctggctccgccggccgccggctcccagacgcaagcggagggcggaggggaggggcaggcggcgcccgggagggaggcaccgggccgcgggccaagcctaccgggggtcacaatttgggtctgcagcagaaatgctttcagaacagacagcagcgctggggacaggatgggaatcaatgaatgtacagctggatggagcagagccccaggtggaaaggggaagccaggaagagcggccatggagaacagtaccaggacctctggagcacctgtgctgtgaccttgaagaggagccacagtcccttcaggagaaggctcagtctgctccctgggttcctgcaattccccaggaggggaacactggagactgggagatggcagctgcacttcttgcggctggatcacagggcctggtaaccatcaaggatgtgtcactgtgcttctctcaggaggagtggcggagcctggacccctctcagacagacttttatggagaatatgtcatgcaggaaaactgtgggatagtagtctctctgagatttccaattcccaaactggacatgctttctcaactagaaggaggagaagaacaatgggtccctgacccccaggacttagaggagagggacattctgagggtcacatatacaggagatggaagtgaacatgagggggatacccctgaactagaagcagaacctcccagaatgttatccagcgtgtctgaagatactgttctctggaacccggagcatgatgagagctgggattccatgcccagcagctccagaggaatgctcctggggcccccttttcttcaggaagatagtttctcaaacctgctgtgtagcacagagatggattccctgttaagaccccacacatgcccccagtgtgggaaacagtttgtatggggttcccaccttgccaggcatcaacaaacacacactggggagagaccctacagctgcctcaagtgtgagaagacctttgggcgaagacatcacctcatcaggcaccagaaaacccacctacatgacaagaccagcaggtgctctgagtgtggtaagaatttccgatgcaactcccatctggccagccaccagagagtgcatgcagaaggcaaatcctgcaaaggccaagaggttggagagagccctggcacaaggaaacggcagcgtgccccaccagtgccaaagtgtcacgtgtgcactgaatgtgggaagagctttggccgaaggcaccaccttgtgagacactggctgacccacactggggagaagcccttccagtgccctcgctgtgagaagagctttggccgaaaacatcacctggacaggcacctgctcacccaccagggacaaagtccccggaacagctgggacagaggaacatctgtcttttgaaatctgtttccactacagctatggtcaagtctatcagccggtgctaccaggagtcactgccagggctgccgttctcctgaaccccagtggccagaatcataagccctgaccccatccctagaaagatgaggtcccagcaatggccagagcatttctcaccagttctgtgagatagcacataaaaatagagttctttgggcaaaacttttgggaagcaatgcatcctacatgggctgatattcagcctgagctgttctcaagaggagagtggtactggcagtttatggctgaaatccattctgattggttggagtctatgctataccagttgttaaacattttgagtatcactcttgcatactgttactattatattttctctatatatagacagaaaggccattttagaatattaaaggctctgaaaatttctgcagtagacccaactgaaggttctattaaggcagtgtttcctaaatgtatttgacctcagtatcctttctatttacatcccacagaactggtgactatgaaacactctggtgaacactgggttagagagtaacaaggaaacaagagatagtgatcaggcatccagagcccccttttttatccatatgaaagccaggggggccagaccttgttcatgtgtgggtctgtcttccttatgccaatcagcagtatatacatcacctctcaccctcacctgctgaaaaaataacctttttacccattattcctactcccttcatcctgcacatacatatatccagctgagagatcacactacaaggctaagagatgatctaatacccccaaatagccctggcccacacagaaaaacagaaaaacaaaaaaaactttatccccttgaacagtcccctctctcctcttgactgtctttatgtgtctgtgtatttgtgtgcagggtctttgaagacagcatgctatgtgcaaactgtacaagctaggttttctaggggctgtgttctggggatgagggtagtggggattatatggggttttttctttgtttcaagacaggaagcagtctggttaagggagaactagtggaaagggttaaatgacaggttaagttgagtacaaagctttcccagtactgctgagattaagacaattgtggatgtgtatgtctaggtttgaatctctgggctgcagattgcttttgccctggcagagaaagaggagtctttggggaggtgagctgtttcttgttgatttcaggcaagaggcacatagaaactttgtattgagtggggattttgttttaagtgctggaaaattagggcaggaattacgtgtttgcaagttgttgccatcactggtttgaatttgactgcctcatcaaggggcaagagttattcttgaagatctcattctcccagaaacagaactttagggaaaatggctgtggcttagcttttcagctgctgcagggtaataagctttctggttggttttccttccaattctggaaaggtgtccacactaagacccttaactctagggcttgcataagtattctagcatcgttagctaatgagttggtcattgtttctctttatcaataattgtgttaataccaatcttataatttaaaaattatcttgtatgtaagagcagttcggggttagggaggaagaggagcaaagtgggatattttctctttaatgcttagatactgtttcttccctaagatgtgtttctcaaccacaattggtggaatgaaccagagaggcaagaggaagtgaattgcaccaatttagtttagcgactgtgccttttgcaggaaaaactgggtgaatcacagctcctcagagtcctggactcaactagaattgaagatagacttattttgctgactgggcttcttagagtttatgtgacttgaacagcttggcccctgcctcccttctgctactgtgagcagccttccttcttccttcattcttcctggaatgcagttctcttgcttatgatcctatgaataaggcaaaatggctggtctttgtaaggcaggtcttgccctagcttctcagaaacaggagcattttaggatcagtattaggagatgccccagggagtaagaaagtattgggttcagtgataaatctggactctgacatttcttttactctccctctttaatactaaaagctctgcataagcaatggttcagaacctgtcttgggtacagacctgttgaatctgacagaaaccagaaacgcacttttgagaaaaagacatttgtaattcactcagttttccatacacatttagcaggttcaaagcccatctgtggaatccctaaactgccttcaaagaaagggagttccccgatctaaaatggtcattatatatttgtgtcaagaattagaaggcaagggtcactaaatattttaaggattaaggtaccagaggcatcagtggtataaggatggagtctggtctttaattacgacaagggtattgcttacattctactctctggttttcaaaaagatctgacatgctgacaaatccagctcctcacaaatcttgtttgaaggacttgtgggaagtgatattccttactattagatcacgccccttataactacatgttaacatccagccttttatctgtttgagtaattgtagggatagaaagtgaagcccccagagttaggtgcaagtatagcacccagctgaaaggcatcatggagtctaagggccttctacagaaggggcaatcctttgggttatttctggtgtaccactgtcttctctacctcggtccaacaccacctctcttggacaaaaaataaaacaagcaacagccatcagatgagtgaatagatttgaatgatttttcccacagggaatcagcctcaaatgttcatgtttcaccccgtcccctttaaataaaaagaatctctgtgttctctttgggcaaaatgtaaaa

SEQ ID NO: 383 - DNA, 10525 bp, Homo sapiens
ctcctccctcctcccttgctcgctcgctggctccctccccccgggccggctcggcgttgactccgccgcacgctgcagccgcggctggaagatggcggggaacgactgcggcgcgctgctggacgaagagctctcctccttcttcctcaactatctcgctgacacgcagggtggagggtccggggaggagcaactctatgctgactttccagaacttgacctctcccagctggatgccagcgactttgactcggccacctgctttggggagctgcagtggtgcccagagaactcagagactgaacccaaccagtacagccccgatgactccgagctcttccagattgacagtgagaatgaggccctcctggcagagctcaccaagaccctggatgacatccctgaagatgacgtgggtctggctgccttcccagccctggatggtggagacgctctatcatgcacctcagcttcgcctgccccctcatctgcaccccccagccctgccccggagaagccctcggccccagcccctgaggtggacgagctctcactggcggacagcacccaagacaagaaggctcccatgatgcagtctcagagccgaagttgtacagaactacataagcacctcacctcggcacagtgctgcctgcaggatcggggtctgcagccaccatgcctccagagtccccggctccctgccaaggaggacaaggagccgggtgaggactgcccgagcccccagccagctccagcctctccccgggactccctagctctgggcagggcagaccccggtgccccggtttcccaggaagacatgcaggcgatggtgcaactcatacgctacatgcacacctactgcctcccccagaggaagctgcccccacagacccctgagccactccccaaggcctgcagcaacccctcccagcaggtcagatcccggccctggtcccggcaccactccaaagcctcctgggctgagttctccattctgagggaacttctggctcaagacgtgctctgtgatgtcagcaaaccctaccgtctggccacgcctgtttatgcctccctcacacctcggtcaaggcccaggccccccaaagacagtcaggcctcccctggtcgcccgtcctcggtggaggaggtaaggatcgcagcttcacccaagagcaccgggcccagaccaagcctgcgcccactgcggctggaggtgaaaagggaggtccgccggcctgccagactgcagcagcaggaggaggaagacgaggaagaagaggaggaggaagaggaagaagaaaaagaggaggaggaggagtggggcaggaaaaggccaggccgaggcctgccatggacgaagctggggaggaagctggagagctctgtgtgccccgtgcggcgttctcggagactgaaccctgagctgggcccctggctgacatttgcagatgagccgctggtcccctcggagccccaaggtgctctgccctcactgtgcctggctcccaaggcctacgacgtagagcgggagctgggcagccccacggacgaggacagtggccaagaccagcagctcctacggggaccccagatccctgccctggagagcccctgtgagagtgggtgtggggacatggatgaggaccccagctgcccgcagctccctcccagagactctcccaggtgcctcatgctggccttgtcacaaagcgacccaacttttggcaagaagagctttgagcagaccttgacagtggagctctgtggcacagcaggactcaccccacccaccacaccaccgtacaagcccacagaggaggatcccttcaaaccagacatcaagcatagtctaggcaaagaaatagctctcagcctcccctcccctgagggcctctcactcaaggccaccccaggggctgcccacaagctgccaaagaagcacccagagcgaagtgagctcctgtcccacctgcgacatgccacagcccagccagcctcccaggctggccagaagcgtcccttctcctgttcctttggagaccatgactactgccaggtgctccgaccagaaggcgtcctgcaaaggaaggtgctgaggtcctgggagccgtctggggttcaccttgaggactggccccagcagggtgccccttgggctgaggcacaggcccctggcagggaggaagacagaagctgtgatgctggcgccccacccaaggacagcacgctgctgagagaccatgagatccgtgccagcctcaccaaacactttgggctgctggagaccgccctggaggaggaagacctggcctcctgcaagagccctgagtatgacactgtctttgaagacagcagcagcagcagcggcgagagcagcttcctcccagaggaggaagaggaagaaggggaggaggaggaggaggacgatgaagaagaggactcaggggtcagccccacttgctctgaccactgcccctaccagagcccaccaagcaaggccaaccggcagctctgttcccgcagccgctcaagctctggctcttcaccctgccactcctggtcaccagccactcgaaggaacttcagatgtgagagcagagggccgtgttcagacagaacgccaagcatccggcacgccaggaagcggcgggaaaaggccattggggaaggccgcgtggtgtacattcaaaatctctccagcgacatgagctcccgagagctgaagaggcgctttgaagtgtttggtgagattgaggagtgcgaggtgctgacaagaaataggagaggcgagaagtacggcttcatcacctaccggtgttctgagcacgcggccctctctttgacaaagggcgctgccctgaggaagcgcaacgagccctccttccagctgagctacggagggctccggcacttctgctggcccagatacactgactacgattccaattcagaagaggcccttcctgcgtcagggaaaagcaagtatgaagccatggattttgacagcttactgaaagaggcccagcagagcctgcattgataacagccttaaccctcgaggaatacctcaatacctcagacaaggcccttccaatatgtttacgttttcaaagaaatcaagtatatgaggagagcgagcgagcgtgagagaacacccgtgagagagacttgaaactgctgtcctttaaaaaaaaaaaaaatcaatgtttacattgaacaaagctgcttctgtctgtgagtttccatggtgttgacgttccactgccacattagtgtcctcgcttccaacgggttgtcccgggtgcacctcgaagtgccgggtccgtcacccatcgccccttccttcccgactgacttcctctcgtagacttgcagctgtgttcaccataacatttcttgtctgtagtgtgtgatgatgaaattgttacttgtgaatagaatcaggactataaacttcatttttaattgaaaaaaaaagtatatccttaaaataatgtatttatggctcagatgtactgtgcctgggattattgtattgcttccttgattttttaactatgcactgtcatgaggtgtttgccactgagctgccctgctccccttgccagattgccctggaggtgctgggtggccgctaggctggtctgcaggaaagcgcggcctgccgtttccgggccgtatctgccaagccctgccttgtctcttactgagcaagtttggctcaaattataggagcccccatcttgtgcccagctcatgctccaagtgtgtgtctatccatttgtactcagactcttgagtaccttgtaaggaaggcggggcaagctgcatcattcctgttttccaggggaggctggcagctcctcaagaggcgaaatgactgtgggaggtccggttaccagtgaggaggcagagcggtgacccagaccaggccttctggttcttggtcccgtgcttccgtagtagctggggtaaagacaccgtttcagggactggtagaggtgagttcggctaaattgggcaccgggctagaagcctaagggctcattttaggggttacattaggtgttgattcaccagcatcaggtgaattcaagccctggcatgtgtcttggatgcaccatcagctttgatcctgagtggtcctgcggtttgtctgtgcctgtggacacactgtcagaacttcagtgacacccctggcagcggtacagacaggtggtctgggagcagtcatcttttttgggccagccaccagcccatcctactccctcaggtagtccttcgtctttaccttgtccttgtctgtaaagttgttttggtggctggggcaggggagccaggaggagggagtgaaggttgggaatagataggacaatctcctagctctcctccaattgagaaaacactccaattgggctttgctttaaactttgtgttcttaagtgatgtcaaagccatttccagcttaatgttctgtgggtaccttgggggccattcatgcagggagcatggccaggcagggtatgagtacattgtttctgatttctttcatacatcagggttcctcgggaaatttttgtattttttttttaagtcctgctgctttaaaaatttgaaagtggctcattaaactaaacaggctaatgtaatttgttgcttatgccaagcctagactgttgagaattgacgtttttaaagattatcaaatacctcagtaggtaaaatgagcccatgatcttccactgagtggtgagcatactcccagcccatggacaaggccggaagagacaggctttagtaggggtagggaatttgaactgttgtgtgtcacagcagttgacctctctggactccaatttcctttcctgtgaaatgaactgattagacatgtttcaacattgttagcttctgctgaggcagtgtctagcccaagatggcaaatacatagctcatgtgccactactcccacctccttgaccaatacagacataactaatcaatcacaccactcaggttccctgagcctggatgtgctataagaatcctgaaatcagtgctctggtaagtcattactaattgattagagttcaatctatttgacatcttgggctaatctttggaaggtttccaacaatcacacaaaaccatatgctggctgggtttcatgctggcctatccctgtctgtgatgttccgttccatgagagaaaactcccctaatgctattccatggcgtaacactcccaatactattttgacgcccacgtccccttgcagagggtgcagggggcggtagacgaatgacagacaggaacatatttggggaaggcagggcttaggaagatggaccaaaaagggacttcccacagcacagacctgatcattcggatttcctctttagctattcactgcctagcacatagtaggcacacaataaatgattatggaatgggataaaatttagatctttctgctgcctccactaagttaagtcctgatttacatcaaggagagaactgagataggaaagaacactagattccaagtctggagagttgggggagtccagattctaccaagaatttcctttgtaactttggtaagtcccttttactccctggcaccccggtgtgctgaaaggagttggtccatatatgatctcttagcccctcctatttgcttcttccttgattgctcttggtcaaagggtcagccttgggctggtgatactttagagtaaagaaatggagagttttagcaaaggaccagtctgtccctccctgctttggggtcagctaaagctgtcctttcatgtcagattaacctaggacacttgtagttagcttagacgttggcccttgagcagagacctgagcgtggcattgggacatgacatacctaaagtcagggctaggggacgctgcctgccaagggcatcgagtagtctctacttgctatcccgtacataaaatgctacaagttctaaaatttaccgaccctgcagacaacctctatcccgaaggactcattcggtgctgtgtattatttagggcaactccaaggtctattcagaaaaacgagtgaaccttggtctctttcccaccaaattgaggagtaacccagagggagcagctgccattggcaaccatctcgttgtagctctgtcctagtgtttgctcttgatgatgtttacatgtgatcgccataaagcttgctgtagactgtgtcgatagccgcccgcacagggcaggtcgtactgtccgtttctgtgccgtgctggtgttttccaaaaatgtctgatccaaccactaagtggaattcttccatctccttcctcagtctgtacaaggctgaatcagaatccccattctcgggggctctggttaccgaaggaaaatgcatcaaagagttaaagaatatgagtggatggagtgcagctaaggcccccaccccctgctccgtcacaacttgccccctcaaccaaaaagctgctttgagtcaaaaagcacccataagatacctgcatctgccttgaaatcttgcagcatggagtgtcatatgtactcaggagagaggcagggctttgcgggcaggagaaggaagggaggaatgctctgagctgcaaagacccagtactcaagttctgacgtgggaggagatgcagtgagacgtctcttgttgcctaaagcctgttcctgttggttttcttagagtgatttctcctagacatgtgcagtaggcccactggggctgctgtgcagtggtgagtaaaagggcagggaaggcatggacagcctggtccttctgcatggacagctcagtccatggcccatcccaggtatagagttcagttaatcccatttgagcctgcagcttaagagatggctcatcctaactgtgaagcaaaatcagccccagaggatgtattgatctgactcactgatgtcaaaattgcagtatttttttagcatttgagatttagcagctgccttcagtttggggttacccacatcccagcatcagatatgattaaggaaagaaattggatgtacaacagcaaagaaagtgaatgtcatggtttccctggccaaagaagagggaccctgtcatccttaccaatggggaagaagaaaactagtgcatgtgcaatatgtcaaagttagtcccctagtccctgaggggtttttacacacagatgggctccaggtctgctcgtcaagtttggaggtaccgggtaaatggaggggagctgcagagttggaaacccacatgcatggatgtgtccttggcccagaaccaccatgggatgggggaggccctgagccggctacaagacacccaggaagtaggcaaaggctgactttgcattaaacaataaaagcactttgagaaaaccccaacacttcagcctgggtccgtgtttctacactggaaaatacgagtctcctttggctgtgtgaagtgatcttctagagactgggacagggagtttgggaatggggctgctgtcaggtaggagagagcagagatgcctttggagatgtcagcagcaggagagccagtgctggggccaaccctttgctggccttttgttggaagcccttgaaacagggagccatgggtttagatcttggtacctacctttacagaaagatgaaaacagcccagctgagtgaaatgagtttgtagagtaagtcacttaactgtaagccatctcagaatcagaaaccctaatgtttcttacttgctatgtgaccttgggcccctgtttcctcatctaccaaatgagaatgttgaatatgagcattaaagtccctttcacctctgagaggctcagatccccaaccaggagcattgggaatccatcactcctccttgaaactgattccattctctgacttgacccagctcctgttcagggtgagggttctctgcaagaaccaaccagcagtaggttcaatcccactgtgtcctggctgagttgccttatccaagaagaccagctccccgggacagatctaagccatagtttctagtggggacagtaaggaattaaacccccaacttggctaggtaacgatgtcaaatctcacattaaccttgtctttgtccccactggatagctgttaatccgaatgttgtgaccatttggctgtttctctcttgttctcagacaatactagcaatacactttttttttttttttttaaagaaaaacagcttaggagcttttcacacatttctttcaaatgattgtaaaacatatggggcaacaggaggcattgatcgcgctgcatatgtttagggcagcttttgttttttgtttctttaatggtatagcagcagtgactgagccttcgtgattcctggggacagcttttcagatactctgtttcatcagtatgctttgcacatccggaaggagtacaaaaatccaactgcccaaatttggggcttggaaaataggttttataggtggtcggtccctgggctgtgcaacaactcctcaaagaggggtttatataactagaacccccctgggctgtatttttggtcaaaggagtctccaaggcggcttacaaaagcttcctttttcacttgaccacccttgctcattggttacttgtgaagggaattggtcagtttccacctcagcactttgccttatcaacatgcggtcgccatctagtggccaaaggttgtctccaccagctacccagatggaaggcaaataaatcctttcggccaccctgctgtccatcgtgaactttgggaatgaaatataatggcctgaacgaactgcctttgtgttcagagatcagtgcaacactagggtcagaagactccagaagcagccacttagtagactctcacgcagaactgagaaatgcactagctgtcctgtgggcagaagagacaggagtggaccaggagaggtccaggtgcccgggaagggtttactgtaactgcaatactggcagcccagctgctgaccttgttaagtaaacctttgctgggtggtccgaattctgccctcaaggcaagataagaagttgggtgtaaggattttgtggggggcctggccatgatctttgatatgatccccgaatagccaaatagttttttttgttcaattttttgtttctgtattttgtatttttaaaatcttgtcaaatgtttttgtgttaggaataaaaagtcataaactattcccaactttgtttcttgagggatgttctgattccaatggaaacaggtgggaaatctcaaggggagcgtggacaaggtggtatgtgcagcaggggaatagactgcttggatttccaaatggtttctggggaagatgaccatccagaagtccagcttagtgcagtctgctctggaattcacacccaccccctcgcctccttgtgccatgttgttagcattggcttggagcatctgcttcttccagaggcagctgctaatgttgaaaccaacacgagccctctccccaaccccaggtttctaaagaaggtgtctgtagccagccttaatcaactgggcaaggtggtccctatggtcctttccagcatttccaaatcttggactcaaattattttctcttggtgtgaccacacagcctagagaattctgagcaataggagccagggctttccctgactctgcgacagggtcaaaccaaggaatggctaaacctgtgaggttttgtcatccccgggggtactactgtagggggcattatttattaggaagcttaacaaggtaactacggcctgagtgcgtgagtgtaaggctgtgtttgtggtgggggtgtgtgtgtgtgtatctgtgcacacatacacacgtctgtgcctgtgtgtgtgtgtttgtgtgtgtgtgtgtgtgtggaattacattgatgcatttattgagaaaggtgcaagaatttcacctacacagagggacacatctgctttgttatttataatagaaagctaaattttaattttttaaaggacactgctaatgattgagaatcaagtttttagttttgctattttttttaattggtagaggatttttatatattttttccattttgttgggttgtgtccttatttatataaatactttatccgtaagaggcaaggaggaaaccttctttgcttttacatattgtggttgtcatcgtccctattttatttctggtgtgatttctctgtcttaccttctaaatgagaaaatgttttcttgtatttgtacattgtcagattctatagtttcctagataatttaaccaaattgctctatgtattattattctgtgagtataaagttctattttaatgtctgtaaatacttcagaactggcttcttttctcaaactcccactgtggggttattgtttacatcacagaaactgtagaatctctatgctcatgtactgtaaatagtgaagtgatctgcttataaataaacttaacaaatacactatggagattaaaaacaaaataccacccacaaaaaaaaaaaaaaaa

SEQ ID NO: 384 - DNA, 6145 bp, Homo sapiens
ctctgtcgccgctggagcagctgcggctcggggacccacagacacagccggggtcgggagccgcccggggcagggctcgggagagcgggccacaccatgaggccccagccccaccagaggccccgcgctgccctggcccccggtgcaccgtgctagcccccagccagggcgttggggagggcggtggccatggccagtcacgtggacctgctgacggagctgcagctgctggagaaggtgcccacgctggagcggctgcgggctgcccagaagcgccgggcccagcagctgaagaaatgggcacagtacgagcaggacttgcagcaccgcaagcgaaagcatgagcggaagcgcagcacgggcggccgccgcaagaaagtgtccttcgaggccagcgtggccctgctggaggcctcgctgaggaacgacgccgaggaagtacgctacttcctgaagaataaggtcagccctgatttgtgcaatgaggacggactcacagccctacaccagtgctgcatcgacaactttgaggaaattgtgaagctgctcctctcccatggtgccaatgtgaacgccaaggacaacgagctgtggacacctctccatgctgcagccacctgcggccacatcaacctggtgaagatcctcgttcagtatggggccgacttgcttgctgtcaactcggatgggaacatgccatatgacctctgcgaggatgaacccaccctggatgtcatcgagacctgcatggcataccagggcatcacccaagagaaaatcaacgagatgcgggtggctcctgagcagcagatgattgcggacatccactgcatgatcgcagcgggccaggacctggactggatagatgcccagggtgccacactgatgcagatggcagagctattggtgtcccatggagctagtctcagtgcaaggacatccatggatgagatgccaatagacctgtgcgaggaggaagagttcaaggtcctgctgctggagctaaaacacaagcatgatgtgatcatgaagtcacagctgaggcacaagtcatccttgagccggaggacctccagcgcaggcagccgtgggaaggtggtgcggcgagccagcctgtcggacaggaccaacctgtataggaaggagtatgagggagaggccatcctgtggcagcggagtgcagctgaggatcagcggacctccacctacaacggggacatcagggagaccaggacagaccaagagaataaggaccctaaccccaggctggagaagcccgtgctactctccgaatttcctaccaagatcccacgaggtgaactggacatgcctgttgagaatggcctccgggctccggtcagtgcctaccagtatgcgctggccaacggggatgtctggaaggtgcatgaggtgcctgactacagcatggcctatggcaaccctggcgtggccgacgccaccccgccctggagcagctacaaggaacagagccctcagacgcttctggagctgaagcggcagcgggctgcagccaagctgctcagccaccccttccttagcacacacctgggcagcagcatggccaggacgggcgagagtagcagtgaaggcaaggcccccttgatcggaggcagaacttcaccgtacagcagcaatgggacctcggtatattacacggtcaccagcggagatcccccactcttaaagttcaaggcccccatagaggagatggaggagaaggtgcatggctgttgccgtatctcctagtctccgtgtgatggaggagggagatgcctggggaggggctcctggaatccaggccagcccaacagccctggctggggaggtgtcagggcagctggggagaggtgggctctgcttttcagaggaactcagaccccagccctcagctggctgcccatagcatcccatgtcccacgtcccgtggttctgcttcctgctgcatcgtctgccatctgacacaaggcctgtcgtggcctcctggttcactctgctgtctgatcttgggagggtgggcttgagatcccagctctattcttggtataaaggcttctccggatcagtacatgcatgtcacattaacacacacacacacacacatatacacacacacacaagctcgatcagtgtgtgtaggaatgacatacctgggctcaggggaagcaagggggcttagaatttgtggggtattcccaaaaggatggaagttaagactcagagtctcattaccactgccaatgtggttttagcaggggaggggacctgctaagctgagacccatagtcctgctcagagttatcccaaagtctgagccaccagccacacctgacaggggtgagaagtcctcgctgtgttcagagggagccaggaatctacatgggtagatgagatagacacagacctgctccccgcagccttgttgagagccacacttctgcccatgccaggagccagctgtgtgaccatccaggggtggagggggaaaaccaggcaatttcgttcctggaatcaaccaaatcatgttttcctcttggatggaagtgtcaaaggcagaagggtgtgggagggggacaaggtcagtatttaccaaagtgtatctgattttaaaaattcctttagtctgtaaaactcctagagggagggaggtaactgaattcacttctttttgtggatcgtatcaaggtcactgggttttactggctggtgctgggaaaatgaagctaagtgaggagcttccattggaatgcttttccagggagagaggccagttaatttaaaaaaaacagtcgctagttaacagcgacagagcccagcaccctggggtctttgtgaatatccagactgtttcagcccagcccatctcagccaaccctccttagactgagctgtcagagcaagcaattaggggccagcctgcctccacctcccacccccttccacctccatcagtcatgtgtgcagagtcagtgctcgggatcccgggcccagcttttgcctttttggggatgcttggtgagacagatttgccagtcagcccttttgagttcccgcctcacccaggggctcccagcctgcacttgcaggagtggtgatgccccaagtctgcgaatccagggtgcacgtggtcaatatcccctcctgcattcaggagagccatggtagggctagagttgggtcttgcccagccctgcagtttcatagtcccagccttcctggtgctggggagggaggactgtgaatggctgttctcccctcactgctgagtctcccaggaccccctttggagatgcccatggcatgggcactgcccacaggctcagccagaacctcttggtgtacccgataagctgcaggttatcccttgctctgtgcgccttttatttgtccttaaactacctccttagagctctgaaggggtctcctagttccagattttaatttggggaacagatctgggttctttttaaccctcttctttctcagtctatgagaaacttgccctgaggggcacctgggctaggggcttgggactggaagaccatccccgccttgtgccacaactttggtcatgggatctgctctttgtcattcttagccccctactgtggcccccatagccccataacccagagagggagctggacttcagggagcctgagtgatgctttcccaggagcagggcagctggctggaccagaaagtagagggcccatgggagtgactgcacccttggtggctgctggaaggggagaggttctcagcatcaggccacctccaccccaatgccaggatagatgtattctagagtaggggtggaggcggcccaggaggctgaagacaggtgcacagatgcttcccacgaccttgccatttggggtgggctcttcaacatctcaggctgtggctggaacaggacaggatgatctaaaacacacgtaccattggctgtaaaacagtatgagcccagactgacgctgaaatccctcatgagccaaccttagctacaaggtagggagttctgagggaagccgcgtgctcctcaggagagagctgtttaggttttccgatctttttgctcaggggccaaacactgaaggcacgtactgcccaacccactgagcgcctgaggccattccctccttttccgcatgcctcctgcctcctgggctattcctctccacccagaaggctgggaatcccagctgattccctgacaggagccgacttcacacacaggtgactctcaggcattggctcatgttttcagccagggataaaccatcccttcttggggctttaagtccctggggagctttccctgtaggtctcctgggtgttgagagacaagttggagaccaacctccaatgaatgagccgcggtcattcattaattcactcacgtaatttactgagtagctgcaacatgccagcctctacgttaggttctgcggataaaggaggaataagacagagtcaggagaactgttccttgtggtttccgtcccttggggaccacaggcatcagcagtcccattcaagtcacctgaggcaaagtgtctgcatcttcgtccagcgaccctttgcttttcggctcctagaatccttagagtctgaattcctttagctgggaacagctgtcatggtcacccctggataacatttgccaccaagtatagatgctggatcttgggttccaggcagacatcatccaggtccatctggaactttcagtgatagctgccttcagccagcatctttgggggactctataatagcagcttgagatcagtgtctagaagactgttctgcaatttgctgccaaatgcatctcaggtttttaaagtcattgtttcttgctcatggtggctcatttattacatagtcccctcaccccactaatggataatgggaggaaaagttgctgcttccttcagcatcaaagcctttccttgggaatctgcctccctccatggcaggggtggattcgggagctgggagtaaccaggcaaagtcaaccagatgcctagctcctgctgagacccaggtcctatggcagctcctcattagattaaaggagaccacttccaaagcaggtgctgcatggctcaccatcatatgccccaaacaactgaaagttggcggttatcaccagactgtgagtttctggcaagtagcttggggaagctgaataaactctaggcccagggctactaaagacttcaggatagaattctccatcaaatatacagcataagtaaaactgctctgcactgtttaatccatttccaaggggcttagaaaagctaacaagggtgtgtcccctgtcctgccccaccggtttgctggctttgtaataacataagaccattgtggttgttggtgtcagataccttcccatcctgagctctctcacctacctgctctctctcctagagcaggatactggggtacttttaagaagggtgctccttttaagatgcccagaaaagctgtatttaactcttgctatttgtaacttggggatggtctcccctgccccagggcacataagagcaaaggctccaatggtcagtggatgactctgcaaaagtgaccccctgtgccagaagctatagccctctccccaacaggtctctcttgttggccagagggcctgcttcccatgggcattgcaagtgccaccgtgcggggcctggctctgcacacccaggaaaagtctgcagacccccagccctccgcaataattcaccagaccagaagccactggtgtacagagaacacttaaaaaaatgtattttatgtgaaaaaaaattaaaactctgtatactgtatcagcagctttgtgtaaaaatggcaatcaagagagtctaatatatttaaaacttttttaaaaaaaatcttcgcagatctttgatatcgtactgaggtaacttccacgtagccccttgccacgcggcaccggtgggccttgggtccaaaactgtggctcagccacatcccaaagggggcacatgtccctggagttgcttccagctgccaaggcctgtgacagaattcgctgttaagagtttttaattaaaattattaaattccttttaataacaaaaaaaaaaaaaaaaaaaaa

SEQ ID NO: 385 - DNA, 6370 bp, Homo sapiens
cttgaacctttgtcacccctcacgttgcacaccaaagacataccctagtgattaaatgctgattttgtgtacgattgtccacggacgccaaaacaatcacagagctgcttgatttgttttaattaccagcacaaaatgccatcagtctgggacgtgatcgggcagaggtgtactcacagtagtgtaaatactgctgtaaatagttgtctgatggtggctttgacagtgagctagcttctgagttttcccttctttttatactgttttctgtgctggcttttttgaatcttcctaatttttcatctctttaacaaactcctatgaagttgaaaccgggaagtttgctctaacatttccagagaaggtattaagtcatgatgcaggaatctgcgacagagacaataagcaacagttcaatgaatcaaaatggaatgagcactctaagcagccaattagatgctggcagcagagatggaagatcaagtggtgacaccagctctgaagtaagcacagtagaactgctgcatctgcaacaacagcaggctctccaggcagcaagacaacttcttttacagcagcaaacaagtggattgaaatctcctaagagcagtgataaacagagaccactgcaggtgcctgtgtcagtggccatgatgactccccaggtgatcacccctcagcaaatgcagcagatccttcagcaacaagtcctgtctcctcagcagctacaagcccttctccaacaacagcaggctgtcatgctgcagcagcaacaactacaagagttttacaagaaacagcaagagcagttacatcttcagcttttgcagcagcagcagcaacagcagcagcagcaacaacagcagcaacaacagcagcagcaacaacaacaacaacagcagcaacaacagcagcagcagcagcaacagcagcagcagcagcaacagcatcctggaaagcaagcgaaagagcagcagcagcagcagcagcaacagcaattggcagcccagcagcttgtcttccagcagcagcttctccagatgcaacaactccagcagcagcagcatctgctcagccttcagcgtcagggactcatctccattccacctggccaggcagcacttcctgtccaatcgctgcctcaagctggcttaagtcctgctgagattcagcagttatggaaagaagtgactggagttcacagtatggaagacaatggcattaaacatggagggctagacctcactactaacaattcctcctcgactacctcctccaacacttccaaagcatcaccaccaataactcatcattccatagtgaatggacagtcttcagttctaagtgcaagacgagacagctcgtcacatgaggagactggggcctctcacactctctatggccatggagtttgcaaatggccaggctgtgaaagcatttgtgaagattttggacagtttttaaagcaccttaacaatgaacacgcattggatgaccgaagcactgctcagtgtcgagtgcaaatgcaggtggtgcaacagttagaaatacagctttctaaagaacgcgaacgtcttcaagcaatgatgacccacttgcacatgcgaccctcagagcccaaaccatctcccaaacctctaaatctggtgtctagtgtcaccatgtcgaagaatatgttggagacatccccacagagcttacctcaaacccctaccacaccaacggccccagtcaccccgattacccagggaccctcagtaatcaccccagccagtgtgcccaatgtgggagccatacgaaggcgacattcagacaaatacaacattcccatgtcatcagaaattgccccaaactatgaattttataaaaatgcagatgtcagacctccatttacttatgcaactctcataaggcaggctatcatggagtcatctgacaggcagttaacacttaatgaaatttacagctggtttacacggacatttgcttacttcaggcgtaatgcagcaacttggaagaatgcagtacgtcataatcttagcctgcacaagtgttttgttcgagtagaaaatgttaaaggagcagtatggactgtggatgaagtagaataccagaagcgaaggtcacaaaagataacaggaagtccaaccttagtaaaaaatatacctaccagtttaggctatggagcagctcttaatgccagtttgcaggctgccttggcagagagcagtttacctttgctaagtaatcctggactgataaataatgcatccagtggcctactgcaggccgtccacgaagacctcaatggttctctggatcacattgacagcaatggaaacagtagtccgggctgctcacctcagccgcacatacattcaatccacgtcaaggaagagccagtgattgcagaggatgaagactgcccaatgtccttagtgacaacagctaatcacagtccagaattagaagacgacagagagattgaagaagagcctttatctgaagatctggaatgagaactgacttgtgaaacctcagcgtgaagggacatatcactgaccttcataaccactccacaaccatgaatatttgacaaatttttactgtgactatttattaagcatggataaaggagacagccctaaaggaacttactaagccagccctttgggattcagtaccaacaggcaaattgcttgttttcttcttcttcttcttctttttttttttttttttagaaaaaaagacaaaaactgattttcttgaaaaaaaaaaatgaactgttctttctataatggctttgcccatttaaaaaatgtggctcttaagggttcatgaaatgactgaatatgaggatacatgtcctgtagaaagcaaatgcgcctcatatactgccaaaaatagtgttagtttcattaatgtgaattttccagcattcagtagttgtaatgttagaaacaattgctggtcaagttcaacttgttgctattgtttttaatttgcacaggagtagtatcagaaattagtgtcactgcttgtatctagctgaattttaaacaacagaacattagttttttatgttggtgccaccaactgtaaatgacataagttagttattacaaaacacagtaattagactgttgcaaccatctaaaaccttaggcttccagtctgtgctgttagtgttaagatgtaaagtgcaatcctaagctaacattatctgtgcaagcaccatagaaacatttgcatatctgcatagatcttacaactgtactctttacctccttgtgataaagctttgtctacctgcaaacacagtcaaaggctacagctgcaaaccaaagccaactctaaccatggccaagagctcaaggacagaagcagccacatgctttggtcagccttctgtaacttcaattagtacaaaggaaccttttccatgaactacctgctgttttctgatgacctctgggatcttttcatttagccctaaacaaagaaacaaatatgacaaaaaccacaactaaaaaatgttaattcagtcacagagtaatcttctgaggccaaaagtccatctaaatgcaatgaagatttgctttcattaaagacagaggtgaggacaaaatccgcagtggaagttatgatatgctagaaagcaacaaatgtggatcactgaccaaaacgattatgtacttgatgcaaatgcagattgcatattgttatatatatagtactttgtgtttttgttttccctcattcagtcagttattttcagtggtgaatacatgttgttagaagatgtcttgtatggtcttaatctttgttgtgtactatttttttatagtcttaagttataatgaaaaaacaaaaagtaggaaccaaacataaaaggtctagtaaagccaaaaattaatttcatattgattttaaagtgatctagctgagtttttacactgaaagcaaagattatagcaattgtagtccatggtatttattttcagtcaaaccaaagttacatataattctgcctctgcttatacgggatattaacactaacaatacactcccttcaaagacttgcacaggccaaattgttggaatgctggttttcttgacaattccaaaccccaaaactatgataatgagttatgatgtagttgaaaatagcatagtcagatgtttgcttaaaacctagaaacttaacatgttgcttttcatgtgctgtgccaagtcttgataatactttttcccccaaccaagggacctcataacctgattatggttattgctttacaaacagttttgacagaaggtggctgctagagcttaacatacgttcccgttccatgtgatggaaccggttcttgcaaactaagctcatcattgattctttgctgaagtcagcaaatagagttagagagatacccagtcatctatcacaccaaataaaaggacataacggctttcaaaagggttttcccacttacccaaaaggctttctgaaagcttctacctctgcaaaaaaaaaaaaagaaaaaaaaaaaaagaaaaacattagaacaattatggcagattgcatgaaacgtgagaacgtcacagtaactgctacttttcattatgtttgtctttgggtcatgatcaacgaaccggaagtttacaatatggtattaaaagaaagatgggtatggtgaaagatggttttcagtcatctaggatcctactgtaaggattatctgaaaggaaaaatgggtctttcaggtgcatgttcaaaaggctttgagggactggaagtaactgcgagagttgtaccatcagaagggtggcctaagactacaatgctaaagtatgcatacctcagttagaaaacttttgaaaggaagtctcagccacagaatgcatatacctgtagagttttgcatgggttttatatgaatacaattttaaaaaatagctgcttgcacattataccagaaaaacctccaaaactgcaattgctttgaaaatagattttaggttttttggagtttcctgaaatgcttggtctgtattttgataattgtgcatattatgtaaaaatgttggtggacccataaatgaccagactttttctaagaaaaatgttgctttaatgcatttcatgaatttttactcttatatcattgcttgctagtaatagcaaatctgcttttctgcatctgctttgcgtagctattgtaaggctttgaactaatgtatgtatttattgcttgaacttctgtgcataccttataaagcataatgtctgacaatttaaatggctcatgtattcttgcttctatcataagctgattatggggactatgatcttttgtatacagcaaattttaaactgtagcacaaacatctgtttatgtattggtggaatatacctgttttatttatcttttttgaggtaaactaatttttgatacttttcattactgtgtactatgttcatactttgaattctctgacgttagaagtcatggttgagaattgtaacagctgttattcgttctgtattcatggctttcactgctgaataaaataaaggaccaaacctaggatttgaaagaaaactgtctacctctaacaccagggagttatcagattttattttacatagttttagtctacaaagacacaattgcttaaacctagtgggcttaaggcttatattctatgtggttggattcgtggcacagttgtactatttgaaaatcaattaaaattttatgtgaatgttacaagtatttggtagaattaccactaactgggttttctttagataactcagatatggagaaaatgtcatcagcattctgtgtctacagctgcttaacttcataagaatgcatttctttgtgattagggaatcgaagaatagtcagctaggaatagagctacagaagtacacttacataaaccatcctggactttaatgtccctgggcagattcagtcgcaaaatccaatatgatattttgtaaagttttcaagttggacatttacatttttgagaattttgagacttcatcttacacatgccagtattaacacacatttggacaatagctttattaagtctataaagctattgaaaggaacatggcttacccttgttatttcactagttcaggttgcaacgaaaggtttttttgtccatgaacacttggcatatcttacttagcaaaaaagaaggatgtacattttactatagaattaatgtatgaacagtgtgtcactgctgttggatgtaaaaatgtatatgaaaccatttcattcacttgattacatttctgaagtataaataaaaaaatctaattctttttgacccatttataaaaaaa

SEQ ID NO: 386 - DNA, 2593 bp, Homo sapiens
tgtcccagcctcctttgcgggtaaacagacatggccggcgaaggagatcagcaggacgctgcgcacaacatgggcaaccacctgccgctcctgcctgagagtgaggaagaagatgaaatggaagttgaagaccaggatagtaaagaagccaaaaaaccaaacatcataaattttgacaccagtctgccgacatcacatacatacctaggtgctgatatggaagaatttcatggcaggactttgcacgatgacgacagctgtcaggtgattccagttcttccacaagtgatgatgatcctgattcccggacagacattacctcttcagctttttcaccctcaagaagtcagtatggtgcggaatttaattcagaaagatagaacctttgctgttcttgcatacagcaatgtacaggaaagggaagcacagtttggaacaacagcagagatatatgcctatcgagaagaacaggattttggaattgagatagtgaaagtgaaagcaattggaagacaaaggttcaaagtccttgagctaagaacacagtcagatggaatccagcaagctaaagtgcaaattcttcccgaatgtgtgttgccttcaaccatgtctgcagttcaattagaatccctcaataagtgccagatatttccttcaaaacctgtctcaagagaagaccaatgttcatataaatggtggcagaaataccagaagagaaagtttcattgtgcaaatctaacttcatggcctcgctggctgtattccttatatgatgctgagaccttaatggacagaatcaagaaacagctacgtgaatgggatgaaaatctaaaagatgattctcttccttcaaatccaatagatttttcttacagagtagctgcttgtcttcctattgatgatgtattgagaattcagctccttaaaattggcagtgctatccagcgacttcgctgtgaattagacattatgaataaatgtacttccctttgctgtaaacaatgtcaagaaacagaaataacaaccaaaaatgaaatattcagtttatccttatgtgggccgatggcagcttatgtgaatcctcatggatatgtgcatgagacacttactgtgtataaggcttgcaacttgaatctgataggccggccttctacagaacacagctggtttcctgggtatgcctggactgttgcccagtgtaagatctgtgcaagccatattggatggaagtttacggccaccaaaaaagacatgtcacctcaaaaattttggggcttaacgcgatctgctctgttgcccacgatcccagacactgaagatgaaataagtccagacaaagtaatactttgcttgtaaacagatgtgatagagataaagttatctaacaaattggttatattctaagatctgctttggaaattattgcctctgatacatacctaagtaaacataacattaatacctaagtaaacataacattacttggagggttgcagtttctaagtgaaactgtatttgaaacttttaagtatactttaggaaacaagcatgaacggcagtctagaataccagaaacatctacttgggtagcttggtgccattatcctgtggaatctgatatgtctggtagcatgtcattgatgggacatgaagacatctttggaaatgatgagattatttcctgtgttaaaaaaaaaaaaaatcttaaattcctacaatgtgaaactgaaactaataatttgatcctgatgtatgggacagcgtatctgtaccagtgctctaaataacaaaagctagggtgacaagtacatgttccttttggaaagaagcaaggcaatgtatattaattattctaaaagggctttgttcctttccattttctttaacttctctgagatactgatttgtaaattttgaaaattagttaaaatatgcagttttttgagcccacgaatagttgtcatttcctttatgtgcctgttagtaaaaagtagtattgtgtatttgctcagtatctgaactataagcccatttatactgttccatacaaaagctatttttcaaaaattaatttgaaccaaaactactactatagggaaaagatgccaaaacatgtcccctcacccaggctaaacttgatactgtattattttgttcaatgtaaattgaagaaaatctgtaagtaagtaaaccttaagtgtgaaactaaacatgttctttgttcaaataatgtaaaatatctactcataattttaaagttctaaaaaggctgctttgccacctacctctttgcttatattcaagggtttagtgggtccttccttccacatttgtatgataactttcgttttattggtagtcctttgctactttaaaactaatcaggttaaatgtttactcaaatgtagtaatagtatgaggccaaaatacatgccttgaaggtggagtgaaatcagttgagtgtcacactgcatatttatgtaaatagagtaaatgaaaattcaagaatacttccaatcaggatatgcccctgccttattttttctaaggtctacttttactactttaataattttgggtttgtgtgaaaaaa

SEQ ID NO: 387 - DNA, 3366 bp, Homo sapiens
ctcttttgcttctgcagacattcccggcactggccgactggcgggaggacctccccgcgcgccccgcacaccggctcctgcgcgcaccccaacagagcgcagcgccaggagtccagaagcgggcgggacgccctccgggtcccttacagtgccccttctcgacctggggcaggtcctcccggcccggcccgaacatgctggacggcctaaagatggaggagaacttccaaagcgcgatcgacacctcggcctccttctcctcgctgctgggcagagcggtgagccccaagtctgtctgcgagggctgtcagcgggtcatcttggacaggtttctgctgcggctcaacgacagcttctggcatgagcagtgcgtgcagtgcgcctcctgcaaagagcccctggagaccacctgcttctaccgggacaagaagctgtactgcaagtatgactacgagaagctgtttgctgttaaatgtgggggctgcttcgaggccatcgctcccaatgagtttgttatgcgggcccagaagagtgtataccacctgagctgcttctgctgctgtgtctgcgagcgacagcttcagaagggtgatgagtttgtcctgaaggaggggcagctgctctgcaaaggggactatgagaaggagcgggagctgctcagcctggtgagcccagcagcctcagactcaggtaaaagtgatgatgaagaaagtctctgcaagtcagcccatggggcagggaaaggaactgctgaggaaggcaaggaccataagcgccccaaacgtccgagaaccatcttgacaactcaacagaggcgagcattcaaggcctcatttgaagtatcctccaagccctgcaggaaggtgagagagactctggctgcagagacagggctgagtgtccgtgtcgtccaggtgtggttccaaaaccagagagcgaagatgaagaagctggccaggcgacagcagcagcagcagcaagatcagcagaacacccagaggctgagctctgctcagacaaacggtggtgggagtgctgggatggaaggaatcatgaacccctacacggctctgcccaccccacagcagctcctggccatcgagcagagtgtctacagctcagatcccttccgacagggtctcaccccaccccagatgcctggagaccacatgcacccttatggtgccgagccccttttccatgacctggatagcgacgacacctccctcagtaacctgggtgattgtttcctagcaacctcagaagctgggcctctgcagtccagagtgggaaaccccattgaccatctgtactccatgcagaattcttacttcacatcttgagtcttcccctagagttctgtgactaggctcccatatggaacaaccatattctttgaggggtcactggctttaggacagggaggccagggaagaggtgggttggggagggagttttgttggggatgctgttgtataatgatatggtgtagctcagcatttccaaagactgaatacattatggattgcatagtttaatgtttctaataagagtcttagcattagatatgaagacgtgtttatcattaaggacagagacttttaatatagacattctcatgcaaactagatacttagggactcctaacaacttcccaccatgtcggggaagctcttgtcaagaggtgcatatgtctatccatctacacaccaatagacagaaggacagatagatagatgtgtgtgtgtgagtgtgtaacctttcgtattttaccctcaaagtttattcctaattataacagacaccaactgtacagcaaaagtaactttattttcagtgtgaactatatttaaggaaatgcttgatgcacttaagttataaaatgagataatttacttttataaactttatttttagcttgacaagacttgtcagcagggcagagagggctgctccacctagccccatagctttgagtgctggggttcattctgttttcagagtgtctttcagatctggaaagaaattctgtgtggctgatggtgttctctcttgcattcttgctctctttggggttgaatcactgggcaggggtgggacagaataatctctgatcatgttctgagaaaatgtaaagcccagactcctgggctttcttttaaattctgacaagtggttgttgggcagtgctaggatgattggttcagctcttgagcttcagcatctgcaaatgtggatgaggctaatagtatgtacctacctcactgggaaacaccaaggcttaattcattcccaggacacatgagcagggctgagactaatatctgatatttgtttaagatacaaccaggccactcacttggcaaaggagggtacatagggttgcagagcaggagggctcctgaactccagagggcagttctgcctgctgaagtccctctgcaaagcctgtgctgaaggagacaccagctcagagcagttcagagggatcccagagtcccagagtggggaggaggtgaaggctgaggggatagaggagggcctggtggtgttctagagcagggttgggcaaactcctgcttgcgggcctgctttctatggcttgccagcaaagaatggtttttactttttttttgaggtcattaaaaaaaaggagaagaagaatatataacaggctgtctgtggcctggaaagcctgaaatatttgctatctgtattgtctggcccttacagaaaaagtttggggccccttgttttagagggtctgtttctaaagaacctcatggcgctcatagaggcagaaggttccagtggaaacccttggctcttccttccaactcactcctctgatcctcggcacagaagacccagcagccattgtacatggggacagttccacaccctggtctccagttgcggtgctaggatggtattgttctgtgctaggaagtctcctgggaacccagaatgagttggtggggaagacagcgggtcactgtggacccatccaggaggggccaggataggcttggcctcatttctggggacatcattggagacttgaacacagagacacgtccctatcactctggcaaggccagagggaacatgtccccttatggtagagtctatgttgtgtgatttttgtgctcttgtttataatttatgcaaaccaccaagaaacccaaaccagtctgatgagtgaaaattatgcagatgctgtatggccccacaggtttctgtggtaaagaccagttggagaatgtaggagatactatgtgagtgaaaatgaatagagatccttattccactccttaatggcataccaagatgaaattaaaatctcttacaaatgaaaaaaaaaaa

SEQ ID NO: 388 - DNA, 2804 bp, Homo sapiens
tgactcggaagctattctggccatttgccctccttccccccttcgtccgctctcattggctctgctggtaagtggtctattcctgcccacccccgggtgactagcttggccagtagtcgaccccacccggggaccgactctgggggttggagagactcttggggccggggtcgggcactccagctttcttctagccccgagctgggattccctggcctgcgccagctgcgtacacggcgagtacaccgcacctgcccgggacttcacccgcagctgcgagactcctccattcccggagggctccccacacctgctgcggccgtgccccatctccccgcagctgcggcgctgagcacccccatgtcgagaggctgagaccaggacaggtgcagggcgttcccactcacccccgaaagtcctcctccttcctctgcgagtctgtgttggagcagccctgaccaacgctccaataggccgggatccagccatacttcaatggatcccaggggtatcttgaaggcatttcccaagcggcagaaaattcatgctgatgcatcatcaaaagtacttgcaaagattcctaggagggaagagggagaagaagcagaagagtggctgagctcccttcgggcccatgttgtgcgcactggcattggacgagcccgggcagaactctttgagaagcagattgttcagcatggcggccagctatgccctgcccagggcccaggtgtcactcacattgtggtggatgaaggcatggactatgagcgagccctccgccttctcagactaccccagctgcccccgggtgctcagctggtgaagtcagcctggctgagcttgtgccttcaggagaggaggctggtggatgtagctggattcagcatcttcatccccagtaggtacttggaccatccacagcccagcaaggcagagcaggatgcttctattcctcctggcacccatgaggccctgcttcagacagccctttctcctcctcctcctcccaccaggcctgtgtctcctccccaaaaggcaaaagaggcaccaaacacccaagcccagcccatctctgatgatgaagccagtgatggggaagaaacccaggttagtgcagctgatctggaagccctcatcagtggccactaccccacctcccttgagggagattgtgagcctagcccagcccctgctgtcctggataagtgggtctgtgcacagccctcaagccagaaggcgaccaatcacaacctccatatcacagagaagctggaagttctggccaaagcctacagtgttcagggagacaagtggagggccctgggctatgccaaggccatcaatgccctcaagagcttccataagcctgtcacctcgtaccaggaggcctgcagtatccctgggattgggaagcggatggctgagaaaatcatagagatcctggagagcgggcatttgcggaagctggaccatatcagtgagagcgtgcctgtcttggagctcttctccaacatctggggagctgggaccaagactgcccagatgtggtaccaacagggcttccgaagtctggaagacatccgcagccaggcctccctgacaacccagcaggccatcggcctgaagcattacagtgacttcctggaacgtatgcccagggaggaggctacagagattgagcagacagtccagaaagcagcccaggcctttaactctgggctgctgtgtgtggcatgtggttcataccgacggggaaaggcgacctgtggtgatgtcgacgtgctcatcactcacccagatggccggtcccaccggggtatcttcagccgcctccttgacagtcttcggcaggaagggttcctcacagatgacttggtgagccaagaggagaatggtcagcaacagaagtacttgggggtgtgccggctcccagggccagggcggcggcaccggcgcctggacatcatcgtggtgccctatagcgagtttgcctgtgccctgctctacttcaccggctctgcacacttcaaccgctccatgcgagccctggccaaaaccaagggcatgagtctgtcagaacatgccctcagcactgctgtggtccggaacacccatggctgcaaggtggggcctggccgagtgctgcccactcccactgagaaggatgtcttcaggctcttaggcctcccctaccgagaacctgctgagcgggactggtgacccatggctgggggtgctgaggagagccgagttggactggctacccctcctggccacccagtactccctccagcctcagctggctgaacctcgccgctccaaccaccagcttcctcagcgagcagggcccagggctctgggcctgaagcaagagccagcccggctcccagtgtctgcccggctcccagtgtctgcccagccctctcccagacaggagcaggctgccaccccttctacctcaccactgcccctcgaagaattttgcaaatggccccttgccccattttaagcaggagcaggtggctggtttgaagccccaggtatcccccttccctgctatgggaaaggccaagctgctgggtggggacagaagctgcaggggagagggaagcagccgtgctgtcaacatcatccggcaccctctggggtaggagaacagccattccacatgtgttccctctatccgtcctgcttcctgggcagctggtggtgctgggaatggggtgccccagccttggtgaggacagtgttgggaggcccaggggcccagtaaagtgcatttgacattgaaaaaaaaaaaa

SEQ ID NO: 389 - DNA, 7993 bp, Homo sapiens
atatcccagtggcccccgtgcggcgactttagctgctgctgtctcagccgctccacagcgacggcggcggctgcggcttagtcggtggcggccggcggcggctgcgggctgagcggcgagtttccgatttaaagctgagctgcgaggaaaatggcggcgggaggatcaaaatacttgctggatggtggactcagagaccaataaaaataaactgcttgaacatcctttgactggttagccagttgctgatgtatattcaagatgagtggattaggagaaaacttggatccactggccagtgattcacgaaaacgcaaattgccatgtgatactccaggacaaggtcttacctgcagtggtgaaaaacggagacgggagcaggaaagtaaatatattgaagaattggctgagctgatatctgccaatcttagtgatattgacaatttcaatgtcaaaccagataaatgtgcgattttaaaggaaacagtaagacagatacgtcaaataaaagagcaaggaaaaactatttccaatgatgatgatgttcaaaaagccgatgtatcttctacagggcagggagttattgataaagactccttaggaccgcttttacttcaggcattggatggtttcctatttgtggtgaatcgagacggaaacattgtatttgtatcagaaaatgtcacacaatacctgcaatataagcaagaggacctggttaacacaagtgtttacaatatcttacatgaagaagacagaaaggattttcttaagaatttaccaaaatctacagttaatggagtttcctggacaaatgagacccaaagacaaaaaagccatacatttaattgccgtatgttgatgaaaacaccacatgatattctggaagacataaacgccagtcctgaaatgcgccagagatatgaaacaatgcagtgctttgccctgtctcagccacgagctatgatggaggaaggggaagatttgcaatcttgtatgatctgtgtggcacgccgcattactacaggagaaagaacatttccatcaaaccctgagagctttattaccagacatgatctttcaggaaaggttgtcaatatagatacaaattcactgagatcctccatgaggcctggctttgaagatataatccgaaggtgtattcagagattttttagtctaaatgatgggcagtcatggtcccagaaacgtcactatcaagaagcttatcttaatggccatgcagaaaccccagtatatcgattctcgttggctgatggaactatagtgactgcacagacaaaaagcaaactcttccgaaatcctgtaacaaatgatcgacatggctttgtctcaacccacttccttcagagagaacagaatggatatagaccaaacccaaatcctgttggacaagggattagaccacctatggctggatgcaacagttcggtaggcggcatgagtatgtcgccaaaccaaggcttacagatgccgagcagcagggcctatggcttggcagaccctagcaccacagggcagatgagtggagctaggtatgggggttccagtaacatagcttcattgacccctgggccaggcatgcaatcaccatcttcctaccagaacaacaactatgggctcaacatgagtagccccccacatgggagtcctggtcttgccccaaaccagcagaatatcatgatttctcctcgtaatcgtgggagtccaaagatagcctcacatcagttttctcctgttgcaggtgtgcactctcccatggcatcttctggcaatactgggaaccacagcttttccagcagctctctcagtgccctgcaagccatcagtgaaggtgtggggacttcccttttatctactctgtcatcaccaggccccaaattggataactctcccaatatgaatattacccaaccaagtaaagtaagcaatcaggattccaagagtcctctgggcttttattgcgaccaaaatccagtggagagttcaatgtgtcagtcaaatagcagagatcacctcagtgacaaagaaagtaaggagagcagtgttgagggggcagagaatcaaaggggtcctttggaaagcaaaggtcataaaaaattactgcagttacttacctgttcttctgatgaccggggtcattcctccttgaccaactcccccctagattcaagttgtaaagaatcttctgttagtgtcaccagcccctctggagtctcctcctctacatctggaggagtatcctctacatccaatatgcatgggtcactgttacaagagaagcaccggattttgcacaagttgctgcagaatgggaattcaccagctgaggtagccaagattactgcagaagccactgggaaagacaccagcagtataacttcttgtggggacggaaatgttgtcaagcaggagcagctaagtcctaagaagaaggagaataatgcacttcttagatacctgctggacagggatgatcctagtgatgcactctctaaagaactacagccccaagtggaaggagtggataataaaatgagtcagtgcaccagctccaccattcctagctcaagtcaagagaaagaccctaaaattaagacagagacaagtgaagagggatctggagacttggataatctagatgctattcttggtgatctgactagttctgacttttacaataattccatatcctcaaatggtagtcatctggggactaagcaacaggtgtttcaaggaactaattctctgggtttgaaaagttcacagtctgtgcagtctattcgtcctccatataaccgagcagtgtctctggatagccctgtttctgttggctcaagtcctccagtaaaaaatatcagtgctttccccatgttaccaaagcaacccatgttgggtgggaatccaagaatgatggatagtcaggaaaattatggctcaagtatgggtgggccaaaccgaaatgtgactgtgactcagactccttcctcaggagactggggcttaccaaactcaaaggccggcagaatggaacctatgaattcaaactccatgggaagaccaggaggagattataatacttctttacccagacctgcactgggtggctctattcccacattgcctcttcggtctaatagcataccaggtgcgagaccagtattgcaacagcagcagcagatgcttcaaatgaggcctggtgaaatccccatgggaatgggggctaatccctatggccaagcagcagcatctaaccaactgggttcctggcccgatggcatgttgtccatggaacaagtttctcatggcactcaaaataggcctcttcttaggaattccctggatgatcttgttgggccaccttccaacctggaaggccagagtgacgaaagagcattattggaccagctgcacactcttctcagcaacacagatgccacaggcctggaagaaattgacagagctttgggcattcctgaacttgtcaatcagggacaggcattagagcccaaacaggatgctttccaaggccaagaagcagcagtaatgatggatcagaaggcaggattatatggacagacatacccagcacaggggcctccaatgcaaggaggctttcatcttcagggacaatcaccatcttttaactctatgatgaatcagatgaaccagcaaggcaattttcctctccaaggaatgcacccacgagccaacatcatgagaccccggacaaacacccccaagcaacttagaatgcagcttcagcagaggctgcagggccagcagtttttgaatcagagccgacaggcacttgaattgaaaatggaaaaccctactgctggtggtgctgcggtgatgaggcctatgatgcagccccaggtgagctcccagggttttcttaatgctcaaatggtcgcccaacgcagcagagagctgctaagtcatcacttccgacaacagagggtggctatgatgatgcagcagcagcagcagcagcaacagcagcagcagcagcagcagcagcagcaacagcaacagcaacagcaacagcagcaacagcagcaaacccaggccttcagcccacctcctaatgtgactgcttcccccagcatggatgggcttttggcaggacccacaatgccacaagctcctccgcaacagtttccatatcaaccaaattatggaatgggacaacaaccagatccagcctttggtcgagtgtctagtcctcccaatgcaatgatgtcgtcaagaatgggtccctcccagaatcccatgatgcaacacccgcaggctgcatccatctatcagtcctcagaaatgaagggctggccatcaggaaatttggccaggaacagctccttttcccagcagcagtttgcccaccaggggaatcctgcagtgtatagtatggtgcacatgaatggcagcagtggtcacatgggacagatgaacatgaaccccatgcccatgtctggcatgcctatgggtcctgatcagaaatactgctgacatctctgcaccaggacctcttaaggaaaccactgtacaaatgacactgcactaggattattgggaaggaatcattgttccaggcatccatcttggaagaaaggaccagctttgagctccatcaagggtattttaagtgatgtcatttgagcaggactggattttaagccgaagggcaatatctacgtgtttttcccccctccttctgctgtgtatcatggtgttcaaaacagaaatgttttttggcattccacctcctagggatataattctggagacatggagtgttactgatcataaaacttttgtgtcacttttttctgccttgctagccaaaatctcttaaatacacgtaggtgggccagagaacattggaagaatcaagagagattagaatatctggtttctctagttgcagtattggacaaagagcatagtcccagccttcaggtgtagtagttctgtgttgaccctttgtccagtggaattggtgattctgaattgtcctttactaatggtgttgagttgctctgtccctattatttgccctaggctttctcctaatgaaggttttcatttgccattcatgtcctgtaatacttcacctccaggaactgtcatggatgtccaaatggctttgcagaaaggaaatgagatgacagtatttaatcgcagcagtagcaaacttttcacatgctaatgtgcagctgagtgcactttatttaaaaagaatggataaatgcaatattcttgaggtcttgagggaatagtgaaacacattcctggtttttgcctacacttacgtgttagacaagaactatgatttttttttttaaagtactggtgtcaccctttgcctatatggtagagcaataatgctttttaaaaataaacttctgaaaacccaaggccaggtactgcattctgaatcagaatctcgcagtgtttctgtgaatagatttttttgtaaatatgacctttaagatattgtattatgtaaaatatgtatatacctttttttgtaggtcacaacaactcatttttacagagtttgtgaagctaaatatttaacattgttgatttcagtaagctgtgtggtgaggctaccagtggaagagacatcccttgacttttgtggcctgggggaggggtagtgctccacagcttttccttccccaccccccagccttagatgcctcgctcttttcaatctcttaatctaaatgctttttaaagagattatttgtttagatgtaggcattttaattttttaaaaattcctctaccagaactaagcactttgttaatttggggggaaagaatagatatggggaaataaacttaaaaaaaaatcaggaatttaaaaaaacgagcaatttgaagagaatcttttggattttaagcagtccgaaataatagcaattcatgggctgtgtgtgtgtgtgtatgtgtgtgtgtgtgtgtgtatgtttaattatgttaccttttcatcccctttaggagcgttttcagattttggttgctaagacctgaatcccatattgagatctcgagtagaatccttggtgtggtttctggtgtctgctcagctgtcccctcattctactaatgtgatgctttcattatgtccctgtggattagaatagtgtcagttatttcttaagtaactcagtacccagaacagccagttttactgtgattcagagccacagtctaactgagcaccttttaaacccctccctcttctgccccctaccacttttctgctgttgcctctctttgacacctgttttagtcagttgggaggaagggaaaaatcaagtttaattccctttatctgggttaattcatttggttcaaatagttgacggaattgggtttctgaatgtctgtgaatttcagaggtctctgctagccttggtatcattttctagcaataactgagagccagttaattttaagaatttcacacatttagccaatctttctagatgtctctgaaggtaagatcatttaatatctttgatatgcttacgagtaagtgaatcctgattatttccagacccaccaccagagtggatcttattttcaaagcagtatagacaattatgagtttgccctctttcccctaccaagttcaaaatatatctaagaaagattgtaaatccgaaaacttccattgtagtggcctgtgcttttcagatagtatactctcctgtttggagacagaggaagaaccaggtcagtctgtctctttttcagctcaattgtatctgacccttctttaagttatgtgtgtggggagaaatagaatggtgctcttatctttcttgactttaaaaaaattattaaaaacaaaaaaaaaataaatttttttgcaatcctttcctcagacctggctccaggctaactggaaggcagcactcccttttttatatagtagaaaaatgaagtttattataagtttttatattttctacttgttcatttggtgcaaactcaagatttcttttaataggtgcagtctttgagataatttgtttttacctgtattgccctttatcttttttaggtaattctttgtactcctgctgtctacctctcctcacaccccagcaccccccattttttcaaaccttggtatctgttgggtgaacagtataatcttttcatctgcttttagaatgtgggatatttccagtacctactttttttttttttttttgctgaatccaaagatatataaataaaatatatatattttataaagatcagaatgatataaaggagatacatgtttcttcctttaaaaaataaacggaagttacattgttaatgttcatattatgatgccacttttctaaactgcatctggattgaaaggtgtaaatatcaataacagtgctacttagttatcagtatttaatatctgaggtgagttgggggtatctatattaggggtagggtattacagaagataattggcttgatgtcctagaagttctttgatccagaggtgggtgcagctgaaagtaaacagaatggattgccagttacatgtatgcctgcccagttccctttttatttgcagaagctgtgagttttgttcacaattaggttcctaggagcaaaacctcaaggattgatttattgttttcaactccaaggcacactgttaataaacgagcagggtgttttctctcttcctttctaatatatggagtttcgaagaataaaatatgagagcaatatttaaattctcaggaattgacttatactcttgagaatgaattcagtttcaatcaagtttacattatgttgcttaaaaaaatagaaattattctttatcttgcaaagaattgaaaccacatgaaatgacttatgggggatggtgagctgtgactgctttgctgaccattttggatgtcattgtaaataaaggtttctatttaaaattgga

SEQ ID NO: 390 - DNA, 8250 bp, Homo sapiens
atctaacgaggatctagaatagctaggatttatgaaataccggctttcaagttctctggtctccacccaaagatgattatcctatctaagtcccagaaatcctggattaaaggagtatttgacaagagagaatgtagcacaatcatacccagctcaaaaaatcctcacagatgtactccagtatgccaagtctgccagaatttaatcaggtgttactgtggccgactgattggagaccatgctgggatagattattcctggaccatctcagctgccaagggtaaagaaagtgaacaatggtctgttgaaaagcacacaacgaaaagcccaacagatacttttggcacgattaatttccaagatggagagcacacccatcatgccaagtatattagaacttcttatgatacaaaactggatcatctgttacatttaatgttgaaagagtggaaaatggaactgcccaagcttgtgatctcagtccatgggggcatccagaactttactatgccctctaaatttaaagagattttcagccaaggtttggttaaagctgcagagacaacaggagcgtggataataactgaaggcatcaatacaggagtgtccaagcatgttggggatgccttgaaatcccattcctctcattccttgagaaaaatctggacagttggaatccctccttggggtgtcattgagaaccagagagaccttattggaaaagatgtggtgtgcctgtaccagactctggataaccccctcagcaagctcacaacactcaacagcatgcactcgcacttcatcctgtctgatgatgggaccgtgggcaagtatggaaatgaaatgaagctcagaaggaacctggagaagtacctctctctgcagaaaatacactgccgctcaagacaaggcgtgccggtcgtggggctggtggtggaaggcggtcccaacgtcatcctgtcagtgtgggagactgtcaaggacaaggacccagtggtggtgtgtgagggcacaggtagggcggctgacctcctggccttcacacacaaacacctggcagatgaagggatgctgcgacctcaggtgaaagaggagatcatctgcatgattcagaacactttcaactttagtcttaaacagtccaagcaccttttccaaattctaatggagtgtatggttcacagggattgtattaccatatttgatgctgactctgaagagcagcaagacctggacttagcaatcctaacagctttgctgaagggcacaaatttatcagcgtcagagcaattaaatctggcaatggcttgggacagggtggacattgccaagaaacatatcctaatttatgaacaacactggaagcctgatgccctggaacaagcaatgtcagatgctttagtgatggatcgggtggattttgtgaagctcttaatagaatatggagtgaacctccatcgctttcttaccatccctcgactggaagagctctacaatacaaaacaaggacctactaatacactcttgcatcatctcgtccaagatgtgaaacagcatacccttctttcaggctaccgaataaccttgattgacattggattagtagtagaatacctcattggtagagcatatcgcagcaactacactagaaaacatttcagagccctctacaacaacctctacagaaaatacaagcaccagagacactcctcaggaaatagaaatgagtctgcagaaagtacgctgcactcccagttcattagaactgcacagccatacaaattcaaggaaaagtctatagtccttcataaatcaaggaagaagtcaaaagaacaaaatgtatcagatgaccctgagtctactggctttctttacccttacaatgacctgctggtttgggctgtgctgatgaaaaggcagaagatggctatgttcttctggcagcatggagaggaggccacggttaaagccgtgattgcgtgtatcctctaccgggcaatggcccatgaagctaaggagagtcacatggtggatgatgcctcagaagagttgaagaattactcaaaacagtttggccagctggctctggacttgttggagaaggcattcaagcagaatgagcgcatggccatgacgctgttgacgtatgaactcaggaactggagcaattcgacctgccttaaactggccgtgtcgggaggattacgaccctttgtttcacatacttgtacccagatgctactgacagacatgtggatggggaggctgaaaatgaggaaaaactcttggttaaagattattataagcattattttaccacccaccattttgacactggaatttaaaagcaaagctgagatgtcacatgttccccagtcccaggacttccaatttatgtggtattacagtgaccagaacgccagcagttccaaagaaagtgcttctgtgaaagagtatgatttggaaaggggccatgatgagaaactggatgaaaatcagcattttggtttggaaagtgggcaccaacaccttccgtggaccaggaaagtctatgagttctacagtgctccaattgtcaagttttggttttatacgatggcgtatttggcattcctcatgctgttcacttacaccgtgttggtggagatgcagccccagcccagcgtgcaggagtggcttgttagcatttacatcttcaccaatgctattgaggtggtcagggagatctgtatttcagaacctgggaagtttacccaaaaggtgaaggtatggattagtgagtactggaacttaacagaaactgtggccattggcctgttttcagctggcttcgtccttcgatggggtgaccctccttttcacacagcgggaagactgatctactgcatagacatcatattctggttctcacggctcctggacttctttgctgtgaatcaacatgcaggtccatatgtgaccatgattgcaaaaatgacagcaaacatgttctatattgtgatcatcatggccatagtcctgctgagctttggagtggcacgcaaggccatcctttcgccaaaagagccaccatcttggagtctagctcgagatattgtatttgagccatactggatgatatacggagaagtctatgctggagaaatagatgtttgttcaagccagccatcctgccctcctggttcttttcttactccattcttgcaagctgtctacctcttcgtgcaatatatcatcatggtgaacctgttgattgctttcttcaacaacgtttacttagatatggaatccatttcaaataacctgtggaaatacaaccgctatcgctacatcatgacctaccacgagaagccctggctgcccccacctctcatcctgctgagccacgtgggccttctcctccgccgcctgtgctgtcatcgagctcctcacgaccaagaagagggtgacgttggattaaaactctacctcagtaaggaggatctgaaaaaacttcatgattttgaggagcagtgcgtggaaaaatacttccatgagaagatggaagatgtgaattgtagttgtgaggaacgaatccgagtgacatcagaaagggttacagagatgtacttccagctgaaagaaatgaatgaaaaggtgtcttttataaaggactccttactgtctttggacagccaggtgggacacctgcaggatctctctgccctgactgtggataccctgaaagtcctttctgctgttgacactttgcaagaggatgaggctctcctggccaagagaaagcattctacttgcaaaaaacttccccacagctggagcaatgtcatctgtgcagaggttctaggcagcatggagatcgctggagagaagaaataccagtattatagcatgccctcttctttgctgaggagcctggctggaggccggcatcccccaagagtgcagaggggggcacttcttgagattacaaacagtaaaagagaggctacaaatgtaagaaatgaccaggaaaggcaagaaacacaaagtagtatagtggtttctggggtgtctcctaacaggcaagcacactcaaagtatggccagtttcttctggtcccctctaatctaaagcgagttcctttttcagcagaaactgtcttgcctctgtccagaccctctgtgccagatgtgctggcaactgaacaggacatccagactgaggttcttgttcatctgactgggcagaccccagttgtctctgactgggcatcagtggatgaacccaaggaaaagcacgagcctattgctcacttactggatggacaagacaaggcagagcaagtgctacccactttgagttgcacacctgaacccatgacaatgagctcccctctttcccaagccaagatcatgcaaactggaggtggatatgtaaactgggcattttcagaaggtgatgaaactggtgtgtttagcatcaagaaaaagtggcaaacctgcttgccctccacttgtgacagtgattcctctcggagtgaacagcaccagaagcaggcccaggacagctccctatctgataactcaacaagatcggcccagagtagtgaatgctcagaggtgggaccatggcttcagccaaacacatccttttggatcaatcctctccgcagatacaggcccttcgctaggagtcatagttttagattccataaggaggagaaattgatgaagatctgtaagattaaaaatctttcaggctcttcagaaatagggcagggagcatgggtcaaagcgaaaatgctaaccaaagacaggagactgtcaaagaaaaagaagaatactcaaggactccaggtgccaatcataacagtcaatgcctgctctcagagtgaccagttgaatccagagccaggagaaaacagcatctctgaagaggagtacagcaagaactggttcacagtgtccaaatttagtcacacaggtgtagaaccttacatacatcagaaaatgaaaactaaagaaattggacaatgtgctatacaaatcagtgattacctaaagcagtctcaagaggatctcagcaaaaactctttgtggaattccaggagcaccaacctcaataggaactccctgctgaaaagttcaattggagttgacaagatctcagcctccttaaaaagccctcaagagcctcaccatcattattcagccattgaaaggaataatttaatgaggctttctcagaccataccatttacaccagtccaactgtttgcaggagaagaaataactgtctacaggttggaggagagttcccctttaaaccttgataaaagcatgtcctcttggtctcagcgtgggagagcggcaatgatccaggtattgtcccgagaggagatggatgggggcctccgtaaagctatgagagtcgtcagcacttggtctgaggatgacattctcaagccgggacaagttttcattgtcaagtcctttcttcctgaggttgtgcggacatggcataaaatcttccaggagagcactgtgcttcatctttgcctcagggaaattcaacaacaaagagctgctcaaaaattgatctataccttcaaccaagtgaaaccacaaaccataccctacacaccaaggttcctggaagttttcttaatctactgccattcagccaaccagtggttgaccattgagaagtatatgacaggggagttccggaagtataacaacaacaatggtgatgaaatcacccccaccaacaccctggaggagctgatgttggctttctctcactggacctatgagtacactcggggagagctgctggttttagatttgcaaggtgttggagaaaatttgacagatccatctgttataaaacctgaagtcaaacaatcaagaggaatggtgtttggaccggccaatttgggggaagatgcaattagaaacttcattgcaaaacatcattgtaactcctgctgccggaagctcaaactcccggatttaaaaagaaatgactattcccctgaaaggataaattccacctttggacttgagataaaaatagaatcagctgaggagcctccagcaagggagacgggtagaaattccccagaagatgatatgcaactataaaaagggaggagcaagaagatcccagtgcttgccctgcctgccaggaactctgtgataacatagattgatcaacgtgatgttgattacatcagcgtctccttgggacacgccttctgagcctcacatctccttctgttcaaaggcctcattggtatatgatcaatgggttctcctagacactgacctctgtccagggcactttgcagctccatcctcaagttccacacgaagatgcttggatgagtcagctgggaatattgttcttgtgtacctcattgctttagctggtcacttggaactttggagcagaatcctgcacattaaaggatggggttgggggggatacatttattttattttctcactatgtatgcagactggaccccctactactatttgtcacctcacccacagattgtatttatgtctatatatatgttcataaaaagttatgtgatttcctcctctgtcttttccacaacataggactttgaatagcaatgataggaaaaacaatggaacaagggtgggtttgcacagattggagcacattcctgcacaaactaccaagtatactggtgaaatctcgatgggtttcagatattgtcagtgaatcatatgatgcctggatatttcaggtttctgtaaaagaaagggaaacctaaaacaaatacccttccatatataatatatatggaatatgtatattatatatatttttatatatataatatatatggaatatatatattatatatataaaatacatatggaatatatatattttatatatatatatatatatttttatttttgagatggagtttcactctttttacccaggctggagtgcaatgatgcgatctcactgcaacctctgcctcccgggcttgagcgattcttgtgtctcagtcttccgggtagctgggactacaggtgtgcaccactatgcctggctaattttgtatttttagtagagatggggtttcaccatgttggccaggctggtctcaaactcctgacctcagatgatccacctgccttggcttcccaaagtgctgggattacaggcgtgagccactgcgcctggcctttttttttttttttttaaacgagaacaagaatatgaagaactggaaatcattaagaaagggtttcccttccttaaagctcaggggtactattagttaggagttgactaactcaacctgtaaaacaccactcctccttccaaagttgtatatataatattgcaggttaaattactttatgtcaggtcctatgaagaaagatacggtttcagactgaaaacatgtttcacaggtgtttgcttccttccagagcagagttccctattcccctggcataaagaatgtatatatattttgaaatatggctgagaacatgtcattggtttgtgaggcctaaggtgaagcactcctggcagccacactgtgtagtgtatttgagggatcagtcatccctcttgtatgctgggcctggttgccctacctcgaacaagcaccagcttttcacacaaggagagatgtggggctgggagtcctctccccatcctattgcatctcctttcttattataagctgttccagttcacaggcagcaaacctcctgggtttgaaaaattccaacttatttttatctttaatcctgacattagctgacttgctagtgagcttgctttaaaaatctacactcttgcattcttaggcatacaggggaaatgttgaaaaggaaggtggaaaaccaagaatttagtttgccaatgattgcctctgattcttgtaagtttgagttccacaagggctaatttattccccttttacttgggttttggggtggtggaaagcgggaaatttgggtgatttgttgattggcaatgaggataaaatgttaatacttttttggggacttaacaactttatcctattctacaagtcagtaaaggaacaattggtactcacctcagtgctgcactcaactatggaaagaggcagagtttgcttgcccaattgccaaactaaagacatcagttcattggtcaaatatttgttacctggaatggaacttgaaagcaaatacatttggatttcaaatttcaaaaaa

SEQ ID NO: 391 - DNA, 6797 bp, Homo sapiens
atgagggatttcgggtttggggtgctgcagaccgccccgctccgaagtagcagtcctgggcccctgttctgcggcgaggcgtatggtccttacgccgtggggtccgtcaacccgctgccctccgccacgcccttcggcccactgtcgccaccaccgttgcctgtcaccggcttcttagaggccgcctcccccttctccgtccccctcggcggcggcgcgggcagcccggccgccgccgcttcctcttcctccccgttcctggcgcatcagcagaccatgcaggatgagctgcttctggggctgacacagcagccggcgcggccgctttcgggggcggcggccacggagaaactccccgaccaccaccccggcggcggcacgatcgcgggtgtgacccacctcctcccctcccaggacttcaaaccgagtctgcaccacccctcctcctcctccgcctcctcctgctgctgctgccgcacctcctccccgcaggacttcagtaagcggcagcagcagcagctgagcagccagaagaggaaagagttcagccctccccaccttccccaccctccggactcgaagccgccgccgccgcctccgccgctccactgccccggtcggttcagcccgccgccgccgccagccggcccgctcctccagccggcgcagctcgctcagcgccagcagcaacagccgccgcagcagttcagcctcctgcatcagcagcacctctcgccgcaggacttcgccccgcggcagcgtccggcagacctgcccccgctcccgcagctccctccctcgccgcctgcagccccgcggcgccgccacggaggcgcgggcagccctcgcaagaccccagccgcgggcgagggcagcgccgccgagtcccccaatgcgggcttggcctcctcgacgccggtgaaccccgcgccgggctccatggagtcccccaaccaccctctgctcaacagtcccagtaacctcctgcccggaggtgcgcttggcgcgggcgccttcagcagcctgcagagcccggaccttccacacccgggcggcggcggcggcggcgggggcggggggcccccaggaggcggagggggaggcggctccgcgtcgccgccgccgctgcccggcttcggcaccccctggtcggtgcagaccgcgtcgccgccaccccagccccagcagccgccgccgacccagccgcagcagcagccgccgccaccccagcagccgccccagccgcagccgcagccgcccggctcgtctgccaccaccccgggcggcggcagcggcggctcgctcagcgccatgccgccgcccagccccgactcagagaacggcttctaccccgggctgccgtcgtccatgaacccggccttcttccctagcttctcgcccgtgtcgccgcacggctgcactgggctcagcgttccgacgagcggcggcggcggcggcggcttcggcggccccttctcggctaccgctgtgccccctccgccgccgcccgccatgaatatacctcaacagcagcccccgccgcccgcggcgccgcagcagccgcagagccggaggtcgcccgtcagcccgcagctccagcagcagcaccaggcggcggccgccgccttcctgcagcagaggaactcctataaccaccaccagcctcttctgaaacagtctccctggagcaaccatcagagcagtggctggggcactggaagtatgtcctggggagcaatgcatggcagagatcatcgtagaaccggaaacatgggaatcccaggaactatgaatcagatatctccattgaagaaaccgttttctggtaatgtcatagcaccaccgaaatttactcgctcaactccatcactgactccaaaatcttggattgaagataatgtgttcagaacagacaacaatagtaatacactcttacccttacaggtaagaatggatcgaagtagaatgtatgacagtttgaatatgcactctttggaaaattcccttatcgatattatgagagcagagcatgatcctcttaagggtcgattgagctatccacatccaggaactgacaatctgttgatgttaaatgcaaggagttatgggcgaagacgaggtcgttcttccctctttccaatagatgatggcttgcttgatgatggtcacagtgatcaagttggagttttaaattcacccacctgttattcagctcaccaaaatggagagcgaatagaacgcttctctcgaaaagtttttgttggtggtcttcctccagatattgatgaagatgaaataactgctagcttcagaagatttgggcctttggtagtagattggcctcataaagcagaaagcaagtcctattttccaccaaaaggctatgcatttcttctctttcaagaagagagctcagttcaggcactcattgatgcttgtattgaagaagatggaaaactctatctgtgtgtttctagccctactatcaaggacaaaccagttcaaatacgtccttggaatttaagtgatagtgattttgtaatggatggttctcagcctttggatccccgaaaaacaatttttgttggaggtgttcctaggccattaagggctgtggaacttgctatgatcatggaccggctgtatggtggagtttgttatgcaggaattgatacagatcctgagctaaaatacccaaaaggtgctgggcgagttgctttctccaatcagcagagctatattgctgccattagtgctcggtttgttcagcttcagcatggtgatattgataaacgtgtggaggtaaagccatatgtgctagatgaccagatgtgtgatgaatgccagggcgcacgctgtggtggaaaatttgctccctttttttgtgccaatgtcacttgcctgcagtattactgtgagttttgttgggcaaatatccactctcgtgctggacgtgagttccataagccattggtaaaggaaggtgctgatcgcccacgtcagatccacttccgctggaactaagaatagcaaactggcctctgtttaacaaggaaagaaagggtgcatgtggcttactgtgtctgaagatactgacatgcagaagaaataagtgcattcttctgcttttcaccccagctatcaatacatgcatctttatcagcagccaaaacactacaagcctcttgtttttcaccaaaaccctacatctcaggcttactaatttttgtgatattttcatgttcaaataaaatgtttttttgtattttctccaagttatttttatatgtaaagttaaaattagatatgagaatgttttgcgtaggggcaacacagtctgctgctatatagtgggggaagcgtgcacttatttctaaacatgggtttttaacttcaagatctgccccagtaatttaccaaaggtagcaaaataatagtgaagatggaatatgtctgctacaaatgcttatttttattgttgctattttcagtgtatacataaactaaaaattagggttgatttttttgctctccattttgacttgcaagaaataatacctcaagataatctgatttattagctatttttaaacatttttaatcacaagctgtattagctttgctgctatataggtgttatgtgtaaatgccacctattaatacgggactgaaaacgttagagacacactgcattgcagataaaatgcaggcagcacaatatggcctaaactgccatagttttagaatgtgaaaaaaatgcatgtttacttacctgtatacaccatatgcatgcactagaattattaactaacgaggtgaggtattgcaaatgttcaaaaaagctctcttgaatctaggtagcatgaacaaattataaaatttgtttaaaaaagcaaacttgcatgcattattgtgacttcaagtttaaaaaatcgtcttacatgtgtacaatatgcaaattagttttagattagagagtgcagccattttgtgatctggtcagtagtggaattcgattttatgcagactggatgtaatatttgtaatccctgtgcaattttgtgacgtgcggttctaattcatgtgcagtgatatagtatagataaaagaatgagtaaaagaaaatacaagaattctaaagaaagttggttttagcccctttgatagtccatggttaagacatcctttataaaccaaagatggccagcacactgctaaccagtcaccaaatgtaagacccataagaaacccatatttaaaaatctgaattttttagaagaatgcaaaactttagtaaaccctaagtaaagtcaaaatggagaaggggaaatatacagatggctagttgcataaaattaaattttacctttataagacaatggtgaaatctggcttgaacttgcttatgtgtttaacctataaatattggggtcttctgtctaaactggggtcactgttgcatggaacattgttcttaatagttgagaattgcttttttgaaaattttcatgaaggaattttggtaatgactttgcttgcaggttttttggggtgttttgagaaagtggcatggaaacatgcagtagttaatgagtttctcttggtactgaacactattagaatatcattagtgatattttttctctttagagcatttttaatgcaactagcccctatattttaatgtaagagttactctgcaatctaagcaaagcacccaacaatggtaaatgttttttaaaaatgcagaactaagatttttgactctaaagagagaaaattacaagggtgttgccttatagcaaacccttgggacaatccttcatgtgagcaaagtgttgatcttaatattggttgtctgtggtgtgcttttttgtactgtaaaaatatgtggttcatgtctaactctgctgttttattgtggttgtggttcaagtttttaatgtttaaagttgatgctgttttcagaagagctttttactaatttatttgtcagtgttccctatttgttacttaaccatgatcctccagattttttggagtattcttttctaaccttaaccctgccaaaccttgatccattttgacatttgttatgcactatttttatatctctgtgagagatttttccaacagtcagctattttatggcacactttttttgactgatgacatctcctttgctatacctcaatttttggaatttagagaagaaatcagtagttttgcaatgttaattatttagatatttaatttcgcagatttttaaactttattttcataatttctgcttaatgtttaaaattgaagagccttttcatgtattaaataatgaacacaaattatataattaaaataattggagatgttgaaaatcattttcccttcttaaacagaaataaatatttggaatgaaggggaatgtactagaacaccctttttgccacgggtaaaaataacagaaatgtatggtttgttttaccttcatttctgtacaagtaaagcttattagtctaatgttttgttcctttcccacctcacccctacctcttttgttttgttttgtttttgccctttatgtactacattcttattttctaacttttaaacactgtattggaggtttttttttaatttacagatcatatttattttactatttttgtagaaaattattaattttgattgtatttttgtattttaaaagcttcttcacttgtgttccctaaatattcatattgctgcccaaaagtatgactgtggaggaaaaaaaaatactttaaaaatccacactttttgttaagaaggaaacatttagcatttatatatttgtgtatggaaaacacttgatattttatccctgttgcatctggctgcacagagcctctcctcaaagatgctacaaaacttgaatataacacattttggaaggctgactaacctcgattctgtgttgtgatgtgcaatactgtttctaatgtttgtataaaaaaaaacagtgtaaacctttttaatgcaaatttatttttttcattgcatattttgcagattttatccacagtgtcattttttactgtcagaaaagataccccttttgtcattgcaactattttttaaatccagaaatctttgtactgatgtaaatgattgtagttattttggatagtgttttgctaacaaaaggagagacttttttcatgcatatttctattttgtttttttgggttttattttattttaatagtagtaaaatacttggaataatttttcatattcttgtcattaatattattttgtatttttatgtggaaatatataattttatgacactaattgctaaagtttattttatgttgaattatttttggagctgaaatctttgtaatattaaagcaactagtttctaattcccagtttctgtatagaatcgcacaagtggtttatggagtgtttggattgtaattataaatggttctttgatatgcaaattaatattttcagttgattttattttatattcctaatggggtgttaaagccgttttttatttttttctaaataaaaagagaacccatgcttttatggacactaggtaaacaccttcagcttaaatttttcgttaaatattttagtttattttattgttatcttccaggtgtctaaatctccagtctgtctgttgtactggtaatttaactctgtaatggaatagtttgctgccaactatttatattaagtaatttttaaatatttgtaatattgttgactgactaataaactattaagttattggcata

SEQ ID NO: 392 - DNA, 6188 bp, Homo sapiens
aattgatgatcggacacgctgatttcattgtctgaagcggcactggagacccaggaaaaatctcgctgaatccgcctgccccagcagcggcctgatctgggttccgctgattcctttcgtaaccgcaccacacccgagctacaatctctggacaaaattttaagagaaactccctcagaactcctaaaggtaaacaaaagcaggcagattgaggatggcagtcagaatatgaagtgaccatatatggacgtgggttggcaataagagaagaaagatgagtagtaagaactctgaatctggaacagcaacaacaggaacctctttgtcagctccagacatcacagtcagaaatgtggttaatattgctcgaccctcaagccagcagtcttcttggacatctgccaataatgatgtcattgtaactggtatatacagtccagccagttcatcaagtaggcaaggaacaaacaaacatacagacacacaaattacagaagcacataaaatccctattcagaaaacagccactaaaaatgatactgagtttcagttacacattcctgtccaaagacaagtagcacactgtaaaaatgcttccctactcctaggtgaaaaaacaattattttgtcaagacagacaagtgtgctaaatgctggaaactcagtattcaatcacgcaaagaaaaactatggaaactcttcagtacaagcttctgaaatgacagtacctcaaaagccttctgtgtgccaccgaccttgtaaaattgaaccagttgggattcaaaggtcatataagcctgaacacacaggcccagcattacataacttatgtgggcaaaagccaactattagagacccttactgtagaacacaaaacttggaaatccgtgaagtgttttcattggcagttagcgattacccccagagaattctgggaggaaatgccccacagaagcctagctcagcagaaggaaattgtttgtccattgcaatggagactggagatgctgaggatgaatatgccagagaggaagagctggcatcgatgagagcacagataccaagctattcgagattttatgaaagtggcagttcccttcgagctgagaaccaaagtacaaccttgcccggaccaggaagaaatatgccaaattcacaaatggtgaatattagagatatgtcagacaatgtactgtatcaaaacagaaactaccatttgacaccacggacctcattacatacagcatctagtacaatgtacagtaataccaatccattacggagtaatttttctcctcattttgcatcatcaaaccaattgagattatcacaaaaccaaaacaattaccagatttcaggaaaccttactgtgccttggattacagggtgttctagaaaaagagcactacaggaccgcactcagttcagtgaccgagacttagccacccttaagaagtattgggacaatggcatgaccagcctgggctctgtttgtagagagaaaattgaagctgtggcaactgaattaaatgttgactgtgaaatagttcggacttggattgggaatcgaagaaggaaatatcgtttaatggggattgaagttccacctccaagaggaggccctgctgatttctctgagcagcctgagtctggttctttatctgcactcacaccaggagaggaagctgggcctgaagtaggagaggataatgacagaaatgatgaagtatccatctgtttgtctgaaggaagctctcaagaagagcccaatgaagttgttccgaatgatgcaagggctcataaggaagaggaccaccatgcagtaaccacagataatgtgaaaatagaaattattgatgatgaagaaagtgacatgataagtaattctgaagtagaacaagtaaactctttcttggattataagaatgaagaagtcaaattcattgaaaatgagctcgagattcaaaagcaaaaatactttaaacttcagacttttgttagaagcttgatattagcaatgaaagctgatgataaggaacaacagcaggcactgctgtcagatttacctcctgaattagaggaaatggatttcaatcatgcctcactggagcctgatgatacctcattcagtgtatcttctttgtcagagaaaaatgtctcagaaagtttgtgatttcagttggagggaatatatgatacagtcttttggcttcgtaacaggtgtgcatttcaagataactgcattctgttgccctggtattctttagttgggaaaacacattgttgaaacggacgtattctgtgaagaatgtacaagatataatggctacagtgcaacaaaaatgtaggtgaaatttaaaagcattgtttgagagagtatttttttaactgatggaactctggaaaaaaattatatttaagtttcagcagtttaaccctgaaattcattatgtctaatttctaaccagagacaaaataactaaagacatttcagcattgcttatcaagttgctacagcttgattagtcttgtttttgtagccattacatcttctttcttcttctctccttttcctatcatccacttacactttttctcaggaaagtggactgaacatttaaaacaaaactttaaaaaattatttaactcattatttaatgagttctctgatttagtttttaacccctatgaaaatttgacttaaactaatgactgaaaattaaatgattacaggtatgtaattgtaaattgctggtgttcttctattatctaacccaaatatttgtgtgggggtggggaagcacaatggaaaggtaatttaaccaacataacgtcaaataaattacgaagtgtacagaaacaaaatgttgtcaaaattagtcttgatggggattcttcattactacaaatgacaagtattgatacgattgacattccagtagtaaatttgtatacctgggttagatgaagtgttacacaaatattttaaatttatcaccatctttataattcttttttagttcttacatgttatgaaacaggaagtcaaggtaagctgctgagattttttaaaaatttagtcattcagctttgccacaaaatttacctcatttccatatgaggcctgtacagagccatcagccaaggatagtattcaaaaagagttatactactttggttgtaaatcacagtcttctgaattccatgaatactattctatgagtacacacctaaaatgggcaagctacccagttttctattattagtaggtaccagatggcaacacactgtagactgttctttgtagttcttcctttctggagtaccagatggtattaccaagacccatagaagaaaaaatgtcagtttctccctaagcccacagtgtcatatatttgtgacttggcagtgtgcaattgtgttgcatggttaaattactatctatacctaaaagattaatgaagtagctggatggctgtttcagccatcaagtttctgtttccaatttgtttttaatttttgttggtacctagtaggtattcagatatttttaaaaatttgtaattagagccaaatttgatcttgaaatttactagtactaacttatgaacacagaaaggcagtcataaatgtctttacccttgaagtgtcccatcctcccacacacacaaataggtaagctcccactgatagtctttcattttgtcacttatttgtttatattgctgccatactactgatatggtccctttgttagtaggaatatttcagtgttcagatatgcttccttgagccatatggagttttgcaaacaatagttagtttttcttgctgacaagtcaaattccattcagagaaagcagcagagagtaacagagcctcagatattacgattaaatgtaccagtcacaccaactcctccatgagatgaagagtcgcccccatatacaacgaagttagaaaccacttattaagtagcatgaacaaattccaggccttcaagtctctcctagggtctgcttcatagtcattgagtttatctttcaaatataattacttctgcttcaatttaagccccttcttatttggttctcattgcaaattaactataggtatattctctcctacagcttttaacactatagattttatttgtcacgcatcagccattagtcactaaatcgaaaaatacttgttgagctcctgctatagagaagacactgtgctggacattggatttctcagcaagctgtaaacatcacaaataattatttctttttaacatcttctatgatattaataaaccatatttaagtagaatttttaatagatttaaggttctgctaggtgtgattcttagaaggattcctagtccacaattttgagagaaagcatagatgatctttttgtctctgtttaacatttcatcaaaatagaaactatataaatcataacaatacatttagaactccttttgtcttgaaatttgtgtttcagcaccagaatatttttcttcaccatcattggaattaaaacacttctaaaatgaaatgtggctattctgtagcaggaactgaaggaaatacctctatctatagaaaaagaatcataattgccagattgaaattattcatggtagactttgaaaaagatgtcaaggtcaagctttgaaaagttgttatgaagaaagtatattttttacatatgtagataggagttggttttgagatatgttagagcaggaaaaattatcagcttataattactcttgtggacatcttcatggctggggataaaaattaactaactagtgtttctttctttagggctttgagattattaaaacagaccttactatctgaaggctctctcagggagacagaagccaatgtggaaaaaaacaaaaaacaaaaaacaacaacaagaaaaaacttctttttttctttcaactacatttctatgtctgctttaagcttagaacagccaagcagtttttaagccagaaatgtgtatgtaagagcacttaccttccaaaatgtgtacatatgaaaaaaaaaggaaggtattttcttcttttcagccaagctaaacttattcacaagaaaatgagaattgcaattgctctggagaataggaaaattagcacatgcaaagaaaaccttaaaagaaaattggcctcttcatggaaactggggatgttttgtcctaaggtcagttatcaacagcaggatttttgtattgccattgcaagcatgtgatagaaatgtttgttattgttggagaagaaaaggctgagacccaattataccctgtactctttattcgaccaagacctcaaaagatgtcaaagaagccatttctccaaagacagcaacatctattgtgaggcactttcatattcagcagtctgtaagtttgtaggagaaaacataagtggttaatttaaaataattttgggctctaaaatggactttgttgccttttttggtgggggtggtgggaatcggattcagcccatttccaagggatagtttcttcatctcagacaactattttgtgatcctttttaaaagacattctgaaaactttaactcctgcccttcttccgtattacagttgtgttattccagaaatattgtctacttttttaatatattagattttcattcagatcttaaacatgcaaacatgtgataggttagctttttaagggagttatcagtaccactgtatctaaatgttaggtaaatgggtagatttctctttgaagttggtattttccttggcagacagcactgtatcatgctcttcaccaagctatgctctgtaatgctataatcaaggaggctactaacttgtgaacctacagtcaacacaccattgctgaaaacaaactttgattaagaacagatttgctagggggaaaaaagagtaaagtgatattttcaagcaaatataattaaaattgtttcattaaaatatatactgagtgtatattgctccacactgaaattttattttgcattaacttgttaagtaattcattttagcaatcctgcatcccattttactagtactacctctgaaatatactgtcaccttaaaaccacatcagactgtaatgtgaatttttgtagagtttttatttaaacttttatagaggcaataaatgatttccaactaataga

SEQ ID NO: 393 - DNA, 3677 bp, Homo sapiens
atatgaatcattactccttacccaggcagtaatgttcccgaagttttctcttcgttctatgtttcatggagctggaggagggaatgatattcagtggtgtttttctcaggtgaaaggagcagtagatgatgatgtagcagaagcagatataatttctacagtagaatttaatcattctggagaattactagcaacaggagataaaggtggtagagttgtcatctttcaacaggagcaggagaacaaaatccagtctcatagcagaggagaatataatgtttacagcaccttccagagccatgaaccagagtttgactacttgaaaagtttagaaatagaagaaaagatcaacaaaattaggtggttaccccagaaaaatgctgctcagtttttattgtctaccaatgataaaacaataaaattatggaaaatcagtgaaagggacaaaagaccagaagggtataacttgaaagaggaggatggaaggtatagagatcctactacagttactacactacgagtgccagtctttaggcctatggatctaatggttgaggccagtccacgaagaatatttgccaatgctcatacatatcacatcaactcaatttctattaatagtgattatgaaacatatttatctgcagatgatttgcggattaatctttggcatctggaaattacagacaggagttttaacattgtggatatcaagcctgccaatatggaagagctaacagaggtgattacagcagcagaatttcatccaaacagctgtaacacatttgtatacagcagcagtaaaggaactattcggctatgtgacatgagggcatctgccctctgtgatagacattctaaattgtttgaagaacctgaagatcccagtaacaggtcatttttttccgaaatcatctcctctatttcggatgtaaaattcagccatagtggtcgatatatgatgactagagactatttgtcagtcaaaatttgggacttaaatatggaaaacaggcctgtggaaacataccaggtgcatgaatacctcagaagtaaactctgttcactgtatgaaaatgactgcatatttgacaaatttgaatgttgttggaatggatctgacagtgttgtcatgactggatcttacaataatttcttcagaatgtttgacagaaacacaaagcgagacataaccctagaagcatcgcgggaaaacaataagcctcgcacagttctgaagcctcgcaaagtctgtgcaagtggcaagcgaaagaaagatgaaataagtgttgacagcctagacttcaataagaaaatccttcacacagcctggcaccccaaggaaaatatcattgccgtagctactacaaacaatctgtatatatttcaagacaaagtgaattagggttggcattcctagcagaagaacccacttcctgcttagttgagatagttgaatctagcattcgttcctataaaagagagaggtccattgtggcgcccctttccagtgtttgacagtgtgccattcgacaacacattgttatagctacatggagaaagctctgtggattcatcactgtggtgttctccatgtctgctagccatttaggtaagggtagggcacttttaatttaaatgacttcttgcaccatcttgcctaatggactagattggactgtatcaacattgatttactccactttttatgccttccattgtgatgacgtcaaacacagtgaaagccttcagtcatgctatgggatttaattgtgtatcctcattactgtatcatttgtggggtacaccccttccccctttttttaaattaaatacagctcattcttactgtggcttgtagcattcctcctcttctggcctcctggactgctccccttcatctcttacccttgccccctccacccggtcttggtggtggtatattaaaaaaagaaagaatgaaagcacacaaaatgagtcagtttggggtcagtggtataaagggggtatatgttgcaaacaaatgttttagtaacagttggctgtaatcactcctcgccgtgtctggcactgaaaataaggaaaaaaaacctactactgaataaaagtgacaaagaatggagaatctggttttctttttctttttaacctacctcttgtagccaatattttgtgtcatacctttgggcacagtgaaacaaaatgggttttcattgtttattggtatttttgttaattatttttaacaagtgttcttttacatgcaggaggagaggtattggttctctatgaacatattttgaatataggttttattaaggatttcacaatctataaatgctactagtttttttttttttttttaccatcatgagggtattggatacattgtgtctctatttaactcattatgtgttaatgaaattgttgtaaatgggaaccaaatttgtagaacttaatttctactttttagagtgcttaatttcatttttgccttactaaatagtcaaagacttataaaacatttttaacaagttagaacttttttgttattcagtcatataaaatagcagaaaactaacatcaagtgacactgcactaaatactttttttgtattttactgctatcaaatcagaatgaaatatactttaccatagatatttttcttctatttttggttttccaaagctatatgaaagacaaatttttaaaggtacagcgttcaaaaagtgcttaatgaactccaacagctgcctcaaataaaaatctgtatatgaatacattttccctaagcggtgatacattatccaaagatgaagagtgctcctatttttaataggtagaatgtacctttgtcagtcttgcagaaactttaatggagaagaaatggactttatttttgaaaggtgaaatgaacaggcatttatattattagagaatggtagtcttattttggtggaacataatgtaacaaccttgaatttcagaggactctgagtgcttctatgtccactacctattgttctattcttcaataatgaaaaagaattcaacgagccgaccgtgattccctctactacaaatattatgtcttgtaagttagcatttttagcacacaggagaaattttatgtaataaaattactgtatcttttggatttaacaaatttgtatttgaaacacattctatgtctgataattcttaatggcacttttactaatttatttggggatcttgggtacattcttaatttgtgtttattcttcacgcttgacttgcaagtgggatattcccctgccacaagtgtcaaacagtgatattcttcctgtgttgtgactggacagttttccagatcttttttgggagattttcctacagcttggttgtatgtcttgagataacaccaccaaacagctctcagaaattcttttttgattgatcagtagctatgatgattctcctccatgacactaaggattagtttatatatttaagagaaataattgctaaaattaaaatgcctctatcaaggaatgctattataaattattgttaacattctcaagtattaattttttaatttcattggtgtagcaaactctaagcccagccactcattttacatggccatggttaatctttttattaataaaaattatacttagaataaaaaaaa

SEQ ID NO: 394 - DNA, 6384 bp, Homo sapiens
agcttgtccccgcctagcaaggagtcggctaagaactggatcctagcgaggagcccggcacagacagcgaatgaccgcagccagacagtcgctcttgctcttcctcggccctgcggcaggatccgccggtgcaggggcctctccccggactccacgcgtgtctggagggctctcgggttagggaagggggctttggagacgccccgggcggccgggcggtggcgggacgcgggccctttaagaaggagcgaggggcgcggccaggtaggggcgggtccagggcggatcagcgctgcgccggcgccggcccgggagccggatttggagcgcgaggcgccggtgggggcggagggggctgcgcggcggaggctcccgtggcctcggacgctcctcctagctagcggccgccgcccgccgccgcctgcgcctccagctccttcgccccggcgggcccggccgccgcttccggcagctcacctgggaagcgctcacctgggacgcgctcacctgggacgcgctacctgcctccgggcgcctgggcttcaggatgaaggaccgtctggagcagctgaaggccaagcagctgacacaggatgatgatactgatgcggttgagattgctatcgacaacacggcttttatggacgagttcttttctgagattgaggaaactcggcttaacattgacaagatctcagaacatgtagaggaggctaagaaactctacagtatcattctctctgcaccgattccagagccaaaaaccaaggatgacctagagcagctcacgactgagattaagaaaagggccaacaacgtccggaacaaactgaagagcatggagaagcatattgaagaagatgaggtcaggtcatcggcagaccttcggattcggaaatcccagcactctgtcctttctcggaagtttgtggaggtgatgaccaaatacaatgaagctcaagtggacttccgagaacgcagcaaagggcgaatccagcggcagctcgaaattactggcaaaaagacaaccgatgaggagctggaggagatgttggagagtggcaacccggccatcttcacttctgggatcattgactcacagatttccaagcaagccctcagtgagattgagggacgacacaaggacattgtgaggctggagagcagcatcaaggagcttcacgacatgtttatggacatcgccatgctggtggagaatcagggtgagatgttagataacatagagttgaatgtcatgcacacagtggaccacgtggagaaggcacgagatgaaacgaaaaaagctgtgaaataccagagtcaggcccggaagaaactgatttcactccagactggtgtggccacccttgtcttcagatgagaatggagtctgaatggccttcctgagagcgagtgcgacccgttcctttgtttccttgcaaccacccttggacctgactcagctaacaatctagccctgggggaatgtgatctacctgatgcgaccctgagttctccccagagcctcctcctgccccaccagctctcaagtaccttttctcctggactgtgtggacccacccagctttcttcctccctgttgtgtgtcagattatgccttgcacttgggaaagctcttgtgagactctcccaaggtgctgtatttttctacctcatggagtattctcccagaaactgcaatgtatttttttaggggagtatctttaacaaagcagaatgattcttctaagtttggcaacaagaaggcttggatctgagtcttctacctggcaggatgccaatcctgtttgttgtccgtatgtcctgaaaacatgagggactggcagatgtcattttggtctaaagagctgacttgtttgaaattcagccttaaattaagctcttagttgttcagcttggggggcaactttgatttttctctgtgttgtagtctctcatatttactcaaggagggaccaggatgatacagtcatctgaggttatgctttgcaaaaggctgacggtatggaatatgtttccatgtctgagtcttagaaactggctgctcattgttagaaagtgatgctttgtgagactattgtcttggggccaaaaataatcagggattttaaattgggcaagggacaaggtgctagaatcctaagctctggaaatatttcatgacactggtgtattcactcatgtgttccagatgtattctaattgtgtatgaaatgtatgtacacataagtgtgtgtgtctcaggaagtaggaaataaaaatggaagctattatgacctcaaaaaaaaaaagccaactttgagctaggataaaaattgggtaaaggacatttgcttacctgcaaatgaatcactgtggaaatgtgatcttcccatatcatcaagaaacttgttttctggatgaatactgggagaataaaatgagaactctggagtgagctaaattgatcccaattaagtttttctgcttagcagacagaaggtataattttttgacaccctttcccacctggtgcctatgctaggcttgtcctgagaacatccctcagtaacttgatattcacatgacctacaggatgtcccatctgcagggctgagtcagttggggaacaccagaggctacacagtagctcttcctgctactcggttaatgagcttggcaggttctttgtctcactgaattcttatcatggaaacagcagcagcagccgctaggaaatcttcaagtgtagtgtctgtgctaacccagtggtaaatcccttagatcccctgctggtctctggcagtctccttgattttgggtaccatgtatattttccgctttgactttaacgctttctaggatagggtaagcacccttaattcaggcactgtccattagcttcctttgcaaaggctacttatggccggtcacaatccagcactcagacagagccaaggcaatatcctcttgcccatggctatgatgtcagacagtggatgggctccagcaacaagagacaaaataactaaaggcctttgctctcctctgacattgaggcctggggcttacagtttggaatacaacatgtgaaggtttttgttgttgtttgtattttttagatgtaaacttgattattttattgctaatttaaaaataaaaatgactttgtattgattgtgaaacggttctggctctgtctcgatgcagaaacacaatgatctggtgccaccatgtggtgatttttattcaggttttagaatgcagttcacacctttttaagccatgtgctggatcagatggttcaaaagtgcaatttttgaacatggtttaactcccacagaatgcagtgtaactatgtttgtgtttcagatttgaggtgttccccccaaaagaatttggttcagtccttgggagtatctggctttaggaggaaatgggggagatctgtcacgatgttatctagaaggtggaatgaccataccaaacatccttttaatctaacttgaatgtctcaccaaaaataacatttctgttggcattctgggtcctagaagccagatccatctcctttttccttctgttgctctcttccttcacaccctcttccatgtccacatgcacttatctccctgcagaatactttttgcgatgatgtttctcatgtattctttctttccttgtctggatgagcagaagaagatcatgatcatgatctgctgtattatccttgcgatcatcttagcttccaccattgggagcatatttgcctgaaaaaggtgagccatctgtggggagggtcagaccttctttcactgacttgaaacctttgtgtcttgggggcactctaggtgccttaatctgggtgggattaggtgctaataatggttagagaaaactaaagaaagggatgtttcagagacagaaaagtgagtgaagaatgaactgttagtaggtagtctgtgggaggaggggggagacagaaggtggcaatctgtcctataacctggtgtggcagaatgctttgtacaggtgaaggatagtgattcctgctaaacagtttgagccttggtatctggaagtgacaaaaagaacaagaattagttcttgcattaggtgcatcttgaactttttggaagagggccggccacacagtaaattcaaattaaatttcttccctttcaaggttaatgaaagttaacacagccttgtatgtagtcctttaccccgggtaagagggatttggtgatcccagccacgaacaccatgctatataatctatgatttttttcctccatttttctgttatctcccacagccctcacagattgatcgactggcatttctaatcctccttccacttctgtggtaccatcacttctccacgcagactcctcatcagcttctcctctttccattatgaaacttcttaagaaacagggcaccaatcaactacttattaagaattatgcaaagaataaacgtatacagaattgggcggaggacagggacagggagtacagatacatagctgattaggcagatggtttaaaggaggactgcagggtagagaagcaagcagagtgggcgcctctttaggaagtgacacagcctgcatgtgcagtatggctgtgaaggggcagatatcatagcacacctaactcaacaggatcttacttgaactgctgtgagttggtcaagtcagggcacttctgctcttcaggctcctctaggtcacacctttgaccaccctacatctgtttcctctttcaggctccagtagtagtcttaaaagtgaagtttatctaaggataagcacatgcctatcttgctcactgctgtgtccccactttttagcacagcgcctgctgcttacaggtactcaaatatctgctgacttaattacttataattaagctcttatttcagtcatggacaaatccttgggtttgactcctaaactctttaaggtaccaatgagaacgtggtttgttactgtcagaggctgtgtaaagccgcttgggaatgggctgatctgcttatgcaaaaatgctaccaacctttcaaaccccattaccacaacatgaaaatttaaagtgctttttctatgggtggtgatggtggagttctagcaacagcctcttaatctgtggagaagatggctggctccaggactgtggttcaataacgaaatacaggcccacaaaataaaataggtttatagcatgactgaactcacacatcagtagaacactctgtgaaccataacaaagaacagataaaggtgtcaagtgagaaaggtgaaatgaggttatcactcacttcacctctcacctgatttgtgttgctagctgaaactgctggccagtaacgtatgtataagaaactgttataggccgggcacggtggctcatgcctgtaatcacagcactttgggaggccaaggcaggtggatcaccagactgaccaacatagtgaaaccccctctctacaaaaaatacaaaaattagccaggcatggtggcttgcacctgtattcccagctacttgggaggctgaggcaggagaattgcttgaatgcaagaggcggaagttgcagtgagccgagatcgcgccactgcactccagcctgggcaacaagagctaaattccatctaaaaaaaaaaaaaaaacaaaaaaaaaaaactgttcttaatacttaatactgtccccaattccattcaaggttcagttgtgttcagctttaaaaccagctatgtgaatgtgagttctagtgcagattatttagtgattatgtaactaaaattgatgaaaaaatcacactatacaactgtgaggagcacacaactgctaagtttgtacttttgaaagtaaattattctttgtttgataccttattttttaagaaagtgggattaaaaatattttggtcagtgctgttttctacccaccttcaaaagccaatggtttgatatttctattaatttgtgcttcctttagttttaataggggatagaagactgcagctggttgggtctggaaaacattaatctgggcaaacggagctggagctatgaggatctgagtcctagggggccctcattcactagcagtaagaatttaagtggtgcatggcacatagcactgtactagattctgcaggggcacaaacatagagccaaacactctccctcttggagaatttcagacccagaaaaggccacgcagttctaacttttgtcatcggttccttttgctaaaaggcaaagggtatgttccttgcctattgtccaacataccccttccaagattgtgagaagatgggtagctgggcatcaataaatattgaatcaattgacctaaaaaaaaaaaaaaaaaaaaaaaa

SEQ ID NO: 395 - DNA, 7201 bp, Homo sapiens
agagcagtatctcatttctgaacacctggattgtagctttcccttgactgtcaaaggaggtggttttaaaaatcaagccaaacaggtttccatcttttaggaagaccctggaacgtgccagttgattctgaccatttctcatgaacagaaacacctaggaagggagaactgggatttatttaatggggatgtgttcaaggcaagagcgaattcagaaggatatcgacgtcgtgatccagaagtccagagctgagaaggactgcctgtttgcagatttcagatactctgactccacctttacttttacctacgttggcggccccagaagtgtatcctactcagtacatgtatctgaagattacccagataatacatatgtgtcaagttcagagaatgatgaagatgtgctagttactacagagccaataccagtaatttttcatagaatagcaacagaattaagaaaaacaaatgacattaactgttgcttatccataaaatccaaattacaaaaggaaaatggggaggaatcaagacagaatagtacagtggaggaagattctgaaggtgacaatgattccgaagaattttattacggagggcaggtgaactatgatggggaactgcacaagcacccacaactggaagctgatttgtcagcagttagagagatatatgggccacatgcagtttctctcagggaatatggagccattgatgatgtagatattgatctgcatatcgatgttagctttcttgatgaggagattgctgtggcttgggaagtaattcgaacagaacctataattgttcgactacactgttcacttacacagtatttaaatggcccagtgcccactgttgatgtctttcagatttccacaaaagagcgatttggattgggacatcagctgaaaaaaatcatgcagacatttgttacacagcagtggaaacagagcaaagaaaaatccaattgcctgcacaataaaaagttgtcagagaagaaagtgaagtctcccctgcatttattttctactttgcgcaggtcgccaagttatcctccccctggttgtggcaaaagcaaatccaaactgaaatctgagcaggacggaatctccaaaacgcataagctgctgcggaggacttgttccagcacagtcaagactgatgatgtgtgtgtcacaaagtcacacaggacctttggccgctccttgtccagcgatcccagggcggagcaggctatgacagcaattaaatcgcacaaacttttgaaccgtccttgccctgcagctgttaagtcagaggaatgcctaactctaaagtcgcatagactattgactcgatcttgttctggagatccacgatgtgagcacaacacaaacttgaagccccataaactgttaagcaggtcttactctagtaatctcagaatggaagaattatatggactgaaaaatcacaaattgctcagcaagtcctactccagtgcccccaagtcatccaaaactgagcttttcaaggaacctaacgcagagggcaggaggctctctcttacctcagggcttattggtatcctaacaccatcttcatcttcatcttctcagcttgctccaaatggtgcaaaatgcattccagtacgagaccgtggcttcctggtgcagacaattgagtttgctgaacagcggatccctgtattaaatgaatattgtgtggtttgtgatgagccacatgtgtttcaaaatggccctatgcttaggcctaccgtatgtgaacgggagctgtgtgtgtttgcttttcaaaccctgggagtaatgaatgaagctgctgatgaaatagcaactggagctcaggtggtagatctactagtatccatgtgtaggtctgcgttggaatctcctagaaaagttgtgattttcgagccatatccttctgtggtagatcctaatgatcctcagatgttggccttcaaccccaggaaaaagaactatgatcgagtaatgaaagcactggatagcataacttctatcagagaaatgacacaagcaccatatctggaaatcaagaagcaaatggataaacaggacccccttgctcatcccttactgcaatgggttatatcaagtaatagatcacatattgtgaaactgccagttaacaggcaattgaagtttatgcatactccacatcagttccttcttctcagcagtccaccagccaaagaatccaattttagagctgctaaaaaactctttggaagcacctttgcatttcatggctcacacattgaaaactggcactccatcctgaggaatggtctggttgttgcttctaatacacgattgcagctccatggtgcaatgtatggaagtggaatctatcttagtccaatgtcaagcatatcatttggttactcagggatgaacaagaaacagaaggtgtcagccaaggacgagccagcttcaagcagtaaaagcagcaatacatcacagtcacagaaaaaaggacagcaatcccaattcctgcaaagccgtaacttaaaatgcatagccttatgtgaagtgatcacctcatctgacctgcacaaacatggagagatatgggttgtccccaatactgaccatgtctgcacacgattctttttcgtctatgaagacggccaagtgggagatgcaaatattaatacacaagaaggaggcattcacaaagagatcctccgagtaattggtaatcaaactgctactggttaaaggaccaccatttaattaacatgattcgaaagccttcctcgggttcaaagctggattttgaactgaagaagattataaaattatttattgttattataaacaaaattaaccctttgaatactgattttttttcttagtatttctaagtatctcattaaatacctaaaatggtataagatttatcaattgtagggttatggaatctagtaataaaatttcaacagcacttaaactgaagtttgggttgctcatacaataaacagattgaaaaaactgttttgtgctgatatttttatactaaactctttaactggatatttggtattatataccgacattttaggttaccaaaatagaattgagaacattttataatggcatctaaatctatcagatactttgcaataagtatactgtttgcacattctgatgtgctatatcattagtagtatgggcattctaatgttttggaaggggtgttccctattctatttttcttcataaaaaaagaagtaggtcttagaagcagtgctttgccaaaaagtatgtaatatacacatctatacattcatgcatcaaaatgtgtggttgtgaatatatttgtgtatattcacacgtatgttttgacaagaaagatggcttagcttcacaattctatcctcgtttaatggaaagaagataatatttagtaagcaataaatttggacataaatcaagatatgagccagatttaccaccattcattcactgaaaatatttgcagacaatttttctgtttgtctgaagaaattcagcccttttaaaatgttatctaaaagtcataatttggggaacatacatggcctggtagaccgaatctatattcaaatgattatgtatttaaaagaaagacctcagaatttaaagaaaccatatatattttttatttactacaaaaaaattatacaattttatttatgccacaccagcatttttatatttgttcatctaatatctctgcttatttttttcatattgagaaagaacacaaacttgatgcttcttttatattaaaagaccacaaataagtttatagagaacagtaacaccagctctcagcatttccttttcaagagtcataatttcatcaaaatcatttcttattctttgagtcctagagttcttattcatcaagttttaattgacagtgtttattttcccacatgttgtctttggaataaggccattcatgaaagcagtttaattagtgagtctgccactctattcaaaccctgaatcaaggctctatctgattttaatttatgtaaaaaaaaataaaaatgtatagtcatttgcaagtataatgtgataactgctgtgtttatttcctttgtctggcataaaaggtgagaaaaaggtcatacatgttgttaagggtagcagtttaggaagtgttttctaataatttgttttgttatattgcaaataattgatatgccacttatttctgcaagaaaaataggcttgaagtggttgggatattaatcattttgatagtatctacttaaagcattgatctgttttgacttgtggctctgaaccctgggctaggctgagggataatagtagtggagtagggcaaagatataatatcctatccagtgttttgtgaccacttatttgaagattagtgtgggacatgaggaccttgctacttttttgccaagatgctgcaagtctcccaaatcacttcaactgtgtttttaaaacatgtttaagcaacagaattatttttttgaaattagtctatacgttagacagtctatacatgacaaacatgaagatctaatatcaagatttgggagacgggatcttggaactccacctgtttgaccactaggaccactgaggcacctccaataagctctgtagagtgcctccagcataattcaaaatccactgacctaatccattatggctttacttaacattggagtgatccgtaaagaatatagtattggagtctgaactggaacggtaactcgtaagactcaagaaagaccgtttaaggaaaattggcataatacaaactgttcctgttgacttaagaataacagtaggttcacctatctgaggaaattaagtagttgatagtttaatgctaggcatcttttatgataataaagtaagatgtcttcttatgacagttaattgagttgtatcatgatacagaatgacagattttgtttcaaacaattgcgtcagaacctttgtaagcaaatattctaaggagaatcaatcttattttttaattgaactttttgaaattagggatactataataactgataaagatgaatttctgtgtttctaaagaatctaatttcaattactaccattaacatataaatgtgcttccaaaatccaagcaggtccatacaatttagagatttgaacactgttatcatgctttaattcagtcattcattaaaatattatctattcacttatttgatgattccaaacatttgatattgtattgtgtttttataattatttgaaatctgttcaccaatgctttgtaatggttttattaattgtgtagccattgctacttagatagtaacccactgagcaaaggcagtcatttattttcatccttgaagtaggggaagaaaattattaatttattagttctactttttcctgcattgcttattttgtaaacattttactatgaataatctgttctctttcactgtattaaaaggagaagaaaatgaacatttgagaatggaaaaaagtaataatatacaaataatctagtgctataaaatgcattatagtaagacacttttggtgtcttcgagtgcactatgttggaataaattttatacttgttgcttagtaaatctcagtcatacgtttggtttgaagctgtttttttttttaatttgaagtttaattttaaaagtgccacattgtaaaagttaccgttaaatactatgtagtataaaaaaccaacccaagctattgttaatgctctgaatgtttttctttgaaaatttaagtttagagaagaaattccttcatttttctcccctttgctaaaagaaagaaaatctataatatgtaagtctatgaatctttaaataactgaaggaattttagcagtactttgtataataaaaatattttttaaactataacttgccttagagcatggggtttcagaaagttttgacgaaaaactcatcttcattaaagagtctggataacttcatcagatggtaatttaatatgtcatgaaggggacactcaacattgggtcatctaccgtctaaataaatacggatttcatggtggcatttgaagcacattttgcaaacattatgatgttctattgtcttgctgaattctttattataacactacctcaagacaaatgatagactgttggtaaggtaaattgggttttcaatgtcaggaacaaataaaattttgcaaatagaagtcatcaaataattcaacaggaagaccatactggacacagatgttgtcagttacttctggacaatgtggtaacatggatatttcagtcactggtaacaatgtcagggttaacacccaatgaattatttgaaacaatttgggttgcaaaatttgaaattaattagtctattttgagattgattttctacgtgggccaattttatgtccattacctaaagccacaatctcccgctctaaggagttaaaggatgaaaacacccaactgctacactggaatggcagactggatattcaagcattttggcatttaatgcctgctaaatttttgtccgattatatatagatttgatgtatattattacccagtaaattcttcttgggaattttgtatacattatggaatattaggataagtttttgtaggtcagaagaatttcaagtagtttttagacaaaacatatccatgagtgtgaaaaaagctgtgttgacgaatagattacatttcacatttaccagcaagtcagtaaaaaatagtgcttatttacatagtcaatataatttaatgttctaaaaataatatcttcgatctgcccaatatttaatgtatcatttgagatttttaaaaatgcatccgctccattatgtaaacattaagatatgcctatgtttctttaactatacagcctctttacaataaatttcttgatttttgtgcacaggatagtattgcaacctgctatttagcctttggtgccttagaattattataaatatttaacaatatgtacataatgtaaatactgccaagagatcagtaaggccaaatattttctctattcactttttattgctcttgctttctattgctactaaagcctcttttatccagctttgtaatagttccaacattgtagcgaatgtaaatgtttactttcaataaatctgaacttgttcaacaagta

SEQ ID NO: 396 - DNA, 9571 bp, Homo sapiens
agtagggaggtgggcaggagccagtgatgacggaatggcaatcacatttgacctctgatctgtttatttcctcctccttgacgtctccatataaatgttacacgggcatccccacactcggatacgcacccacagtggctgattcgggggtaaccgtgtcatttgcttgcaacactggcacctctgccctgcaccccgggagtgagcagtgagtgaggctcgggtctgggcgctggctccgaatcttcgggctgggagagactccaccatctgggggcggcctgggggagcagccttagtgtcttcctgctgatgcaatccgctaggtcgcgagtctccgccgcgagagggccggtctgcaatccagcccgccacgtgtactcgccgccgcctcgggcactgccccaggtcttgctgcagccgggaccgcgctctgcagccgcagacccggtccacacggccaggggctacgacccttgggatctgccctccgctcagctcgagcttccctcgtggccgacggaacaatgaaggattgcagtaacggatgctccgcagagtgtaccggagaaggaggatcaaaagaggtggtggggacttttaaggctaaagacctaatagtcacaccagctaccattttaaaggaaaaaccagaccccaataatctggtttttggaactgtgttcacggatcatatgctgacggtggagtggtcctcagagtttggatgggagaaacctcatatcaagcctcttcagaacctgtcattgcaccctggctcatcagctttgcactatgcagtggaagtatttgacaaagaagagctcttagagtgtattcaacagcttgtgaaattggatcaagaatgggtcccatattcaacatctgctagtctgtatattcgtcctacattcattggaactgagccttctcttggagtcaagaagcctaccaaagccctgctctttgtactcttgagcccagtgggaccttatttttcaagtggaacctttaatccagtgtccctgtgggccaatcccaagtatgtaagagcctggaaaggtggaactggggactgcaagatgggagggaattacggctcatctctttttgcccaatgtgaagcagtagataatgggtgtcagcaggtcctgtggctctatggagaggaccatcagatcactgaagtgggaactatgaatctttttctttactggataaatgaagatggagaagaagaactggcaactcctccactagatggcatcattcttccaggagtgacaaggcggtgcattctggacctggcacatcagtggggtgaatttaaggtgtcagagagatacctcaccatggatgacttgacaacagccctggaggggaacagagtgagagagatgtttggctctggtacagcctgtgttgtttgcccagtttctgatatactgtacaaaggcgagacaatacacattccaactatggagaatggtcctaagctggcaagccgcatcttgagcaaattaactgatatccagtatggaagagaagagagcgactggacaattgtgctatcctgaatggaaaatagaggatacaatggaaaatagaggataccaactgtatgctactgggacagactgttgcatttgaattgtgatagatttctttggctacctgtgcataatgtagtttgtagtatcaatgtgttacaagagtgattgtttcttcatgccagagaaaatgaattgcaatcatcaaatggtgtttcataacttggtagtagtaacttaccttaccttacctagaaaaacattaatgtaagccatataacatgggattttcctcaatgattttagtgcctccttttgtacttcactcagatactaaatagtagtttattctttaatataagttacattctgctcctcaaacaaatgcaattttttgtgtgtgtttgaaagctaatttgagaaaatttcataggttacatttcctgcagcctatctttatccacagaaagtgttttcttttttttaaatcaagacttttaaaactggatttcctcccatcactgttttttgaaggtcctccaagtccgtgttaaggtaaatatctgttttcttcctgatgtcacagcctgagcatactctgtgcattaggaagacctgagtgcatttcccaccattgtcctttccacattatgttgtagctggctggctgtcaggcgactacaagactgagggtcttgtgccttatagatctttgtatcccccatggctgacatatagtaggtactcagtaaatggttttataatgaatcagtgaacattttgcttctatagaagtgtaccttctttgtttctatattatgaaacctctttattagaatttgtgattgattctgacagtgtatagatttaccttatattgtctttattttccatgagctactaagtcattagagatactctgaagcatagttagtttaggaaatcacttcatattgattgtattagaattatcttggaattgaagatatatccctagagcaggggaccccaacccccaggccatgggccacacagcaggaagaggtgagtggtgggccattgaggagcttcatctgtatttatggctacttcccatcactcgaattaccacctgaactccacctcttgtcagctcagtggcagcattagattctcataggagcacaaatcctattgtgaactctgcatgcaagggatctaggctatgcgctccttatgagaatctaatgcttgatgacctgaggtgtaacagtttcatcctgaaaccacccttcaccctgcagtctgtggaaaaattgtcttccacaaaactggtccctggtgccaaaaatgttggggaccactgctctagagagaggtcatgatatcataccaaccaaatggaaatgacaaatgttttatgtcaagtgttaattgcagaaataaatcttttttttttttttttggtagaaaacaaagaggcatactctgatttttatactctgtttttgcaggtgctcttttctttgaatggagatttgatgagcaagtggttaggatgcagggagagctactatgggtgatattttccttgtttaggagctgtgagttaaaattgtatcctttgtggtttatctaaggaaagtcaaatcttgacagaaaacatttttccttggaaggtcaactctcagacattgtattttggtttccctcagtcctcataacttccttcttgctgaacatattttattctcttttcagagaaggaaaataaaaaggattctaaaagtttgatgcattggaaaaatttccttgaggcatttagcaacacatagaaaatgggctttgattcttttccaaaacttttagccatagggtcttttatagacagggatagtaaaatgaaaattgagaaatataagatgaaaaggaatgataaaaatatcttttagggggcttttaattggtgatctgaaatcttgggagaagctgttcttttcaggcctgaggtgctcttgactgtcgcctgcgcactgtgtaccccgagcaacattctaagggtgtgctttcgccttggctaactcctttgacctcattcttcatatagtagtctaggaaaaagttgcaggtaatttaaactgtctagtggtacatagtaactaaatttctattcctatgagaaatgagaattatttatttgccatcaacacattttatactttgcatctccaaatttattgtggcgagacttgtccattgtgaaagttagagaacattatgtttgtatcatttctttcataaaacctcaagagcatttttaagcccttttcatcagacccagtgaaaactaaggatagatgtttaaaaactggaggtctcctgataaggagaacacaatccaccattgtcatttaagtaataagacaggaaattgaccttgacgctttcttgttaaatagatttaacaggaacatctgcacatcttttttccttgtgcactatttgtttaattgcagtggattaatacagcaagagtgccacattataactaggcaattatccattcttcaagacttagttattgtcacactaattgatcgtttaaggcataagatggtctagcattaggaacatgtgaagctaatctgctcaaaaagatcaacaaattaatattgttgctgatatttgcataattggctgcaattatttaatgtttaattgggttgatcaaatgagattcagcaattcacaagtgcattaatataaacagaactggtggcacttaaaatgataatgattaacttatattgcatgttctcttcctttcacttttttcagtttctacatttcagaccgagcttgtcagcttttttgaaaacacatcagtagaaaccaagattttaaaatgaagtgtcaagacaaaggcaaaacctgagcagttcctaaaaagatttgctgttagaaattttctttgtggcagtcatttattaaggattcaactcgtgatacaccaaaagaagagttgacttcagagatgtgttccatgctctctagcacaggaatgaataaatttataacacctgctttagcctttgttttcaaaagcacaaaggaaaagtgaaagggaaagagaaacaagtgactgagaagtcttgttaaggaatcaggttttttctacctggtaaacattctctattcttttctcaaaagattgctgtaagaaaaaatgtaagacaaaaaaaaaaaaaaaaaacaaacagaggcagaggcaggcagtagcaagaaagcagagcgtaacatcagctagatggtaacatgcaatgtcagctctcttgaagacatgggaaacctaagttacaccttgggttaaaattcttcaccatattagttttgttgcttcataaaatttacctaagcaagtggtcttgcttgcctcaaatccaagcagtcttgaacacttggaggcaattaatgagtatatcttagtcaaaagaattgttggagctttttattaaagctacagtttcagttctgcttttggggaattgtgctatgaaagcagctgccaaaataagctcatttattttcttcaatcccactcagtgctcagtcactatattctgtttcctttttttttttcaagttgcatatttggtttccccttatgattgggaaagatgaattttcagcagaaaacattgtttgttcactttcaaagagtgatagtttctaaaacatttagagcaataaatattcatcagaggtaccaagtaagccggcagaagagttaagggttagagaaatcccttatttcatgtcttgactctaaaattatcaaagtacttttccttgtaatgtggatttcttcttatgcggatatgcaaaaacttcagttatacgtagtaatgctagcaggtaattttagtagacattttataacaactgtcactttgtttcgccacatgtagagtttgttcagctattttccagatatctccccacaaaaggaggcaaagggtaccagcttttcaatgagcattacctattacttggcaaagatgatgaagactctattaatagttcatttgataaatgttgacataaccaacaatagagattaggaagttagttttaagaaatcaatggcatatagacattaccctcatggagtttgtattctactacttgaactgattgtagctataaaagcatagttagatagctgaatagttagatcataagcaaagaaggccagaacacatctcttatcaagaaatcaatgaatagtttatctcatttttaaagcaactttatccttctttaattccttcctttcttctagtgcaaaactacttaataaggttggtgtttaggttagtgttcacaccattcctcatctggtgtgaattaccttctctttctttactatttactaccaacctagtacatgtgttgactgaattcttttcaaacaatgttgagttatcatggtgcacctaataaattaacaccacagattacagcatccttgctgattttctcagcaaagccagattagatggaaataaacaaagaaaatgatcctagagtgaatttttctagaaaatatctattatgaaccatgctgtttaaagtattagcttgaaggtgatggatccagctattcagaaaataactttcatataaccatgattttgcacagtatgaggtcttaaatgtgtggaaagagataaattttttatcattaccacaaaccccttttaaagattcaaaggtggaagaaagtgatttattttttctcttcagcatacatatataaaagacttgtcagatgtttaatttggggaggttgataatgaaacatatcaacagagtatagtagttatagtagtgtttgtgggtaaataatttcctggggtcagacatatataaacatatttgcttcaaaatgataaaggcatgaaatcagtcttaaaaattgaaatgggggtgatgggggagaaaaagaagaacaaatttgaagtgccctttcaaatctgctggatacaagtattgaagttttaagtcatcttattctgtctgaaagtgtatttttcattctacaatagacccaatcaacaagacgtataacttgagttgcatgatgttcagtttatgtaatctactgttgggatggtaagaattgatgtaggctgtggtgtaagaatgaattaaaatatagtttcactggcttttctctacatatccactatcacaatggctaggtttcctgttgctcactattggattctggagaaaaatttaatgaaagatgatatcagaggaagaataagtggaggtagagaagaaaggaatgatagaggaggggaaaaaaacaaaacatatttttgtgttatccaaaggagctttttccttattctgtcaagcattgagatcttcttcagctttcaatgtagttgctaaatacaaataatgctactaggtagtgactaaatatagcaaacacttcatcagatattagaattaggtcacactattgaggttataatctgaaggttgtgttacatagaaaccactttagattattatcaacttggactaggctttattttataatagcatagtaagtaatatctattgtgtcatttcttcaaccattttattctaagatccatgaagcttcttgaggccaaataaaataataagtttagacaagaagtagattgtgacttttttcccttagagatactatttactatctcctatcctgataggtggaaggtttactgaattggaaattggttgactattagtttttaactaaaatgtgcaataacacattgcagtttcctcaaactagtttcctatgatcattaaactcattctcagggttaagaaaggaatgtaaatttctgcctcaatttgtacttcatcaataagtttttgaagagtgcagatttttagtcaggtcttaaaaataaactcacaaatctggatgcatttctaaattctgcaaatgtttcctggggtgacttaacaaggaataatcccacaatatacctagctacctaatacatggagctggggctcaacccactgtttttaaggatttgcgcttacttgtggctgaggaaaaataagtagttcgaggaagtagtttttaaatgtgagcttatagatagaaacagaatatcaacttaattatgaaattgttagaacctgttctcttgtatctgaatctgattgcaattactattgtactgatagactccagccattgcaagtctcagatatcttagctgtgtagtgattcttgaaattctttttaagaaaaattgagtagaaagaaataaaccctttgtaaatgaggcttggcttttgtgaaagatcatccgcaggctatgttaaaaggattttagctcactaaaagtgtaataatggaaatgtggaaaatatcgtaggtaaaggaaactacctcatgctctgaaggttttgtagaagcacaattaaacatctaaaatggctttgttacaccagagccatctggtgtgaagaactctatatttgtatgttgagagggcatggaataattgtattttgctggcaatagacacattctttattatttgcagattcctcatcaaatctgtaattatgcacagtttctgttatcaataaaacaaaagaatcctgtttgtgtggtttcatgaaatcagcattgttgaatgcatgaagtaataatgctaaattaacatttttatgatgtctcaaggtttctggtcaagggaagtaaatgtaggatagtatttttacaccaaaatgacacagagagaattgagcacaccagaaagaccagaaaccacaccactggatagagattcaatatgtttctttttcaaacatttggacaagaaaaaaatgggcatttaaaaattcttccttcccctggttatggatttatctgtagtaaaacttagctttgtcgtttgagatttgcacagaatggggggagtagattacctcttcccattcattgtcataatggatctacatcactgataaacaccatacttctatatgtggttaactagctttagaataaaagacactttaaaaagtaaaaggcctagagatcttcaatgaagtgtcccttttagccaaaccaggccttgcagaaattgtcctcaaaagcaccaagggagaacaaagccaagtgcagaattacccaagggtcacacattttgtattcattttcttataatttgcccaaatgatttgaagtacagcaaaacctgaagttttgcaaagagttactgtaaactgaacttaaaaatgtcagagtgctcggtgacccacttctccagaccctgtcaacctgtgaaaatattggcctttattcagatctctcaagaagttacgcgcagagtttggaaggtctaggcaaaggttattagtcaagtgttcttacagtgtcaacgctcaattcccacaagcgtgagaaagagagacctgtcattcctgagggtgatgacatacatttactggagcttatataatttatcagataagacagcagtttccttcagggtagaaagtgtgttttctacattgatttagtacaaaacaaaaagaaaaggggatatttcaaattttataattatttttctgctaagctgattcagtgtgatttaagcatatttttcaaatcatgaatctgattccatatacatatgtgccttatattgtgataatttatttttaagtgaaatatgctatcatagcctgactttatgtatagtggtgacaacttgcaggatcgcatttctgtaaccaaacggccgacagctgaggtgtagatgcttcctatggtctgtagaataatcactgggcttgttctctagctatgtctgtatgcaatcgcgacagtgttgatcaaaacccatgatcattctctccaaaggtctttgtcactaagccactagggattctgaaaagttcgtgagctgaaacaaataaattgagttggaagattaaaaaaaaaa

SEQ ID NO: 397 - DNA, 5753 bp, Homo sapiens
acagttgtcaaagtgcttttgccagagcggtcacataatcaacctgaaagaagaaaataaatactgtatacttttaaattttatcgattcttaaaaactggacactcaaagctgcgcaaaccatgcaggatgatttactgatggacaaaagcaaaacccagccccagccccagcagcagcagcggcagcagcagcagccccaacctgagtccagcgtatccgaagccccgtccacgcccctctcctcagagacccccaagccggaggaaaacagcgcagtgccggccctcagcccagccgctgcccccccggcccccaacggcccggacaagatgcagatggaatcaccgctcctgccaggcttgagtttccatcagcctcctcagcagccgccgccgcctcaggagcccgcggcaccgggcgcgtcgctgtcgccgtccttcggcagcacctggtccacgggcaccaccaacgcggtagaggacagcttcttccaggggatcaccccagtcaacgggaccatgctcttccagaacttcccgcaccatgtcaacccagtcttcggaggcactttctccccgcagatcggcctggcgcagacccagcaccaccagcagccgccgccgcctgcgcccgcgccgcagccggcacagccagcgcagccaccacaggcgcagcccccgcagcagcgccgctcacccgccagccccagccaggcgccctacgcgcagaggagcgccgccgcggcgtacggccaccagcccatcatgaccagcaagccgtcctcgtcttcggcggttgcagccgctgctgccgcagccgccgcctcgtcggcctcgtccagctggaacacgcaccaaagcgtgaatgcagcctggagcgcaccgtccaacccctggggcggcctgcaggcgggccgggaccctcgccgggcggtcggtgtgggcgtgggtgtgggtgtcggggtgccttccccgctcaaccccatctcgccgctcaaaaagcccttctccagcaacgtgatcgcgccgcccaagttccctcgcgcggcccctctcacttccaagtcctggatggaggataacgctttccggaccgataatggtaacaatctgttgccatttcaggaccggagtaggccctatgatacttttaacttgcactcgttggagaactccttaatggatatgataaggactgatcatgaacctctgaaaggacgcatggggataaatttccatcatccaggaacagataatattatggcacttaacagtcgatcttctctctttccctttgaagatgccttcctggatgatagccatggtgatcaagccttgtcatctggcttaagttctcccactcgctgtcaaaatggggaacgagtagaacgctactctagaaaggtgtttgttggaggacttcctcctgatattgatgaagatgagatcactgccagctttcgcaggtttggacctctcgtagtagactggcctcacaaagctgaaagcaagtcttattttcctcctaaaggctatgcctttctgctgttccaagaggaaagctcagtacaagctttgatagatgcctgcctagaagaagatgggaaactctacctgtgtgtgtcaagccccaccatcaaggacaagccagtgcaaattcgaccatggaacctaagtgacagtgactttgtaatggatggttctcagcctttggaccccagaaaaactatctttgttgggggagttccacgaccccttcgagctgttgaactggcaatgatcatggaccgtttgtacggtggtgtctgctatgctggcattgatacggacccagagctgaagtaccccaaaggtgctggccgcgtggcattctccaatcagcagagttacattgcagccatcagcgctcgttttgtgcagcttcagcacaatgacattgacaaacgggttgaagtaaagccatatgtgctggatgatcagatgtgtgatgagtgccagggcacacgctgtggtgggaagtttgccccgttcttctgtgccaacgtcacctgtctgcagtattactgtgaatactgctgggcgagcatacattcccgagccgggcgggagttccacaaaccgctggtgaaggagggaggcgaccgccctcgtcacgtcccgttccgctggagctgagccacgggccgacccagccacaagtactggagtagataacaaggagggaaaagagagggcactgcctcagggcttacagtgttctggaaatctgtgcattcgttctcgatttttaaagaagaattgggtctttttattattattattattatttacagtcatattactgaactcagtgtccagtataatgcagaattgcagagtgtagaatggtactgatttgcactttgattcacacctttgtctgcttggtaccttaattttttatacctgatttgtcactcgtgacagtatgtagactgccattctcatcagcggccgtcaggctactgtctgtgattcttttgtttgttgttgtggtgttgttctgattgttttgaactggagcatgcacttattttcagaaacttagagagttgcccctaggacaagacttaccaaaggtaatactcgtgagtaggtggcagatgtagcaaaaacttcacaacaattcagcaatcattagctcgggtcacttagagtaaggataacccttcatgaaaataagcctttagttgctctctattttgacttgtaaggatacctcataagctggatcttttatttttccttcatgtttgatttttgttttgccgaggattttggttagatcttttagtattatgtaaatttatgctgcaatagcttttgctgctattaaaatggtattattaataccataatactctattcaggctaggatatcaattaaacacaaaaacccaacaacacacttttgtgattttagggatagagtcagctgccgaacggagatcagaatagacttcagaaagcttcggtggaaggtcactatttctgactgcatgtttacttaatcaggttgctgcatgcaataaattttatatccaatgtctagtataaaacgttcccacaatgcacaaattaagaatctatataagctataaaaatactcattttttaaaaaaagtttttttcattcaaagaattggtaattgaccggaggaaggcatgcctcaataaatggaatgctctgaatgggaagagcccataacagaatgacctatattacaaccgatataaaacctaggtgtaggatattcttcaagcaaatttgtggatggtagatgaagtactttgcggtgctctgttatatattgtgaaatttattttatatagtaaagtgattatgtctaactgtgatcaaacttaactgtttaaagcctctgtcagacattaatgaacttgacagttcataactgatatattataaactaacacatgagctcttagttacaatctcttagtgcttgcaccattttacatagcttcagaccttgtccagaaaaccaaagagctcatcttagcttacaaacactaagaatatatacaggatatagagataagttgtcagattgacaaactaggcacatttttaagaaagttgtgtaatggtgatgctaaagaaatgtctgtacaaaataagatggcctgggcagagttggttgtctgagtgagaaactaactacttaattccctggatttatcctgttaagcttgagtagaatgaaggcctgctagcactagcgtggtctagaatgaaggcctgctagcactagcgtggacatttttctagcattcacccttgggctgcagatagtaatatataaacacacacaatgattgcaagactatgtaaatctttttttaatcttcttcctatgttttggaattctggggacaatctgactggatatgacactgcagaatagatttaagtcgctgtgttttctgtgctgtgatgtccttgtactgtcttaagttagtgttgcttgtttttgttttgttctcccatgtttagttgcaattactggctctcaagctatagtttgttttcaaaaaggaaaaacaaaatagttttttactggattaaaaatgcttattttagaatcctcccctttttgaggctttttggtaataattgcttttttccagcccaggtgtggttttgtttgtttttttctatgtttgtgggttttttttcatctgtacaagaaattttgttatgcactactactttttgtattctagacagttttcaaaagttggcagatttttttttttgtttttaaggaaaaaggcatgctttctgactgacatgatcttttgcaatacctcaattttgaaatataggaaagaaaatgatattttctaagtaagtttattcagaaaaatatatattaatttaattctgcaagaaaatgatttaacagatgggtaactttatttttttcatgcttatttgtgttttttgaaaatgaagaagttagagctttataactataatattaaagatcatatctaacctacagaaatctacctaattatgtgaaagaagcaaaactttttgaagaagcacccctctttcatgtattaaaataacactgagatttttttaaaagctggaagattgtacagcataaagctaaagtgaaggcaaaaaacattgtcctgaagaataggttacaaaaaataaactccatttggtgctgaaagttgtgaatagatggtggaaactactttcccttaatttgtatatttctaatcaagtgttgattgtgcgcgactgaccaggattgtgaaagagttcttctgtttgtatttttttaaagagaacttttttagtttattaaattataacatgttcccttttgttttgtaaataaatgtgcccccaagttgttaatgttatattaaaagagagggtccttcaaaaaaattattttttaaaacacagaggtgttctgacctgcaacttgactgggaagcccctgggtaacacaggtcctgctgtggcctttccttggtgtgacacttgaactagtcgattttttgaaggctataacctaacctcgactatttgttgttatgtgcaatactgtttgtactgtttgtataaaaaatagaaaaaaaaaagaaaagaaaaaaggcataaatctttattgcagatttattttcattgcaaactttagacattgtgattcactgaaatcatttttctactgtcaaatatgtaccttttcttcatgctggtattttttcaatagtaatgtagcctttgtactgagacaaattttcattgttatttttagaaagattttttgctaagaaaaaaattaaacatatttacatatttttcattttatttcgtattttctttaaggagtgctttctcaatcattaatagagttgtttctgggagggactttcatatctggtcaatgtcataatattattttgtatttttattggaataaattaattttatgatgctaattctttaaaagtttatttttttcattttcagttatttttgaagctaaaacctttgtaatattgttactaaagtgtctagttttttgaaatgcaaagctttatgtattaacttgctgatgtggtttacaatagtgtgacaacgatgaaaatgcttggttatgtaaagtgattggaaatgtaatggataattgggtaataaaatgacagaatgagcagaaaaaa

SEQ ID NO: 398 - DNA, 2754 bp, Homo sapiens
agtttatgacagaagggcaaaaacattgactgcctcaaggtctcaagcaccagtcttcaccgcggaaagcatgttgtggctgttccaatcgctcctgtttgtcttctgctttggcccagggaatgtagtttcacaaagcagcttaaccccattgatggtgaacgggattctgggggagtcagtaactcttcccctggagtttcctgcaggagagaaggtcaacttcatcacttggcttttcaatgaaacatctcttgccttcatagtaccccatgaaaccaaaagtccagaaatccacgtgactaatccgaaacagggaaagcgactgaacttcacccagtcctactccctgcaactcagcaacctgaagatggaagacacaggctcttacagagcccagatatccacaaagacctctgcaaagctgtccagttacactctgaggatattaagacaactgaggaacatacaagttaccaatcacagtcagctatttcagaatatgacctgtgagctccatctgacttgctctgtggaggatgcagatgacaatgtctcattcagatgggaggccttgggaaacacactttcaagtcagccaaacctcactgtctcctgggaccccaggatttccagtgaacaggactacacctgcatagcagagaatgctgtcagtaatttatccttctctgtctctgcccagaagctttgcgaagatgttaaaattcaatatacagataccaaaatgattctgtttatggtttctgggatatgcatagtcttcggtttcatcatactgctgttacttgttttgaggaaaagaagagattccctatctttgtctactcagcgaacacagggccccgcagagtccgcaaggaacctagagtatgtttcagtgtctccaacgaacaacactgtgtatgcttcagtcactcattcaaacagggaaacagaaatctggacacctagagaaaatgatactatcacaatttactccacaattaatcattccaaagagagtaaacccactttttccagggcaactgcccttgacaatgtcgtgtaagttgctgaaaggcctcagaggaattcgggaatgacacgtcttctgatcccatgagacagaacaaagaacaggaagcttggttcctgttgttcctggcaacagaatttgaatatctaggataggatgatcacctccagtccttcggacttaaacctgcctacctgagtcaaacacctaaggataacatcatttccagcatgtggttcaaataatattttccaatccacttcaggccaaaacatgctaaagataacacaccagcacattgactctctctttgataactaagcaaatggaattatggttgacagagagtttatgatccagaagacaaccacttctctccttttagaaagcagcaggattgacttattgagaaataatgcagtgtgttggttacatgtgtagtctctggagttggatgggcccatcctgatacaagttgagcatcccttgtctgaaatgcttgggattagaaatgtttcagatttcaattttttttcagattttggaatatttgcattatatttagcggttgagtatccaaatccaaaaatccaaaattcaaaatgctccaataagcatttcccttgagtttcattgatgtcgatgcagtgctcaaaatctcagattttggagcattttggatattggatttttggatttgggatgctcaacttgtacaatgtttattagacacatctcctgggacatactgcctaaccttttggagccttagtctcccagactgaaaaaggaagaggatggtattacatcagctccattgtttgagccaagaatctaagtcatccctgactccagtgtctttgtcaccaggccctttggactctacctcagaaatatttcttggaccttccacttctcctccaactccttgaccaccatcctgtatccaaccatcaccacctctaacctgaatcctaccttaagatcagaacagttgtcctcacttttgttcttgtccctctccaacccactctccacaagatggccagagtaatgtttttaatataaattggatccttcagtttcctgcttaaaaccctgcaggtttcccaatgcactcagaaagaaatccagtttccatggccctggatggtctggcccacctccagcctcagctagcattacccttctgacactctctatgtagcctccctgatcttctttcagctcctctattaaaggaaaagttctttatgttaattatttacatcttcctgcaggcccttcctctgcctgctggggtcctcctattctttaggtttaattttaaatatgtcacctcctaagagaaaccttcccagaccactctttctaaaatgaatcttctaggctgggcatggtggctcacacctgtaatccctgtactttgggaggccaaggggggagatcacttgaggtcaggagttcaagaccagcctggccaacttggtgaaaccccgtctttactaaaaatacaaaaaaattagccaggcgtggtggtgcacccctaaaatcccagctacttgagagactgaggcaggagaatcgcttgaacccaggaggtggaggttccagtgagccaaaatcatgccaatgtattccagtctgggtgacagagtgagactctgtctcaaaaaataaataaataaaataaaatgaaatagatcttataaaaaaaa

SEQ ID NO: 399 - DNA, 1642 bp, Homo sapiens
aactccggctacgggggcccgaacggaccgtgaggcgcagatttgagccgctgttgagatgattcctttccgttcgcggaagagatggggaaactgagggccgcccagtatgcttgctctcttcttggccatgcgctgcagaggcatggagccagtcctgagttacagaaacagattcgacaactggagagccacctgagccttggaagaaagcttctacgcctgggtaactcagcagatgcccttgagtcagccaaaagagctgttcacctatcagatgttgtcctgagattctgcatcactgttagtcacctcaatcgagccttgtacttcgcctgtgacaatgtcctgtgggctggaaagtctggactggctccccgtgtggatcaggagaagtgggcccagcgttcattcaggtactatttgttttccctcatcatgaatttgagccgtgatgcttatgagattcgcctactgatggagcaagagtcttctgcttgtagccggcgactgaaaggttctggaggaggagtcccaggaggaagtgaaactgggggacttgggggaccagggactccaggaggaggtctgccccaactggctctgaaacttcggctgcaagtcctgctcctggctcgagtccttagaggtcatcccccacttctgctagacgtggtcagaaatgcctgtgatctcttcattcctctggacaaactaggcctctggcgctgtggccctgggattgtggggctttgtggcctcgtgtcctccatcctgtctattctcaccctaatctatccctggctacgactcaagccctgaccttccggtacaggataaggaggggacctgaattggtgagatggaatcttagatcgtcccccatgtgccagcctcattcgaattctactctttggttaaagttagaaattcagagatttaggggtggaggaagagctttggggaagatgaggtaaggaaagatgactcgtgaagttaataggatgtctctaatttctagatgtgcctgagcttctgttcttttcctctttctttgtgtctctcttgaatatatttactttgtgtctcttaactctgtttaaggttctgtgtctatgcatctctctctttcttttttcaaccttctcattctcctatccagggatttaatcagcagaattactttttgataggggaggtataaggtttggcctgtaaggttctaactgccttcttttttctcacagaggtggcttatggcagatttttcctccttcaaactccaaacataatttttaagactatgtgccagtggactcttcccttatatctctgcaccacaagttgttggatgtttcctcttcctcccttatgtctacctcaccaacctcgctcatcatttggcccttatccttccttgtacacctaccttcagatttctgcttacactttgatttcagagctttattccccagtctgttcttactcctttgtcgcttatccagaatgatgctatgtgtagcatcttgctgtaaatcctgtacaatgattctgtgtaaatagctgtggcctatgccaataatgaagagcaagcctttcaggtaagcaaattaaagttcagtttgctcatcgacaaaaaaaa

SEQ ID NO: 400 - DNA, 5921 bp, Homo sapiens
aaagaagagttcagagggagttgtggagttggcagcagctttacagaggaactacactgagggcctggggacagaacgcgggtagcacagggcacaaggttcaacgtccctgctccgggactcaagtcacttggcttctcgaagcccctgccttcatttggtgataatcacagagcttccttcacagggggaagaaccaacaacgcagagaccgtgggaaagagcccagcctatcgaaggtgctcaatgaacaggagccgcgctatcgtccagagaggacgcgtgctgccgcctcccgcccctcttgacacgacgaacctggccggccgcagaacgctccagggccgagcgaagatggcctcggtgccggtgtattgcctctgccggctgccttacgatgtgacccgcttcatgatcgagtgtgacatgtgccaggactggtttcatggcagttgtgttggtgttgaagaggagaaggctgctgacattgacctctaccactgccccaactgtgaagtcttgcatgggccctccattatgaaaaaacgccgtggatcttcaaaggggcatgatacacacaaggggaaaccagtgaagaccgggagccctacgttcgtcagagagctccggagtaggacttttgacagctcagatgaagtgattctgaagcccactggaaatcaactgaccgtggaattcctggaagaaaatagcttcagtgtgcccatcctggtcctgaagaaggatgggttgggcatgacgctgccctcgccatcattcactgtgagggatgttgaacactatgttggttctgacaaagagattgatgtgattgatgtgacccgccaggctgactgcaagatgaagcttggtgattttgtgaaatactattacagcgggaagagggagaaagtcctcaatgtcattagtttggaattctctgataccagactttctaaccttgtggagacaccgaagattgttcgaaagctgtcatgggtcgaaaacttgtggccagaggaatgtgtctttgagagacccaatgtacagaagtactgcctcatgagtgtgcgagatagctatacagactttcacattgactttggtggcacctctgtctggtaccatgtactcaagggtgaaaagatcttctacctgatccgcccaacaaatgccaatctgactctctttgagtgctggagcagttcctctaatcagaatgagatgttctttggggaccaggtggacaagtgctacaagtgttccgtgaagcaaggacagacacttttcattcccacagggtggatccatgctgtgctgacgcctgtggactgccttgcctttggagggaacttcttacacagccttaacatcgagatgcagctcaaagcctatgagattgagaagcggctgagcacagcagacctcttcagattccccaactttgagaccatctgttggtatgtgggaaagcacatcctggacatctttcgcggtttgcgagagaacaggagacaccctgcctcctacctggtccatggtggcaaagccttgaacttggcctttagagcctggacaaggaaagaagctctgccagaccatgaggatgagatcccggagacagtgcgaaccgtacagctcattaaagatctggccagggagatccgcctggtggaagacatcttccaacagaacgttgggaagacgagcaatatctttgggctgcagaggatcttcccagccggctccattcccctaaccaggccagcccattccacttcagtgtccatgtccaggctgtcactgccctccaaaaatggttcaaagaagaaaggcctgaagcccaaggaactcttcaagaaggcagagcgaaagggcaaggagagttcagccttggggcctgctggccagttgagctataatctcatggacacatacagtcatcaggcactgaagacaggctctttccagaaagcaaagttcaacatcactggtgcctgcttgaatgactcagatgacgactcaccagacttggaccttgatggaaatgagagcccattggccctattgatgtctaacggcagtacgaaaagggtgaagagtttatccaaatctcggcgaaccaagatagcaaagaaggtagacaaggctaggctgatggcagaacaggtgatggaagacgaatttgacttggattcagatgatgagctgcagattgacgagagattgggaaaggagaaggcgaccctgataataagaccaaaatttccccggaaattgccccgtgcgaagccttgctctgaccccaaccgagttcgtgaaccaggagaagttgagtttgacattgaggaggactatacaacagatgaggacatggtggaaggggttgaaggcaagcttgggaatggtagtggcgctggtggcattcttgatctgctcaaggccagcaggcaggtggggggacctgactatgctgccctcaccgaggccccagcttctcccagcactcaggaggccatccagggcatgctgtgcatggccaacctgcagtcctcatcgtcctcaccggctacctctagcctgcaggcctggtggactgggggacaggatcgaagcagtgggagctccagcagtgggctgggcacagtgtctaacagtcctgcttcccagcgcaccccagggaagcggcccatcaagcggccagcatactggagaaccgagagcgaggaggaggaggagaacgccagtctggatgaacaggacagcttgggagcgtgcttcaaggatgcagagtatatctatccttcactggagtctgatgatgatgaccctgctttgaaatctcgacccaagaaaaagaagaattcagatgatgctccatggagtcctaaagcccgcgtgaccccaactctgccgaagcaggaccgtcctgtgcgtgaggggacccgggtagcctctattgagacaggtttggctgcagcagctgcaaagctggcccagcaggagctacagaaggcccaaaagaagaaatatatcaagaagaagcctttgctgaaggaggtagaacagcctcgccctcaagactccaatctcagtctgacagtaccagcccccactgtggctgccacaccacaacttgtcacctcctcctcacccctgcctcctcctgagcctaaacaagaggccctgtcaggaagtctcgctgaccatgagtacaccgctcgtcccaatgcctttggcatggcccaggcaaaccgcagcaccacacctatggcccccggtgtcttcttgacccagcggcgcccttcagttggctcccagagcaatcaggcaggacaaggaaagcgtcccaaaaagggcctggccacagcaaagcagagactcggccgtatcctgaaaatccacagaaatggcaaactacttctgtgagccctcctgtgtcccacccctcacccctttacccccattgccttctccattgtcaactcttggggcactcctggatcctatctgccctggacaaggtgctgaggtgcattgtcctgctttcttgggacttaccaaaggcacggacccctccaccgactccttctagttcccttccccactttcactagagcatcctgcctgccttctccactgaggagcaggtaaatgggagaggtttccagctgactagaaccctcttttctactcgtccaaaccactcccgtcacctgccttgtctgttctttattcttcatcccccgctagagctggaaggcaggatgaggagaggtatgaaggagcctgagccatgaagtgggaagcccagtgcttgacactttctgcaactctagccctatatccagaagcctgcccacctccacccattctgtttgccccatttccccagtccagtggacatgccccacctccagacttgctcatgggagaaggctgtggtctctgccccctcttgccaaatgcttcatggaaatgaagaggaaggcctagagcctccttcctgccccactgtgggccatttccagaagtggcctagaaatgccaacttcacttacctttcaaaagaaaggtgattcctatcacttgtcaaggtagggagaggtcagatgcccaagcctttgaccacggttttgtagcctgttggaggaagctacttttagctggctacacatgaggccacttgttttagggtgagctccagggatttgcctggattttgaaatcatgtagaacattatccacgtggctgtggctgtggctgtggctgggccctggcaggtggaaaaccatctcccagaaacctgaaagcacctgccaatgacgcagataaccctggccctacagcctgcttgctccgcctataccacagagcacagcctggacattatggagggtgtggcgggacggcccacacctgggtcctccatcgggaacttttcatgcttctttctccacctgaggtcttggtctgaagaagacctcaggactcacatcttcactcctgggcctttgcacttccagacgacaggtcatcgttcaagcagaatgcagacaggccattcacgagcccaagttgaagagaagagacgcccatccgtgaaggagcagaccatccatccgatcctccccttcccctgtccttccttcgtggattgtctccattgtccagacagtgcccccacctcccaccgccttgcctcactggcaatctggactcgatggagaacatccccccacctccatttggcactacccaagtggagtgtacccttgccctttccacctgtaccacccactccaacctcaccccagcttgcccaatgcttctggggaatttaatagctaccatgcaggccacagggaatttgtgaggcttcttttgtcatctttgtatctccagtttgtctttcttttctccatagccctgcctctactttccttccttggaatcaggggttcctttagcccatttgctttctctaccttggggaccccaggggccaagcagttctccatctagtcacaccaaaggcaaaaagcctggctacctcccccctagcacgtgagtccctactcccctcccctctgtttctgcccagctttgcttattttggggatttcaaggcagcagagggtagtgaggggagagcaggagaagcctctgtcctgtataggcaactgcctgactatgcggtgactgctgtaaccaagatcaggtccccagcccttttgtccattaacaccccttcttgatctttcaaaggcagctaattgctagcaaatccccccgattccggccttttccctctatttctttgttagaagttttctgtggagctgaaacccagcctctgtttgactgggtttcatttagcttagttgggttcttagagccccctgtttgttgttttgtgttgtttccaatgaaaagcaagtttaccctcagagttatgcttttccaaagaggctgatgtctttgtttttgttttttttaatgtttcaggttctaagtgaagtgagttggggaggggttgggagtgttagtaatcaaggtttagaacaccatgagatagttacccctgatctccagtccctagctgggggctggacagggggaagggagagaggatttctattcacctttaatatatttttacaaaaaaagcaaacaatttaaaaacaagcccaccgcttctgtacatgtctaaatatatttttagaagtgggtaggattgtgaatttctgatgcagggcctttttataaataggttagggtagcatcattcagacttctctgttgtttttgtccctgtctttttcttatgttgtgttactaatgtaatttatattttttttagatcctccctttcctatagagataaaagtgatttatcttggcaaaaaaaaaaaaaaaa

SEQ ID NO: 401 - DNA, 3684 bp, Homo sapiens
aggatgttgcctgcggctggcggcccagtggattctgggaattgtagtcccagccatccagggcattgccgttcagggccacgggaaaacctgactgcgctcccagaagcctccggtgtacctcgctgggaacgcacttcctgggacgctgagagggagacgctccaagaggctcctcagtgtgggcgagtaaaatgccctgcgtgtgagaagcaggctcagattattgctactctgtattcagatcttcatgtgtctcttctaagctgaataaagctgttttggaactgtcaggtacctcaaagcatgaagaaaacgaggcacagggaagttctgaatctggcccaagtctgactgacagtactccacaagcttgcctgccatgggctgtcgggatgtccacgcagccacagtcctttccttcctgtgtggaatcgcctcagtagcaggcctctttgcagggactctgcttcccaactggagaaaattacgattgatcacattcaacagaaacgagaagaacctgactgtttacacaggcctgtgggtgaaatgtgcccggtatgacgggagcagtgactgcctgatgtacgacactacttggtactcatcagttgaccagctggacctgcgtgtcctccagtttgccctacccctcagcatgctgatcgccatgggtgccctgctgctctgcctgattggaatgtgcaacactgccttcaggtcctcggtgcccaacatcaaactggccaagtgtctggtcaatagtgcaggttgccacctggtggctgggctgctatttttcctggcaggtactgtgagcctctccccatctatctgggtcatcttttataacatccatctgaacaagaagtttgagccagtcttttcatttgactatgcagtgtatgtcactattgctagtgctgggggcctgtttatgacttcccttatactatttatttggtattgtacatgcaaatctttgccttctcctttctggcaaccattgtactcccatccacccagtatgcatacttactcacagccctattcagcacgctctcgcctctctgccattgaaattgacattccagtagtttcacacaccacttaatggggaaatagttaattgttaaagaaaacttcttgtagcctcacattccccttgtgcaaagagctcttttggacctacatacattttcctttgtttttgaccaatcaatgaagccaaatttatatgtcctagtagaatgaagtgctgctagtttttatgagaagtatattatattaaatgtgaattttttaaattttgcttcttatactggaaggaattttagccttcatattgatatctaattaattatttaagtggaagaggcctgcatcacaattgaggtaatgtagagcaacatgttaaagaatgatggttagcagaagctgttgtatacaatcttcatgaaaatttcagtgtgtatttttctttttctataatacctttaactgcaaagaaaaggcagtttcaaatataagaaatttatttcaggtaagggtaatattttaatagtagtcaataatctagcttaaggctgtaactcttctatcggggctaattgtatgaataggtgtcagtatgttgaagattactttcttttgtgactttcttctacctcatgccactgtttaaaagtaaaacgtattttaatgatgttagaataagactaccattctaaatatcacctacttatgaataacatgtaataatttttaacattaatgattccataaattgtattattgggattagaatgtgctttatgacaggttagtgtttcctctgaggcagaaaactcttttttggagatatcttccatcaagcagtactcgtgcccatatacaatctcttagtggctaggagaaataaataaaagggccataatggtttgttctctttcagacataatttagtaggggacaagaagtctgttcttcagtgagtacactagagatttactctggtgactgccttttgagttatgggtgaagtaaggtatggctttaccataaccttgattcattcacccttgattcatttctcgcccccgtcactgattatttccttgagcatatatctctgcctaacactttagtaggtgctatagaggatacatgaaaagtatgagatctggttccatccagtaagacattttaatagagaagatcaaaatgttacctggcagttggggaataatctgacttcgttggcagttggccttaacttcttaatcattgatccaggaatatttcaaccagagacacaactttctggcagacagacaaattgtacaacaccaacaatatcctggaccttgaaattctgtttacttcagtccattgtatcctttaaggcacctgtgctagcctagattttgtaataacactgatttatgagaatggacaaaagtggtagggaaattgttccctctccacttctgaaagtatgatgatgtattaaggatggaggagttattaaaaatgtctcttctgatgaggtaacaattagatgaaaccatgttaaagctgagatgaacacttagaaattcagggatattgggtctttagccttatgaatttgagctgcttatttaattggtgtaatttactacatattagtactatattcgtaaggattttttattaaccattacagattttacaaacagctagttatatggtaaacagattattatgcctttttgcaattctgaatatgattctagtatttgtgtagatgtatttggtactttttcccctaattccaacactagtttatatatatagcgaataaatctagttgtataaatttttaaatgccgtcagtagaaagcacacaaggttatgatttttttaattactggcttctgatttctttcacttctgatccttttcctttttctcagatgtagctgagtcttgatcattttaagacaacgatgggtagaattttgagattaatgttaattttccctttttgttaatttcagtcccctctcactatgcttttgtccagaaggatcaagaattctaccatcccttgggtctttgtgtataaacaatgttaaataaaggtagactcagtctttaagatattagacagtttttttagtccatgggattgtaaatataaacattaactttcctataagaatattttggctttgtaatctatagcctcaaattggtatttattatggattcactagacaaacagctgtttccttattgtcttttttctttagtgtttctgatttgctatcagtagctgtttttaaagccgtccaaggaaaataattatttacagtttttgaagtcacttttgagccctcatcaagctctcattgtgatgggagggatacctttttgttgttaaaagcctattattgttaaaggccttttatggaaaccaacttggaaaacaaccttaaatgtggatgtatcagatttggtttatccagccatgggagagaaaacaaacctaagtttactttacttgtacatatacactacaatggatagtatatttgctgtaaactacaatgtaaaacctcaataaaagtgcgctgtacttcttaatgtttattaaaagatgtatttttacaaaaaaaaaaaaaaaaaaaaaaaaaa

SEQ ID NO: 402 - DNA, 5642 bp, Homo sapiens
cgcccgccgggcgctctcgcttcagtcagtcgggccgcgccgcgcctcagctctggttgatgataattagaagcatgctttccactgaacttcccgacaacatttgttatgcagaatgtctctgagtgagaactcggtttttgcctatgaatcttctgtgcatagcaccaatgttttactcagccttaatgaccagcggaagaaagatgtgctgtgcgatgtcaccatctttgtggagggacagcggttccgcgctcaccggtccgtgctggcggcatgcagcagttacttccactcaagaatcgtaggccaggctgatggagagctgaacattactcttccagaagaggtgacagttaaaggatttgaacctttaattcagtttgcctacactgctaaactgattttaagtaaagagaatgtggatgaagtgtgcaaatgtgtggagtttttaagtgtacataatattgaggaatcctgctttcagtttctgaaatttaagtttttggactccactgcagaccagcaagaatgcccaagaaaaaaatgcttttcatcacactgtcagaaaacagaccttaaactttcacttttggaccagagggatctagaaactgatgaagtggaggaatttctggaaaataaaaatgttcagactcctcagtgtaaactccgcaggtatcaaggaaatgcaaaagcctcacctcctctacaagacagtgccagtcagacatatgagtccatgtgcttagagaaggatgctgctctggccttgccttctttatgccccaaatacagaaaattccaaaaagcatttggaactgacagagtccgtactggggaatctagtgtcaaagacattcatgcttctgttcagccaaatgaaaggtctgaaaatgaatgcctgggaggagtcccggagtgtagagatttgcaggtgatgttaaaatgtgacgaaagtaaattagcaatggaacctgaagaaacgaagaaagatcctgcttctcagtgcccaactgaaaaatcagaagtgactcctttcccccacaattcttccatagaccctcatggactttattctttgtctcttttacacacatatgaccaatatggtgacttgaattttgctggtatgcaaaacacaacagtgttaacagaaaagcctttgtcaggtacagacgtccaagaaaaaacatttggtgaaagtcaggatttacctttgaaatccgacttgggcaccagggaagatagtagtgttgcatctagtgataggagtagtgtggagcgagaagtggcagaacacctagcaaaaggcttctggagtgacatttgcagcacggacactccttgccaaatgcagttatcacctgctgtggccaaagatggctcagaacagatctcacagaaacggtctgagtgtccgtggttaggtatcaggattagtgagagcccagaaccaggtcaaaggactttcacaacattaagttctgtcaactgcccttttataagtactctgagtactgaaggctgttcaagcaatttggaaattggaaacgatgattatgtttcagaaccccagcaagaaccttgcccatatgcttgtgtcattagcttgggagacgactctgagacggacaccgaaggagacagtgaatcctgttcagccagagaacaagaatgtgaggtaaaactgccattcaatgcacaacggataatttcactgtctcgaaatgattttcagtccttgttgaaaatgcacaagcttactccagaacagctggattgtatccatgatattcgaagaagaagtaaaaacagaattgctgcacagcgctgtcgcaagagaaaacttgactgtatacagaatcttgaatcagaaattgagaagctgcaaagtgaaaaggagagcttgttgaaggaaagagatcacattttgtcaactctgggtgagacaaagcagaacctaactggactttgccagaaagtttgtaaagaagcagctctgagtcaagaacaaatacagatactcgccaagtactcagctgcagattgcccactttcatttttaatttctgaaaaagataaaagtactcctgatggtgaactggcgttaccatcaattttcagtttatctgaccggcctccagcagtgctgcctccctgtgccagaggaaacagtgagcctggctacgcgcgagggcaggagtcccagcagatgtccacagccacctctgagcaagctgggcctgcggaacagtgtcgtcagagtggtgggatctcagatttctgtcagcagatgactgataaatgtactactgatgagtaaacttgcattcacttccttcaaaccatctaattttctcctgaagttttggcagcgtcttgaaagcctaatatgaccatctgttgctcaacaatactgtttttttcctttagtagtttaccataagggaatttcctttaagtcaaccatgatttctccttgatttctacaagagacaaagaaatgattttgcctcctggatatcagaaaaatccatgtgaaaatgtagtaaacctttaaaactcatgttttaaagaataataactctagtaataactcttcctgctattcagaataagtaggagaatgaaaactgcagcatatcagacagcaatttaacagcttgaaacatctacagatagttcctactaaaagaagtggcctgcagaagtttaataatttgacttttttctaatattttagtttgaaagaaaatttcttcccaagcaatgctaatagagttctattcttagaagcagggtgtcagctactgggaatatttttgtagagctgcattgtgaaaaaaagatggtcttacctgaatcttagggctttgttcttcggctcctaaaatcaggctttaagctacattgggaagatttagtaaataggcaagtggttggcctaagacgggggctgcttctcctcttcagtatggactctagaaagtctggctacatgaatagatttaagtgtcactttccctccctgccccccgcttcagtctctaccatatctggtcccatcatggacttcctatttcctggcatttttgtccctttggaagaagaaataggactcagaatacagtggcatgagtgattacactggcagcattatctcaggctccctagaatctggagagcttaccaacatgtaaagctgttcatttttccaccgtgggtcaccaatgccagaaaaccagacatcacggggaaagaatgttgcttactttttaccaggagtgcagttcatttttttcaccctgtttttgaagtcgtattattcacttgtaaaaatgattgtaacagataaaaaatgtatctgcagcaactctgcaggtttgtgaaataggatgaaactcaatctttttctattgtgggtttgcatttgaaaagcaggttgaatccttgctctcttctccaaatttggtgtggtataaagacacacaaatcattttaacttggacatttaaagatcagtcttagtgtttgttcagtcctgttacaaaatagataactgagcacctatcgcataacattttgcggtggcttttagccatgctggggttagatgtgtttgagagtcaaatgaaagctatggatcttctcagcaattaaaaaaaatgcatatattcacattcacagaaacattggcagaacccagttttaatggtacagaggagtagtttatagtgttgatttcaccaaaatcagagggctgaaagagacacttctatagactgcatcctgagcctagtgcagggcttgtctagctaatgtgggcagccaccacccactgtgtatgaacaagtctgaagcaagttggccttgcccttgagagtatatggggaccagtcttcatgtcttggagtaatttgtcaaatgttaccctttttgatcagggtgtagggggaggatattgctagtatattttcagtggtttgtatgttctctctgtcactgacttatttgtaagagaaaattagttggacttgtttattttctagtagcttttataagtacactcaagaatttgtcagggagaataattctgatagtgcatcccatactgcaaaagaatttgtgtgtgtgtgtgtgtgtgtgtgtgtgtgtgtgtatgtgtatgtatacatatatatctctccatataggtatttctttgatacttgtaattttaaatttcagcttcacgatataaaataatataagaacttctggtttacaaaatgtaaaatcttaagccaatggaacccttgatttcctacctcagtgtacacccaactattggttgtatcagtttgtgtatgtgcaaatgtcaaataatcttttgctttaattgctactgtacttgctttgaaagattacctactattttatgataaaatgtagttgtctccagagcttaaatataatttgtaaagcacttggtttaaatttctctctacctataaacagtttagcattaagggtttctattaatgacacagaattattggccaagtgtaatttcttaaaatttagcattactttaaatagccagcatgtaatacaagtaactacactacctcatatctacatgattttcaagttgtaatgcagatggacagataaaaaagattttacgtttgtcttttggccataagtgggaaagttttctgtatattgcatagcattacacatttatgcctattttaacattaacttctaaagaagttttttctaagaaaatgtttcaaggcaatattttttttgaggctgccgaagacaaatgacaggattatgagtatacagtgtatgccttttccttcatgcagaattttgaaatgttttcagtttgtatattgcatattcacatgatcattgttcactattttatgaactggccttctcaatgtttgatgattttttaaaagctgttatgttgaattcagtaaaataacattaccttattttttttcttattcaaattctggaactatagcaaataattcgttaaattgtcatattcaaaacaaatgtggatacagtcttggttctccatctgtaattttttttaacagtttgctatagcttactgcttaactaattttaaataaggaaataagtatgttagatgcagtagacgatacaggttgcatgtggacactcagtcacattaacaacttgggaaaaaaatggcaatgttacggtgaattctcaggtgaacttttttcagttataaaacatctattttgaatctgtaaatattttaaatgttttattaaggcatgtaataaactattctttgaaacttgttgggtagaatgaaaattaaagccataatggtagaagatggcatactgattataaaagaagcagaaaaacattgatttttttatatctttcataatataattttctaacaatgcaataaaaccactaaacttttgtgtccatattttactgagaccatgtttcattaaaagcatagtttcatagtatttaatttacatttctccctaatgttcttacccaaatgtacctgaactaaaaaatgttagatgttggtgataagttgacagttaaataaaattctctaaaattgcttctaattgaaa

SEQ ID NO: 403 - DNA, 3409 bp, Homo sapiens
actagcgagcgccctgcgtaggcaccggctcctgagcccgtgcttcgggtgagggggcgggtcttccggccctctcgaaaatcatttccggcatgagccggaagaccgtcccggatggcctcggggactgccagtgtgtggaggtgagctccgggattgccggcattcccgcttctgctggttgcttcatgctgcaggctgcggccgtcagccctcgctcgcattggtggcgctgaggtgccggggcagcaagtgacatgtcgtcgggcctccgcgccgctgacttcccccgctggaagcgccacatctcggagcaactgaggcgccgggaccggctgcagagacaggcgttcgaggagatcatcctgcaataacaaattgctggaaaagtcagatcttcattcagtgttggcccagaaactacaggctgaaaagcatgacgtaccaaacaggcacgagataagtcccggacatgatggcacatggaatgacaatcagctacaagaaatggcccaactgaggattaagcaccaagaggaactgactgaattacacaagaaacgtggggagttagctcaactggtgattgacctgaataaccaaatgcagcggaaggacagggagatgcagatgaatgaagcaaaaattgcagaatgtttgcagactatctctgacctggagacggagtgcctagacctgcgcactaagctttgtgaccttgaaagagccaaccagaccctgaaggatgaatatgatgccctgcagatcacttttactgccttggagggaaaactgaggaaaactacggaagagaaccaggagctggtcaccagatggatggctgagaaagcccaggaagccaatcggcttaatgcagagaatgaaaaagactccaggaggcggcaagcccggctgcagaaagagcttgcagaagcagcaaaggaacctctaccagtcgaacaggatgatgacattgaggtcattgtggatgaaacttctgatcacacagaagagacctctcctgtgcgagccatcagcagagcagccactaagcgactctcgcagcctgctggaggccttctggattctatcactaatatctttgggagacgctctgtctcttccttcccagtcccccaggacaatgtggatactcatcctggttctggtaaagaagtgagggtaccagctactgccttgtgtgtcttcgatgcacatgatggggaagtcaacgctgtgcagttcagtccaggttcccggttactggccactggaggcatggaccgcagggttaagctttgggaagtatttggagaaaaatgtgagttcaagggttccctatctggcagtaatgcaggaattacaagcattgaatttgatagtgctggatcttacctcttagcagcttcaaatgattttgcaagccgaatctggactgtggatgattatcgattacggcacacactcacgggacacagtgggaaagtgctgtctgctaagttcctgctggacaatgcgcggattgtctcaggaagtcacgaccggactctcaaactctgggatctacgcagcaaagtctgcataaagacagtgtttgcaggatccagttgcaatgatattgtctgcacagagcaatgtgtaatgagtggacattttgacaagaaaattcgtttctgggacattcgatcagagagcatagttcgagagatggagctgttgggaaagattactgccctggacttaaacccagaaaggactgagctcctgagctgctcccgtgatgacttgctaaaagttattgatctccgaacaaatgctatcaagcagacattcagtgcacctgggttcaagtgcggctctgactggaccagagttgtcttcagccctgatggcagttacgtggcggcaggctctgctgagggctctctgtatatctggagtgtgctcacagggaaagtggaaaaggttctttcaaagcagcacagctcatccatcaatgcggtggcgtggtcgccctctggctcgcacgttgtcagtgtggacaaaggatgcaaagctgtgctgtgggcacagtactgacggggctctcagggctgggaggaccccagtgccctcctcagaagaagcacatgggctcctgcagccctgtcctggcaggtgatgtgctgggtatagcatggacctcccagagaagctcaagctatgtggcactgtagctttgccgtgaatgggatttctgaagatttgactgaggtctctcttggcctggaagaataacactgaaaaaacctgacgctgcggtcacttagcagaggctcaggttcttgccttgggaaacactactagctctgaccttccatacctcacttgggggagcacagggccccgctgggcctcctcaccaacggcagtgccaaaatcagcccccacatcaaggtggtgttctctgtgctttctctcgtccttccaaagtcggttctggcctaacgcatgtcccaacaccttgggttcatttgcccggtgaactcactttaagcattggattaacggaaactcccgaactacagacccctccctggtgggttgcatgaatgtgtctcattactgctgaaatgtcctcacatctctttcactgttcttcagagctttctggctctctttcccccacaaaattcgacatatttaaaaatctccgtgtggctttaaaaaatggttttttgtttttttgtttttttgaggtgggagaggatgtgtgaaaatcttttccagggaaatgggttcgctgcagaggtaaggatgtgttcctgtatcgatctgcagacacccagaaggtgggtgcacactgcatgcttgggggtgccaagggattcgagacctccaacatacttgtctgaaggtggtgattctggccatggcccctctgccaagcctgtgtgcgatgcccttggtgctttagtgcaagaagcctaggctcagaagcacagcagcgccatctttccgtttcaggggttgtgatgaaggccaaggaaaaacatttatctttactattttacctacgtataaagttttagttcattgggtgtgcgaaacaccctttttatcacttttaaatttgcactttattttttttcttccatgcttgttctctggacatttggggatgtgagtgttagagctggtgagagaggagtcaggtggccttcccaccgatggtcctggcctccacctgccctctcttccctgcctgatcaccgctttccaatttgcccttcagagaacttaagtcaaggagagttgaaattcacaggccagggcacatcttttatttatttcattatgttggccaacagaacttgattgtaaataataataaagaaatctgttatatacttttcaaactccaaaaaaa

SEQ ID NO: 404 - DNA, 9301 bp, Homo sapiens
gtggtttcctagaaacatgattgtttattggcattgatctcacagtctggtgaggacttctttactgataatgtcaagttcaggttatcctcccaaccaaggagcattcagcacagaacaaagtcgttatcctcctcactctgtccagtatacatttcccaacacccgccaccagcaggagttcgcagtccctgattatcgttcctctcatcttgaagtgagtcaggcatcacagcttttgcagcaacagcagcagcaacagcttcgaaggcgaccttccttgctttcagaatttcacccaggttctgacaggcctcaagaaaggagaactagttatgaaccgtttcatccaggcccatccccagtggatcatgattcactggaatcgaagcgaccacgtctggaacaggtttctgattctcattttcagcgtgtcagtgctgcggttttgcctttagtgcacccgctgccagaagggctgagggcttctgcagatgctaagaaggatccagcattcggaggcaaacatgaagctccatcctctccaatttcggggcaaccatgtggagatgatcaaaatgcttcaccttcaaaactctcaaaggaagagttaatacagagtatggatcgtgtagatcgagaaattgcaaaagtagaacagcagatccttaaactgaaaaagaaacaacaacagcttgaagaagaggcagctaaacctcctgagcctgagaagcccgtgtcccctcctcctgtggagcagaaacaccgcagtattgtccaaattatttatgatgagaatcggaaaaaagcagaagaagctcataaaatttttgaaggtcttggcccaaaagttgaactgccactgtataaccagccatcagataccaaggtgtaccatgagaacatcaagacaaaccaggtgatgaggaaaaaactcattttattttttaaaagaagaaatcatgcaagaaaacaaagggaacaaaaaatctgccagcgttatgatcagctcatggaggcatgggagaaaaaagtggacagaatagaaaataatcctcggaggaaagctaaagaaagcaaaacaagggaatactatgaaaagcagtttccagaaattcgaaaacaaagagaacagcaagaaagatttcagcgagttgggcagaggggagctggtctttcagccaccattgctaggagtgagcatgagatttctgaaattattgatgggctctctgagcaggagaataatgagaaacaaatgcggcagctctctgtgattccacctatgatgtttgatgcagaacaaagacgagtcaagttcattaacatgaatgggcttatggaggaccctatgaaagtgtataaagataggcagtttatgaatgtttggactgaccatgaaaaggagatctttaaggacaagtttatccagcatccaaaaaactttggactaattgcatcatacttggagaggaagagtgttcctgattgtgttttgtattactatttaaccaagaaaaatgagaattataaagccctcgtcagaaggaattatgggaaacgcagaggcagaaaccagcaaattgctcgaccctcgcaagaagaaaaagtagaagaaaaagaagaggataaagcagaaaaaacagaaaaaaaagaagaagaaaagaaagatgaagaggaaaaagatgaaaaagaagactccaaagaaaataccaaggaaaaggacaagatagatggtacagcagaagaaactgaggaaagagagcaagccacaccccgggggcgaaagactgccaacagtcagggccgccgtaagggccggatcaccaggtccatgacaaacgaagctgcagctgccagtgctgcagccgcagcggctactgaagagcccccaccacctctgccaccgccaccagaacccatttctacagagcctgtggagacctctcgatggacagaagaagaaatggaagttgctaaaaaaggtctagtagaacatggtcgtaactgggcagcaattgctaaaatggtgggaacgaaaagtgaagctcaatgtaaaaacttctattttaactataaaaggcgacacaatcttgacaacctcttacagcagcataaacagaaaacttcacgaaaacctcgtgaagagcgagatgtgtctcaatgtgaaagtgtcgcttccactgtttctgctcaggaggatgaagatattgaagcctccaatgaagaagaaaatccagaagacagcgaaggtgcagaaaatagttctgatacagaaagtgctccttctccttcaccagttgaagctgtcaagcccagcgaggacagtcctgaaaatgctacttctcgaggaaacacagaacctgcggttgagcttgagcccaccacggaaactgcacccagtacatctccctccttagcagttccaagtacaaaaccagctgaagatgaaagtgtggagacccaggtgaatgacagcatcagtgctgagacagcagagcagatggatgtagatcagcaggagcacagtgctgaagagggttctgtttgtgatcccccacccgctaccaaagctgactctgtggacgttgaagtgagggtgccagaaaaccatgcatctaaagttgaaggtgataataccaaagaaagagacttggatagagccagtgagaaggtggaacctagagatgaagatttggtggtagctcagcaaataaatgcccaaaggcccgagccccagtcagacaatgattccagtgccacgtgcagcgctgatgaggatgtggatggagagccagagaggcagagaatgtttcctatggactcaaagccttcactgttaaaccccactggatctatactcgtctcatctccgttaaaaccaaatccactggatctgccacagcttcagcatcgagctgctgttatcccaccaatggtatcctgcaccccatgtaacataccaattggaaccccagtgagcggctatgctctctaccagcgacacattaaagcaatgcatgagtcagcactcctggaggagcagcggcagagacaagaacagatagatttggaatgtagaagttctacaagtccatgtggcacatccaagagtccaaacagagagtgggaagtccttcagcctgctccacatcaagtgataactaatctccctgaaggcgttcggcttccgacaactcgaccaaccaggccaccgccccctctcatcccgtcatccaaaaccacagtggcttcagaaaaaccatcttttataatgggaggctccatctcacagggaacaccaggcacttatttgacttctcataatcaggcttcctacactcaagaaacacccaagccgtcagtgggatctatctctcttggactgccacggcaacaggaatctgccaaatcagctactttgccctacatcaagcaggaagaattttctccccgaagccaaaactcacaacctgagggtctgttggtcagggcccaacatgaaggtgtagtcagaggtaccgcaggagccatacaagaaggaagtataactcggggaactccaaccagcaaaatttcagtggagagcattccatccctacggggctctatcactcagggcaccccggctctgccccagactggcataccaacagaggctttggtgaaggggtccatttcgagaatgcccattgaagacagcagtcctgagaaaggcagagaggaagctgcatccaaaggccatgttatttatgaaggcaaaagtggacatatcttgtcatatgataatattaagaatgcccgagaagggactaggagtccaagaacagctcatgaaatcagtttaaagagaagctatgaatcagtggaaggaaatataaagcaagggatgtcaatgagggagtctcctgtatcagcaccgttagaggggctgatatgccgagcattacccagggggagtcctcattctgacctcaaagaaaggactgtattgtctggctccataatgcaggggacaccaagagcaacaactgaaagctttgaagatggccttaaatatcccaaacaaattaaaagggaaagtcctcccatacgagcatttgaaggtgccattaccaaaggaaaaccatatgatggcatcaccaccatcaaagaaatggggcgttccattcatgagattccaaggcaagatattttaactcaggaaagtcggaaaactccagaagtggtccagagcacacggccgataattgagggttccatttcccagggcacaccaataaagtttgacaacaactcaggtcaatctgccatcaaacacaatgtcaaatccttaatcacggggcctagcaaactatcccgtggaatgcctccgctggaaattgtgccagagaacataaaagtggtagaacggggaaaatatgaggatgtgaaagcaggcgagaccgtgcgttcccggcacacgtcagtggtaagctctggcccctccgttcttaggtccacactgcatgaagctcccaaagcacaactgagccctgggatttatgatgacaccagtgcacggaggacccctgtgagttatcaaaacaccatgtccagaggctcacccatgatgaacagaacttctgatgttacaatttcttctaacaagtctaccaatcatgaaaggaaatcgacactgacccctacccagagggaaagtatcccagcgaagtctccagtgcctggggtggaccctgtcgtgagccacagtccgtttgatccccatcacagaggcagcactgcaggcgaggtttatcggagccacctgcccacgcacttggatccagccatgccttttcacagggctttggatcctgcagcggctgcttacctgtttcagagacagctttcaccaactccaggttacccaagtcagtatcagctttacgcaatggagaacacaagacagacaatcttaaatgattacattacctcacaacagatgcaagtgaacttgcgtccagatgtggccagaggactctccccaagagagcagccactgggtctcccatacccagcaacgagaggaatcattgacctgaccaatatgcctccaacaattttagtgcctcatccagggggaacaagcactcctcccatggacagaatcacttatattcctggtacacagattactttccctcccaggccgtacaactctgcttccatgtctccaggacacccaacacaccttgcagctgctgcaagtgctgagagggaacgggaacgggagcgggagaaggagcgggagcgggaacggattgctgcagcttcctccgacctctacctgcggccaggctcagaacagcctggccgacctggcagtcatggatatgttcgctccccttccccttcagtaagaactcaggagaccatgttgcaacagagacccagtgttttccaaggaaccaatggaaccagtgtaatcacacctttggatccaactgctcagctacgaatcatgccactgcctgctgggggcccttcaataagccaaggcctgccagcctcccgttacaacactgctgcggatgccctggctgctcttgtggatgctgcagcttctgcaccccagatggatgtgtccaaaacaaaagagatatcttctcacaggtatgaaacacctagcgatgctattgaggtgataagtcctgccagctcacctgcgccaccccaggagaaactgcagacctatcagccagaggttgttaaggcaaatcaagcggaaaatgatcctaccagacaatatgaaggaccattacatcactatcgaccacagcaggaatcaccatctccccaacaacagctgcccccttcttcacaggcagagggaatggggcaagtgcccaggacccatcggctgatcacacttgctgatcacatctgtcaaattatcacacaagattttgctagaaatcaagtttcctcgcagactccccagcagcctcctacttctacattccagaactcaccttctgctttggtatctacacctgtgaggactaaaacatcaaaccgttacagcccagaatcccaggctcagtctgtccatcatcaaagaccaggttcaagggtctctccagaaaatcttgtggacaaatccaggggaagtaggcctggaaaatccccagagaggagtcacgtctcttcggagccctacgagcccatctccccaccccaggttccggttgtgcatgagaaacaggacagcttgctgctcttgtctcagaggggcgcagagcctgcagagcagaggaatgatgcccgctcaccagggagtataagctacttgccttcattcttcaccaagcttgaaaatacatcacccatggttaaatcaaagaagcaggagatttttcgtaagttgaactcctctggtggaggtgactctgatatggcagctgctcagccaggaactgagatctttaatctgccagcagttactacgtcaggctcagttagctctagaggccattcttttgctgatcctgccagtaatcttgggctggaagacattatcaggaaggctctcatgggaagctttgatgacaaagttgaggatcatggagttgtcatgtcccagcctatgggagtagtgcctggtactgccaacacctcagttgtgaccagtggtgagacacgaagagaggaaggggacccatcacctcattcaggaggagtttgcaaaccaaagctgatcagcaagtcaaacagcaggaaatctaagtctcctatacctgggcaaggctacttaggaacggaacggccctcttcagtctcctctgtacattcagaaggggattaccataggcagacgccagggtgggcctgggaagacaggccctcttcaacaggctcaactcagtttccttataaccctctgactatgcggatgctcagcagtactccaccaacaccgattgcatgtgctccctctgcggtgaaccaagcagctcctcaccaacagaacaggatctgggagcgagagcctgccccactgctctcagcacagtacgagaccctgtcggatagtgatgactgaactgcacaaagtgaggggaacagggtgcaggagagggatctctagtttttgtggtttaatttttagtagcaggtcaaaaacctgccctcctgtgacttattccctgagacttttcaggagagccagcccacagatgatgaagaaatgatggaagttcatttggagagtcaaatgggaaaaaaacaaacaaaaaactgcctttgatacaggcaattcagtggactataataatagtggagggttgagatgtagagtttttaaaaagtgaacagttgctgttcttacatctgtaaagaaaaccataatgtctttaaatcactcttctgtaaatagatgacctttttgcagtgtatatccccttgctgtagtatctggtgtacttatgttcaaatcagcgcatcaactttgggggtgatttttaaaaatctttttgtctatctatctttttaaccctagccttctaaacaacctcatacagcccagttacataatgttggctgtcacgggcattgtacttttatctgatattgtttcctctaaattcagctttccagtgatgtttaaaatcttgtgaaaatgtttagatttttaacacagaccctgtcataaaatctgtacattagggtcaaaaggtaaaagtaacaaattctgccatattgtaaatttccagtgcaggctttaatttttttttttcattagtagcactgaaaaaatattactgcatgggtatgttctagttcagtttataaagttttaaaggcttatttgaggcatacctcactgttacgcacactggtaatttaaccatgcccctaagtattccttttctcctgcatttgatgcagcccaacaaagcttttgttttgaaataaatttgactaccctgtccatagctacagtagattatttgtggtttaaggctcctggtgtctcaggttccaaaggaaaagcttacatatttttcccttagtttgaatatatgattggttgggttaaaagataatgatctgtgtagtatttagataagctttatgctgcatcctgaaaaactcatggtgaacacagtcctttttccccatcactatggaccagcatttactctcactttgctcccttgggacaagagtttactgttaaatgttttcatttcacagagtctcaaggtgcaaataatttaaaagactgaattctaaactaattatggtactagagggccagttttatctttcattaagaattgcttgctgaattttaaagtttttttcatacaatttatcatagcatttaagtatctttctataacatagatactaacagttttgggagaatgccactggtaactggaaaggggagaaacagatctctcaggatgataaaaattagcactttacagactttcaagtagacctaaacttttaaacaaaagtactcaaggcttttaaggaagcagctctgtgattagctactgaccaagaccctcctatcactggtgtctaatccctatgttacagatgaagacacaggtttagtactttgcccatatagttaaattagtgacagagataggccataagcccacatttgtcttcagtcaaagctttcactcctgtccctgttccactcctgtatacctgaggtccccaacataaactttagatcaggcttagtggtcagcattcctagtacttggaaagttggtattttttacaacagatatatgtaaacatataaaaatttcaaaatgaatgaaaaacagtgactaaatgttccacttcacagttttctgctgaatttttttttttcaggtactggtaatattttagagtttgttaataatttatattgccaacctaccataaaagagattatgatggtatttttctatgaccctgagggtcttaagctattctgagtcagaatacagttgacccttgaacaacacgggtttgaactgtgtgggtccacttatacatggattttcttccacctctgccacccaagatagcaagaccaaccccttctcatcctcagcctattcaacatgaagatgacaaggatgaagaccttcatgatgatccacttccacttaatgaatagtaaatatattttctcttccttataatcttaacaaacattttctcttctctagcttactttattgtaagaatacagtatataatacatatacaaaatatgtgtcaaaaaaaaaaaaaaaaa

SEQ ID NO: 405 - DNA, 7191 bp, Homo sapiens
acacagtactctcagcttgttggtggaagcccctcatctgccttcattctgaaggcagggcccggcagaggaaggatcagagggtcgcggccggagggtcccggccggtggggccaactcagagggagaggaaagggctagagacacgaagaacgcaaaccatcaaatttagaagaaaaagccctttgactttttccccctctccctccccaatggctgtgtagcaaacatccctggcgataccttggaaaggacgaagttggtctgcagtcgcaatttcgtgggttgagttcacagttgtgagtgcggggctcggagatggagccgtggtcctctaggtggaaaacgaaacggtggctctgggatttcaccgtaacaaccctcgcattgaccttcctcttccaagctagagaggtcagaggagctgctccagttgatgtactaaaagcactagattttcacaattctccagagggaatatcaaaaacaacgggattttgcacaaacagaaagaattctaaaggctcagatactgcttacagagtttcaaagcaagcacaactcagtgccccaacaaaacagttatttccaggtggaactttcccagaagacttttcaatactatttacagtaaaaccaaaaaaaggaattcagtctttccttttatctatatataatgagcatggtattcagcaaattggtgttgaggttgggagatcacctgtttttctgtttgaagaccacactggaaaacctgccccagaagactatcccctcttcagaactgttaacatcgctgacgggaagtggcatcgggtagcaatcagcgtggagaagaaaactgtgacaatgattgttgattgtaagaagaaaaccacgaaaccacttgatagaagtgagagagcaattgttgataccaatggaatcacggtttttggaacaaggattttggatgaagaagtttttgagggggacattcagcagtttttgatcacaggtgatcccaaggcagcatatgactactgtgagcattatagtccagactgtgactcttcagcacccaaggctgctcaagctcaggaacctcagatagatgaggcaaacatcgttgatgattttcaagaatacaactatggaacaatggaaagttaccagacagaagctcctaggcatgtttctgggacaaatgagccaaatccagttgaagaaatatttactgaagaatatctaacgggagaggattatgattcccagaggaaaaattctgaggatacactatatgaaaacaaagaaatagacggcagggattctgatcttctggtagatggagatttaggcgaatatgatttttatgaatataaagaatatgaagataaaccaacaagcccccctaatgaagaatttggtccaggtgtaccagcagaaactgatattacagaaacaagcataaatggccatggtgcatatggagagaaaggacagaaaggagaaccagcagtggttgagcctggtatgcttgtcgaaggaccaccaggaccagcaggacctgcaggtattatgggtcctccaggtctacaaggccccactggaccccctggtgaccctggcgataggggccccccaggacgtcctggcttaccaggggctgatggtctacctggtcctcctggtactatgttgatgttaccgttccgttatggtggtgatggttccaaaggaccaaccatctctgctcaggaagctcaggctcaagctattcttcagcaggctcggattgctctgagaggcccacctggcccaatgggtctaactggaagaccaggtcctgtgggggggcctggttcatctggggccaaaggtgagagtggtgatccaggtcctcagggccctcgaggcgtccagggtccccctggtccaacgggaaaacctggaaaaaggggtcgtccaggtgcagatggaggaagaggaatgccaggagaacctggggcaaagggagatcgagggtttgatggacttccgggtctgccaggtgacaaaggtcacaggggtgaacgaggtcctcaaggtcctccaggtcctcctggtgatgatggaatgaggggagaagatggagaaattggaccaagaggtcttccaggtgaagctggcccacgaggtttgctgggtccaaggggaactccaggagctccagggcagcctggtatggcaggtgtagatggccccccaggaccaaaagggaacatgggtccccaaggggagcctgggcctccaggtcaacaagggaatccaggacctcagggtcttcctggtccacaaggtccaattggtcctcctggtgaaaaaggaccacaaggaaaaccaggacttgctggacttcctggtgctgatgggcctcctggtcatcctgggaaagaaggccagtctggagaaaagggggctctgggtccccctggtccacaaggtcctattggatacccgggcccccggggagtaaagggagcagatggtgtcagaggtctcaagggatctaaaggtgaaaagggtgaagatggttttccaggattcaaaggtgacatgggtctaaaaggtgacagaggagaagttggtcaaattggcccaagaggggaagatggccctgaaggacccaaaggtcgagcaggcccaactggagacccaggtccttcaggtcaagcaggagaaaagggaaaacttggagttccaggattaccaggatatccaggaagacaaggtccaaagggttccactggattccctgggtttccaggtgccaatggagagaaaggtgcacggggagtagctggcaaaccaggccctcggggtcagcgtggtccaacgggtcctcgaggttcaagaggtgcaagaggtcccactgggaaacctgggccaaagggcacttcaggtggcgatggccctcctggccctccaggtgaaagaggtcctcaaggacctcagggtccagttggattccctggaccaaaaggccctcctggaccacctgggaaggatgggctgccaggacaccctgggcaacgtggggagactggatttcaaggcaagaccggccctcctgggccagggggagtggttggaccacagggaccaaccggtgagactggtccaataggggaacgtgggcatcctggccctcctggccctcctggtgagcaaggtcttcctggtgctgcaggaaaagaaggtgcaaagggtgatccaggtcctcaaggtatctcagggaaagatggaccagcaggattacgtggtttcccaggggaaagaggtcttcctggagctcagggtgcacctggactgaaaggaggggaaggtccccagggcccaccaggtccagttggctcaccaggagaacgtgggtcagcaggtacagctggcccaattggtttaccagggcgcccgggacctcagggtcctcctggtccagctggagagaaaggtgctcctggagaaaaaggtccccaagggcctgcagggagagatggagttcaaggtcctgttggtctcccagggccagctggtcctgccggctcccctggggaagacggagacaagggtgaaattggtgagccgggacaaaaaggcagcaagggtgacaagggagaaaatggccctcccggtcccccaggtcttcaaggaccagttggtgcccctggaattgctggaggtgatggtgaaccaggtcctagaggacagcaggggatgtttgggcaaaaaggtgatgagggtgccagaggcttccctggacctcctggtccaataggtcttcagggtctgccaggcccacctggtgaaaaaggtgaaaatggggatgttggtcccatggggccacctggtcctccaggcccaagaggccctcaaggtcccaatggagctgatggaccacaaggacccccagggtctgttggttcagttggtggtgttggagaaaagggtgaacctggagaagcagggaacccagggcctcctggggaagcaggtgtaggcggtcccaaaggagaaagaggagagaaaggggaagctggtccacctggagctgctggacctccaggtgccaaggggccaccaggtgatgatggccctaagggtaacccgggtcctgttggttttcctggagatcctggtcctcctggggaacctggccctgcaggtcaagatggtgttggtggtgacaagggtgaagatggagatcctggtcaaccgggtcctcctggcccatctggtgaggctggcccaccaggtcctcctggaaaacgaggtcctcctggagctgcaggtgcagagggaagacaaggtgaaaaaggtgctaagggggaagcaggtgcagaaggtcctcctggaaaaaccggcccagtcggtcctcagggacctgcaggaaagcctggtccagaaggtcttcggggcatccctggtcctgtgggagaacaaggtctccctggagctgcaggccaagatggaccacctggtcctatgggacctcctggcttacctggtctcaaaggtgaccctggctccaagggtgaaaagggacatcctggtttaattggcctgattggtcctccaggagaacaaggggaaaaaggtgaccgagggctccctggaactcaaggatctccaggagcaaaaggggatgggggaattcctggtcctgctggtcccttaggtccacctggtcctccaggtttaccaggtcctcaaggcccaaagggtaacaaaggctctactggacccgctggccagaaaggtgacagtggtcttccagggcctcctgggtctccaggtccacctggtgaagtcattcagcctttaccaatcttgtcctccaaaaaaacgagaagacatactgaaggcatgcaagcagatgcagatgataatattcttgattactcggatggaatggaagaaatatttggttccctcaattccctgaaacaagacattgagcatatgaaatttccaatgggtactcagaccaatccagcccgaacttgtaaagacctgcaactcagccatcctgacttcccagatggtgaatattggattgatcctaaccaaggttgctcaggagattccttcaaagtttactgtaatttcacatctggtggtgagacttgcatttatccagacaaaaaatctgagggagtaagaatttcatcatggccaaaggagaaaccaggaagttggtttagtgaatttaagaggggaaaactgctttcatacttagatgttgaaggaaattccatcaatatggtgcaaatgacattcctgaaacttctgactgcctctgctcggcaaaatttcacctaccactgtcatcagtcagcagcctggtatgatgtgtcatcaggaagttatgacaaagcacttcgcttcctgggatcaaatgatgaggagatgtcctatgacaataatccttttatcaaaacactgtatgatggttgtgcgtccagaaaaggctatgaaaagactgtcattgaaatcaatacaccaaaaattgatcaagtacctattgttgatgtcatgatcaatgactttggtgatcagaatcagaagttcggatttgaagttggtcctgtttgttttcttggctaagattaagacaaagaacatatcaaatcaacagaaaatataccttggtgccaccaacccattttgtgccacatgcaagttttgaataaggatggtatagaaaacaacgctgcatatacaggtaccatttaggaaataccgatgcctttgtgggggcagaatcacatggcaaaagctttgaaaatcataaagatataagttggtgtggctaagatggaaacagggctgattcttgattcccaattctcaactctccttttcctatttgaatttctttggtgctgtagaaaacaaaaaaagaaaaatatatattcataaaaaatatggtgctcattctcatccatccaggatgtactaaaacagtgtgtttaataaattgtaattattttgtgtacagttctatactgttatctgtgtccatttccaaaacttgcacgtgtccctgaattccatctgactctaattttatgagaattgcagaactctgatggcaataaatatatgtattatgaaaaaataaagttgtaatttctgatgactctaagtccctttctttggttaataataaaatgcctttgtatatattgatgttgaagagttcaattatttgatgtcgccaacaaaattctcagagggcaaaaatctggaagacttttggaagcacactctgatcaactcttctctgccgacagtcattttgctgaatttcagccaaaaatattatgcattttgatgctttattcaaggctatacctcaaactttttcttctcagaatccaggatttcacaggatacttgtatatatggaaaacaagcaagtttatatttttggacagggaaatgtgtgtaagaaagtatattaacaaatcaatgcctccgtcaagcaaacaatcatatgtatactttttttctacgttatctcatctccttgttttcagtgtgcttcaataatgcaggttaatattaaagatggaaattaagcaattatttatgaatttgtgcaatgttagattttcttatcaatcaagttcttgaatttgattctaagttgcatattataacagtctcgaaaattattttacttgcccaacaaatattacttttttcctttcaagataattttataaatcatttgacctacctaattgctaaatgaataacatatggtggactgttattaagagtatttgttttaagtcattcaggaaaatctaaacttttttttccactaaggtatttactttaaggtagcttgaaatagcaatacaatttaaaaattaaaaactgaattttgtatctattttaagtaatatatgtaagacttgaaaataaatgttttatttcttatataaagtgttaaattaattgataccagatttcactggaacagtttcaactgataatttatgacaaaagaacatacctgtaatattgaaattaaaaagtgaaatttgtcataaagaatttcttttatttttgaaatcgagtttgtaaatgtccttttaagaagggagatatgaatccaataaataaactcaagtcttggctacctggaaaaaaaaaaaaaaaaaa

SEQ ID NO: 406 - DNA, 4009 bp, Homo sapiens
ccctccctccctcctcccccgcccgcttccgcccggcttattatcctccttattgacaaacagagcggtcgcggcggcgactctcggcgtgcggtgatagccaagccatgggagacaagaagagccccaccaggaaacctcgacctgtctcccagttggttgcacagcaggttactcagcagtttgtgcctcctacacagtcaaagaaagagaaaaaagataaagtagaaaaagaaaaaagtgaaaaggaaacaactagcaaaaagaatagccataagaaaaccaggccaagattgaaaaatgtggatcggagtagtgctcagcatttggaagttactgttggagatctgacagtcattattacagactttaaggagaaaacaaagtcaccgcctgcatctagtgctgcttctgcagatcaacacagtcaaagcggctctagctctgataacacagagagaggaatgtccaggtcatcttcacccagaggagaagcctcatcattgaatggagaatctcattaaagtttattttctccaatttcttagtcacttctgtcctaccatgcaaatacacagattatgccaagaggtaccacattttcatgacagatacattcatgcacaatccataatttgagttttacataaaatagaaatttgttagaatttgttagattttattgcaatgatgcctaccaaacatttccagacttaacattttggtctctgcagttaagtgccatgaaaatgtggttgaattattcattatgcagtgttattggtaagtgtattttcacttttagtttagtgaattctaacacataattcttgaattctctactattggcatgtaacgaatttaaattttttataacatagtgcaagctgcctaaatatgtattatttgagaattgtgaaacagatagttatatgtatacaagtcaaagaacaacttaactattgctgcaacaggtttttcttaatggttatcctcttaaatacacctgctggtacttggtgtggttaaataggaaaattgttattaaataaagaatttgtatgaacctttgccaatgtttttgacacgttttactaattattgttcctgaattatgtttctggttttatctattttttgaggtttttttgtttgcttatttttcaaaacattcatttattgtaatgtttactagcggactagtaaacaataaaacattgattatttagctttataattcaggtttagtgctattgtcattgaacactggtattttctgtatcatataaaacattaaaattcaaataattataagcatttggcaaaaacaagagaaaagaaacttgccatattttacaagctgcaattttagaaaagctttaacttaatgatagttttatcattgttttcttgtcccaaacttatccagggccatagaagtatgaatctaattaaaacagaaatgggaattattgcacagaaatgggaaataactaattttaaatcagtcaaattggcttcttattaaatacaataattcttatgaaaatcatagtaccctattttcagacacagctgccagtttacacatttctcagtatcctgaaaggaaaaaagtatagccccacttatactatgtaaaattaccaataaaatatttttatgactacagattttgcatttttgtttacaactatttaaagagttttatgttgtatttagaatttcaacctagaaaccacacagtacttaaattctcctggggtctcctgctttctcttaaccatttgcttaatatatatctacctaaaggagacttctgaattgtaaatgaacttaaaaatagaatgtggatgcaaaatatcacataagacatcatgataacatttgaagaaaaaataaaactgtagaccctaacagttgtgatatttggtggtttcatgtggtaatgtaattttctgtttaattacagtactttttacaggcacagtggtactgtcttttttgtaagatgctagttgtgaaatacaattaattgcatacagtaaaagtctgtgattaaaacatttatatacctcattctttagtgttgttaaatgaaaaattaaaatttgtgtttattataagatactttcaatggaataccagctaaccagatatgttcctttaaaacatgaatttttttgtcttattctgtttttaacatgtttcaaatgttttatacatttttggagatagtaaaaatttaaaaatgtaatagggaaaatatttaatttttaagtcaaaaactatgctttaaaggaattacatcttatgatcaaataactttcaggatgtattttaaatgagctgcaagagagaaaaatctgacaggagatgggattttacctgaatggagcatactcatatttctacataggtgggaagatactcatctttctacatagacgggaacacggtgtagcatggagattaagcgtgctaactgacacctcatgtttgaatcctgttgtagaatggaaatgagcttaaattacccaagcttactttccatctataaaacagggctaataatggtaatcacatctaatttatagggtttttgggaggattaagtcaatccgtgtaaaattcttaattatctgacacatactggtcactcagtaaatgtgagcttttaccattgttataggtaaaatcccattacaaaaatacaaaaatattttttgtaacagttattttcctgccctcttggatgacctaaagtaatagtgttttatagatttcactaaattttcagtgtaatatcagatgttttctctggatgcagaaagaccatctttccataattaaagaacctggtgggtgtgcactatgagattggagaaatgaattaagttgacttgaaattattttacttttattaatcacaggtatctcaacctgcctttgtttcaccctacttcaagtacacttccacaccaggaaaacagacccaaattccataaacagaactgacgttaaaatatgcgaaagattcagaacctaggtttagggtacatgtttttctctgtttcatgaacttacagtgtggtttgagcactgggttcttttagccaaattccatacaaaaagaatttggatgttttccagcatttattaccttactttgctataagtaagagtgaagataggccgggtgtgatggctcatgccagtaatcccagcactttgggctgaagcaggcagatattttgagcccaggaccagcctgggcaacatggtgaaagctcatctctatgaaaaaatttgaatatacatatatatatatatgtatatttaaaaagtgaatataatttgaggcacagaagaatattcttaaaaccttttgtattatacaatagaaataaaggttttatttttattaaatgctttcctaaaatgatagtggataatagacaaagtgaaaacatttaaaaaggaagagaaacttcagcctttctaagttgatagcatgtttattaacttttagataaagatccttatagactgaaagaatgtagcctctgcattaatggtaaatggtctagaagttttcgtttccactgaggcttccgccactcgcttttttaaacttcctgctatggtttggatatggtttgtcctcaccaaaactcatgctgaggcctgagtccccagtttgattgtgttggtaggtggtgcctttaagaggtgattaggtcattgagatggattaaaggctttctcatgaggctcagttagttctggaatggattcgctcttgcaggaatggatgaattctcacaagagtgggttgttatgaagtgaggatgcttcttgtgttctgttctctttgccctcctcagttcaccatctgctttccaccatgagttgaagcagcatgaggccctcatcagatgggctccctgatcttggactcctcagcctttggactcataagccaaaataaatctgttttctttataaa

SEQ ID NO: 407 - DNA, 2386 bp, Homo sapiens
ggaggaggaagcaagcgagggggctggttcctgagcttcgcaattcctgtgtcgccttctgggctcccagcctgccgggtcgcatgatccctccggccggagctggtttttttgccagccaccgcgaggccggctgagttaccggcatccccgcagccacctcctctcccgacctgtgatacaaaagatcttccgggggctgcacctgcctgcctttgcctaaggcggatttgaatctctttctctcccttcagaatcttatcttggctttggatcttagaagagaatcactaaccagagacgagactcagtgagtgagcaggtgttttggacaatggactggttgagcccatccctattataaaaatgtctcagagcaaccgggagctggtggttgactttctctcctacaagctttcccagaaaggatacagctggagtcagtttagtgatgtggaagagaacaggactgaggccccagaagggactgaatcggagatggagacccccagtgccatcaatggcaacccatcctggcacctggcagacagccccgcggtgaatggagccactggccacagcagcagtttggatgcccgggaggtgatccccatggcagcagtaaagcaagcgctgagggaggcaggcgacgagtttgaactgcggtaccggcgggcattcagtgacctgacatcccagctccacatcaccccagggacagcatatcagagctttgaacaggatacttttgtggaactctatgggaacaatgcagcagccgagagccgaaagggccaggaacgcttcaaccgctggttcctgacgggcatgactgtggccggcgtggttctgctgggctcactcttcagtcggaaatgaccagacactgaccatccactctaccctcccacccccttctctgctccaccacatcctccgtccagccgccattgccaccaggagaaccactacatgcagcccatgcccacctgcccatcacagggttgggcccagatctggtcccttgcagctagttttctagaatttatcacacttctgtgagacccccacacctcagttcccttggcctcagaattcacaaaatttccacaaaatctgtccaaaggaggctggcaggtatggaagggtttgtggctgggggcaggagggccctacctgattggtgcaacccttaccccttagcctccctgaaaatgtttttctgccagggagcttgaaagttttcagaacctcttccccagaaaggagactagattgcctttgttttgatgtttgtggcctcagaattgatcattttccccccactctccccacactaacctgggttccctttccttccatccctaccccctaagagccatttaggggccacttttgactagggattcaggctgcttgggataaagatgcaaggaccaggactccctcctcacctctggactggctagagtcctcactcccagtccaaatgtcctccagaagcctctggctagaggccagccccacccaggagggagggggctatagctacaggaagcaccccatgccaaagctagggtggcccttgcagttcagcaccaccctagtcccttcccctccctggctcccatgaccatactgagggaccaactgggcccaagacagatgccccagagctgtttatggcctcagctgcctcacttcctacaagagcagcctgtggcatctttgccttgggctgctcctcatggtgggttcaggggactcagccctgaggtgaaagggagctatcaggaacagctatgggagccccagggtcttccctacctcaggcaggaagggcaggaaggagagcctgctgcatggggtggggtagggctgactagaagggccagtcctgcctggccaggcagatctgtgccccatgcctgtccagcctgggcagccaggctgccaaggccagagtggcctggccaggagctcttcaggcctccctctctcttctgctccacccttggcctgtctcatccccaggggtcccagccaccccgggctctctgctgtacatatttgagactagtttttattccttgtgaagatgatatactatttttgttaagcgtgtctgtatttatgtgtgaggagctgctggcttgcagtgcgcgtgcacgtggagagctggtgcccggagattggacggcctgatgctccctcccctgccctggtccagggaagctggccgagggtcctggctcctgaggggcatctgcccctcccccaacccccaccccacacttgttccagctctttgaaatagtctgtgtgaaggtgaaagtgcagttcagtaataaactgtgtttactcagtgaaaaaaaaaaaaaaaaaa

SEQ ID NO: 408 - DNA, 3373 bp, Homo sapiens
agatgccaaaacagcacccagctgcccatcaagattaccagaagggccccagttcctggcttctctgtggctcacactctggtcctattgcctacccttgggaactcagagcatcctctttctcttttctgctgagctggtggctgcaccgagttgcctctgtctctttaagagagaaagagagagcgagagacggaaatcaggaagtgcgagagagctgagagccaggactcagtgctgagcttggtgtcccaccgccacaaggaggcagggaagaaacccactagtcccagctcctggggtggcacagacattgcaactggccctgcctgtgggtcctaggggcccttggctaccaggaggctaagaacactgctcatgaatgacagtgagccctgaaagctctgggggtgtcacccagtcccacaagcctgcatcccctgcagtggagatgggctcagctcctggacgtgccacagacagaaagcataacatacactcgccaggaagagcctttgcctgactcagggcagctcagagtgtgggaaatccggagagctggttgctgtgaaggtcttcaacactaccagctacctgcggccccgcgaggtgcaggtgagggagtttgaggtcctgcggaagctgaaccaccagaacattgtcaagctctttgcggtggaggagacgggcggaagccggcagaaggtactggtgatggagtactgctccagtgggagcctgctgagtgtgctggagagccctgagaatgcctttgggctgcctgaggatgagttcctggtggtgctgcgctgtgtggtggccggcatgaaccacctgcgggagaacggcattgtgcatcgcgacatcaagccggggaacatcatgcgcctcgtaggggaggaggggcagagcatctacaagctgacagacttcggcgctgcccgggagctggatgatgatgagaagttcgtctcggtctatgggactgaggagtacctgcatcccgacatgtatgagcgggcggtgcttcgaaagccccagcaaaaagcgttcggggtgactgtggatctctggagcattggagtgaccttgtaccatgcagccactggcagcctgcccttcatcccctttggtgggccacggcggaacaaggagatcatgtaccggatcaccacggagaagccggctggggccattgcaggtgcccagaggcgggagaacgggcccctggagtggagctacaccctccccatcacctgccagctgtcactggggctgcagagccagctggtgcccatcctggccaacatcctggaggtggagcaggccaagtgctggggcttcgaccagttctttgcggagaccagtgacatcctgcagcgagttgtcgtccatgtcttctccctgtcccaggcagtcctgcaccacatctatatccatgcccacaacacgatagccattttccaggaggccgtgcacaagcagaccagtgtggccccccgacaccaggagtacctctttgagggtcacctctgtgtcctcgagcccagcgtctcagcacagcacatcgcccacacgacggcaagcagccccctgaccctcttcagcacagccatccctaaggggctggccttcagggaccctgctctggacgtccccaagttcgtccccaaagtggacctgcaggcggattacaacactgccaagggcgtgttgggcgccggctaccaggccctgcggctggcacgggccctgctggatgggcaggagctaatgtttcgggggctgcactgggtcatggaggtgctccaggccacatgcagacggactctggaagtggcaaggacatccctcctctacctcagcagcagcctgggaactgagaggttcagcagcgtggctggaacgcctgagatccaggaactgaaggcggctgcagaactgaggtccaggctgcggactctagcggaggtcctctccagatgctcccaaaatatcacggagacccaggagagcctgagcagcctgaaccgggagctggtgaagagccgggatcaggtacatgaggacagaagcatccagcagattcagtgctgtttggacaagatgaacttcatctacaaacagttcaagaagtctaggatgaggccagggcttggctacaacgaggagcagattcacaagctggataaggtgaatttcagtcatttagccaaaagactcctgcaggtgttccaggaggagtgcgtgcagaagtatcaagcgtccttagtcacacacggcaagaggatgagggtggtgcacgagaccaggaaccacctgcgcctggttggctgttctgtggctgcctgtaacacagaagcccagggggtccaggagagtctcagcaagctcctggaagagctatctcaccagctccttcaggaccgagcaaagggggctcaggcctcgccgcctcccatagctccttaccccagccctacacgaaaggacctgcttctccacatgcaagagctctgcgaggggatgaagctgctggcatctgacctcctggacaacaaccgcatcatcgaacggctaaatagagtcccagcacctcctgatgtctgagctccatggggcacatgaggcatcctgaagcattagaatgattccaacactgctcttctgcaccatgagaccaacccagggcaagatcccatcccatcacatcagcctacctccctcctggctgctggccaggatgtcgccagcattaccttccactgcctttctccctgggaagcagcacagctgagactgggcaccaggccacctctgttgggacccacaggaaagagtgtggcagcaactgcctggctgacctttctatcttctctaggctcaggtactgctcctccatgcccatggctgggccgtggggagaagaagctctcatacgccttcccactccctctggtttataggacttcactccctagccaacaggagaggaggcctcctggggtttccccagggcagtaggtcaaacgacctcatcacagtcttccttcctcttcaagcgtttcatgttgaacacagctctctccgctcccttgtgatttctgagggtcaccactgccagcctcaggcaacatagagagcctcctgttctttctatgcttggtctgactgagcctaaagttgagaaaatgggtggccaaggccagtgccagtgtcttggggcccctttggctctccctcactctctgaggctccagctggtcctgggacatgcagccaggactgtgagtctgggcaggtccaaggcctgcaccttcaagaagtggaataaatgtggcctttgcttctgtttaaaaaaaaaaaaaaaaaa

SEQ ID NO: 409 - DNA, 7190 bp, Homo sapiens
atttctaactacgcctccagcccattcgggccctcctcggcttccgtcccagatgatccctccccgaagctgccaccgcctcctccatctcccggagctggagccgcctcctcggccagtggcgtagccgaatcggtgtcgcggccagccagataggggcggaggtccggaacccagtctggacccgagcggggggccatggagaaagcggcccgaggcgctgtttacaccgactagcgcgggcccgttgcggctgcaggcaccatggaccgagcccccacggagcagaatgtcaagctgtcagctgaggtggagccatttattccccagaagaagagtcctgatacatttatgatccctatggctctcccaaatgataatggaagtgtttctggtgtggaaccaactccaattcccagctacctgattacttgttacccatttgtgcaggaaaaccagtccaatagacagtttcctttatataacaatgatatacgatggcaacaacccaatccaaaccctactggaccatactttgcctatcccattatatctgctcagccgcctgtttctacagagtatacatattatcagctgatgccagcaccatgtgcccaggttatgggtttctatcatccttttcctacaccttactccaacacctttcaggctgcaaatactgtaaatgctatcaccacagaatgcactgagcgtccaagtcagcttggacaggtcttcccattgtccagccatcgaagcagaaacagtaacagaggatcagtggtcccaaaacaacagcttttacaacagcacataaaaagcaaaaggccgctggtgaaaaatgtagctactcagaaagaaacaaatgcagcaggtcctgatagtcgatcaaaaattgtgcttctggtagatgcttcacagcaaactgatttcccatcagatatcgctaacaagtctctctcagagaccactgcaacaatgctctggaagtccaagggcaggagaagaagagcatcccaccctactgctgaatcttctagtgagcagggggctagtgaagccgacattgacagtgatagtggttactgcagtcccaaacacagcaacaaccagcctgcagcaggggctttgagaaatcctgattctgggaccatgaatcatgtggaatcatctatgtgtgcaggtggtgtaaattggtccaatgtaacttgccaggcaactcagaaaaaaccttggatggaaaaaaatcagacattttctagaggtggaaggcaaactgaacaaagaaataattcacaggttggattcagatgccgaggacacagtacttcctcagaaagaagacagaatttgcaaaagagaccagataataagcatttaagctctagtcaatcccatagaagcgatccaaattctgagtctttatattttgaggatgaagatgggtttcaagaactaaatgagaatggaaatgctaaggatgagaatattcaacaaaaactttcttctaaagtattggatgatttacctgaaaactcaccaatcaatatagttcagactccaattcctattaccacctcagttcccaaacgtgcaaaaagtcagaagaagaaagctttagcagcagcccttgccacagctcaagagtattcagaaataagtatggagcaaaaaaaattacaggaagctttatcaaaagcagctggaaaaaagaataaaacacctgtgcagctagatttaggggacatgttagctgctctggaaaaacaacagcaagcaatgaaagcacggcaaattactaacaccagacctctgtcatatacagtggttactgcagcttcttttcacactaaagactctactaatagaaaacctttaaccaaaagtcagccctgtttgacatcctttaattctgtggacattgcttcttctaaagcaaaaaaaggaaaagagaaggaaattgcaaaactaaaacgacccacagcacttaaaaaggttattttaaaagaaagagaggaaaagaaggggcgcttaactgtggaccacaatcttttgggatccgaggaaccaacagaaatgcacttagattttattgatgacttgccacaggagattgtttcccaggaagatactggactaagcatgcccagtgatacttcactctctccagcaagtcagaactctccatactgtatgacacctgtgtcacaaggctctcctgctagttctggaataggcagtccaatggcatcttcaacaataaccaaaatccacagcaaaagatttagagagtattgtaatcaggttctttgtaaagagattgatgaatgtgtgactcttcttctccaagagcttgtcagtttccaggaacgcatctaccaaaaagatcctgtaagagcaaaagcaaggagacgactcgttatgggtctaagagaagttaccaaacatatgaagttaaacaagatcaagtgtgttataatttctccaaactgtgaaaaaatccagtcaaaaggtggtctggatgaggctctctataatgttatagccatggcacgggaacaagaaattccttttgtgtttgcccttggaaggaaagctctaggacgctgtgtgaacaagctggttcctgttagcgtagtgggaatcttcaactactttggtgctgagagcctgtttaataaattagtagaactcactgaggaggccaggaaagcatataaagatatggttgcagcaatggaacaggagcaggctgaggaagccttaaagaatgtgaagaaggtaccacaccacatgggacattctcggaatccctctgcagcaagtgccatttctttctgcagtgttatttctgaaccgatctctgaagtaaatgaaaaggaatatgaaacaaattggagaaacatggtggaaacttcagatggactggaagcatcagaaaatgagaaagaggtatcctgtaagcacagcacttctgaaaaacccagtaaacttccatttgacacacccccaattggtaagcagccatcattagtggctacaggcagtactacctcagctacaagtgctgggaaatccacagcaagtgataaagaggaagtgaagccagatgacctggaatgggcctcacagcagagtacagagactggctctttggatggcagttgccgagatcttttgaattcctccatcaccagcaccaccagcactcttgtacctggcatgcttgaagaagaagaagatgaagatgaggaggaggaggaagattatactcatgaacccatatctgtagaagtgcagctcaatagtagaattgagtcttgggtctcagagacccagagaactatggaaacccttcagcttggaaaaacccttaatggttctgaggaagacaatgtagagcaaagtggagaagaggaagcagaggcgcctgaggtgctggagccagggatggacagtgaggcatggactgctgaccagcaggccagtcctgggcagcagaagtccagcaactgcagctcgctcaacaaagagcactctgattctaattacacaacgcaaactacgtaactcaggaaatgtcggctctctatctccagctgtggaagggttgcagccattaccttttatgcttcatctcaacattttgcactgtccagtatttaatatacgtatttaattcccaacaaatatttttgtagcttttacttgttatgatctgtagcttagcttttaattagtatctaagtgtctttctaagaactgtgtggaaaattcagatctgtttcagcttattttgtaatcaaaaacagtgataaaaagaagaccagatcttaaagaaaataaatttcaaatgcttacttaaaagacattttgaaagttaaagaacaaggttctaaggatagaagcagttatcagtgtttgcttcaggactccacctcctctactctaatttgaccaaaaaattgtttgggcttctttaaaaaagaactgggggtggagtcagaaaattaaatgaaaggctgagggtaactaagtccaccagtgttgtatgttaaaaaatcaatgcaacttttatgtggtccacaaatgtttagtcagaagtcactgattattgtaattaattagtgttgggatgggctaaaacagagccttcaaaacttcggctagcagtggagccaccatcttagattatagctagctagcctcatttgtggaaagtgatagatgctgtctataatagtgaacagtcacccatgataggacctccaggttctgtctcatatttgcttcttacttacctcaggaatgctcttgtacatagacttatttacaaaaagctaggcacatgttgacaggtgaataactgtaaccgattgtatgactgctgcacttacatgtaaactcttcagaaacagagtcttatactggtgtgttctcttgcatgcttctggttcaggactcttgatttgagatatggatttgattgagtatccaaacttgtcctgagtgcaaaactgtttcaccttttaaaaaatacctattttgcacctagccttgagcaccttccacatagcaatgaccatagttactgtcaggaggtcaaggaaaggaactttgcacaacttgtgacatgtatcctgataatcaaggcttagaggaggaagttttagaagataagagaaagttgttctaattgtgctgaaactattagatgatttagagtatacagatatgtaggtattaattctctattcactattatttatctctgcccttctctaggagtttgtatacctgcttaggagacaataaatgagctaaatgttttatttgctagtcagtcaccacctggacttcagtgactttacaagtttatgtaatggtggaagaatgacaaactatgtaatttttttgtcttccatccaactccccaccacccccaactgtcccccccacccccctcacacacatgcacacatccgtacgtgtgtgtgttttccacttacaagcttccataagcaggcacaaaactgagaaggaaggggtattatccctgccctgattatctggggcagggctttgcctcacagaggcaggagagaagaattgggcagattctttactgaactcattgggactactgtgctagttttgatgttttataatgctggcatttaattactggagagattggattcttggttgatgatttagtatttgtgaattgtgaaagttcaggagctgtgtagaaaatgttagtcaatcaactttattattgtgctaaaaggggacattcttatactgtcctgtctaaactgttctccagtatagacttcctaggcactaaatatccaatatttaaaggaacacagcaggtaaggaatgaagcctctgaaatagtactcatggatttatacatggcagatcttactgtctctacacatttggaagtgttcgttggtttaaagaaatgatagaggttttgaactactgacagtcttaaaagtgaatttaaaaactgttcatactttttatggtgtaaatttcctttgctcgatgtcagtgattcagataactcttgaccttgagatgatggcttttcacaggtttcttatattttatatctcttctgaacatgaattgtcattttagatttttgacatttgtatcaaaagagaagttgaggaaatcttcagaacactggtaacttttagttttgctatagacttcagaagtgtttatttatatgttcggtaaatgctctcgcatatgcagtacctcttctgccagcaaatccaagggaccatagcctttttatgagacaggtcacctctagaggacaacccaagaattattaaaggaaatgttaccattttgagagcatgcttaaataaatattaataatgtctttataacttgtttcctttaaattttggaatattgaattacaggctttggaggagttgtgaaaattaggaaagtttttatatattttttgaagtgggcatggttggctctttgaagacctataaagagatccagtgggaagagtaagggttggttcatcatcacaagaaataaaaaacatagtgattttttctcttaatgtgtagaggtggttttactggcaataattaataatagatttctatttcagtatgtaagcatattaactaaaatatgaattacacttccaaagttagatttctgcttcagtaggtttgtttgctgtgaagattacttctcaaaagacagatgttcatattagcttaattttcggtttaaatatgtttgtaaatgatgtaatatatttcttttgactaaatgtggaaaagtaatgtgtgttatacattgagaagtttttactggctttgactggaggttgtttttgcagagatggtattttatatgattccagtatttggaaaagaattagtcaaaaggaattcacatagtttaaatactgagaaattaatatccaaatatgtacttgtctgatttctaaataagctgggggaggagggaggggtgggaattgaaatgtgcaaatgagtagtgaatgctacactcattttcaactctttaacatgaaactgttcaatcttaacacattgttactttaatatatgtataaagaagtattactgtttgtaaagctgctgtttgcttaaaaaaaaaaaacacccttgtcatgtattttctgtatgttgggccaacaggttagaacatcaactcatttaaaaatttttatctttttttgatttaaaaaaattctgtgaaataatttatttacagacatcttcctcctccctcatcccttccaacctttacatacatcacagaatcaaccaaactgtttgcctaatctgaaatctgaatcctaatgagaaaaatttaaattttgttggcacatcacaccttgaaagtatttgtattattttataatttaatttctaaatataccacataagtttataatttaatgtcttaattgtaatgctctaataaaaaactagcaaaattagtgtgagttataacatgaagggattttcatcttttgctgtatgaaggataattgttatatcacatttggggggtaataacagcttttttgcactatgtaaatactagtggggattcttctgtactaataaaatgattattgaaatgaaaaaaaaaaaaaaaaa

SEQ ID NO: 410 - DNA, 3743 bp, Homo sapiens
tttcttctagaagagctttgcgtcttaaacgcccataccgcagacagctgcctggcgggcgacccagccccatcctgatggccccaggacacaagcccaggagcgccccggtgcgcgcggttccgcggcccaggggcgccgggtttggtggcacagcgagccccctttctctagcgaaacctgtttccctccaatcttgtggttgcagctttccgtacgtatgcaaccgattataaagtcgtgacccagaacagcagctctggaaatgtaacccatgaaaagatccccataggcactgagatagaagggatgaacattttaggattggtcctgtttgctctggtgttaggagtggccttaaagaaactaggctccgaaggagaagacctcatccgtttcttcaattccctcaacgaggcgacgatggtgctggtgtcctggattatgtgctcagcgacccttccctctatgatgaagtgcattgaagagaacaatggtgtggacaagaggatcagcaggtttattctccccatcggggccaccgtgaacatggacggagcagccatcttccagtgtgtggccgcggtgttcattgcgcaactcaacaacgtagagctcaacgcaggacagattttcaccattctagtgactgccacagcgtccagtgttggagcagcaggcgtgccagctggaggggtcctcaccattgccattatcctggaggccattgggctgcctactcatgacctgcctctgatcctggctgtggactggattgtggaccggaccaccacggtggtgaatgtggaaggggatgccctgggtgcaggcattctccaccacctgaatcagaaggcaacaaagaaaggcgagcaggaacttgctgaggtgaaagtggaagccatccccaactgcaagtctgaggaggagacatcgcccctggtgacacaccagaaccccgctggccccgtggccagtgccccagaactggaatccaaggagtcggttctgtgatggggctgggctttgggcttgcctgccagcagtgatgtcccaccctgttcacccagccgccagtcatggacacagggcactgcccttgccaacttttaccctcccaagcaatgctttggcccagtcgctggcctgaggcttacctctcggcactggcattgggctccccagccggaactggttaccaaggacaaggacactctgacattcggcttgatccatgtccaggtgcaactgtgtgtacaccagggatctgtttggaaacaaccccttgagctgccaggctcaagaaatcatggactcacagggtcctgtgtggttacatcttggaaaaaatgcagatgtatttcactctccccggtcagctctgcatcaggtgttttctgagcaaaccaagggggtttatagtcatctgtcgcattgcctcgagttgcagtaattgaaaaaatgctcaaattcttagccatggctggcctttgctgagctgggactcaggtgtttaaagagtttgtgctatagctaggtgtggatagcttctgatccctgggttctgggagactgcaggtgccgcacattgtcaagttagaaatactccaggtgggtgttagcactgtggtggtctctggtccacagccttaggtaaacaacttagattctgaggtcaaagaaaaaaggagagggaatgcagccttgtgggggagaagcggggcagagggttctctaatctaatcaggacaggacaggtttcacatacaattgtcccagttcgcatcccagccctggggcacttttctgcttccttccagaggcctgggcctctgataacactttggctttttctccattcacgctgatttggcaaaaggccagagatgggcctccttccctggggaggtgtgatgtagttatcacattcaggacccttgttgatttatcatctattatttgaattcaactggacactctgtaaaatgctgcactgcagcaaaaacaaaaccaccaccaccccagagaaaaccatgtactaattggagtggggtacccccattcacaggttcccaggtcccctggctttggctgatttcaaaatatagagccctttcttgccagtacatccaagtttaaaattatcagcgaaatggtccatgtttttccaattacctgctgacacggttctaagctaagtgaaggggaagatctgagagcgtgctgtttgtggctgttgatgcatattcgtgatgtaacaggtcctggggcctcactttaccccatttgtaaaatggggctaatgtcacctgcctcttacctacctcagagggatttggtgaagcaaactgttaatcttcgaaaacgaccatttcacttcttggatatcaagtgctaacccagtatgttcttcttttttatgtaagggacagctttctccacagagtcctttctgctggtgaggacagcatttctgagcagggctttgttctctatgtgcattaggacttttatcatgcccttgttctgtgtgtagttacttgacagcatcaaatgccgcctcttcctaatgtccttcaagttttcatgaactagcaaccccaccttccaccatggttctgggcgcctgattttgctgtgactcccagacccagccactgtttctgccaccctgtaacaggccattaaagctccccagtgttcagcctccttcactcccttgttttccctgttgctatgtgtcacctgggccctacagacaggggcacacgcttatggatgtgtgtaccattgagatgagaatgggtagatggaacggagaccatcaagccacacccccttcttaaaactggggacatgagcctgagcagaaagggtgaagaagagccatgggacacagagttgacccagccagggggaaagcccagctctctttaaaccagctaagccattccagtctcctgtgaagccaaaagggaccaggaaccgtgcaaaggaaactggaaacttttccccgctgggtagagcatgttgctgatactcttctgttttcaagggaaacaatcacattgtttgattccaaatggtaaatgaacactcactattcttcaggcttcagtaaatctttttttcttccttcatatatatatacacaacacacacacacatatgtatatctatacacacatgtgtgttgtgtatatgcatgtgtgtgtgtgcgtgtgtgtatagttttagctccaagccaagcaagtttgtgtttggatagaggggaacttaactattaactacaagttgtatgtctgtggtatcttgattttcccatttctaaagatgaatttcacaaagccataaagcgtgaaattagagctggacttaagactcattggccgaccatcctgtgtcctggcctggccctgcagtaagaagcgtgtctgggtctggagaagggtgcttccgagagtgtgcaggtggcccttccccttggaggcgagaagagagaatgtgctgtctatcttcctggttttcagtccacagagtcggtagaccaggggttacgtgactggggaaaatctcacatctccttgtctgaaaacatttcccctgctgttctctttctaacatgttgtggtaaatctgttcagatactgctcatctgactgttttgtacatgtgacaattgccttaaaacctagcacagtcctcagaaatgaataccgtgtttccactggaaaaaaaaaaaa

SEQ ID NO: 411 - DNA, 4965 bp, Homo sapiens
gttctgggaaaactcgagcacccagaacggcttccggcgggagctgtgcagctccttatcatggggacaattcatctctttcgaaaaccacaaagatccttttttggcaagttgttacgggaatttagacttgtagcagctgaccgaaggtcctggaagatactgctctttggtgtaataaacttgatatgtactggcttcctgcttatgtggtgcagttctactaatagtatagctttaactgcctatacttacctgaccatttttgatctttttagagacggggtttcaccattttggctgggctggtctcaaactcctgacctcaagtggtccacccacctcggcctaccaaagtgctgggataacaggcgtgagctaccgtgcctgagcaatagtttaatgacatgtttaataagttactgggtaacattgaggaaacctagccctgtctattcatttgggtttgaaagattagaagtcctggctgtatttgcctccacagtcttggcacagttgggagctctctttatattaaaagaaagtgcagaacgctttttggaacagcccgagatacacacgggaagattattagttggtacttttgtggctctttgtttcaacctgttcacgatgctttctattcggaataaaccttttgcttatgtctcagaagctgctagtacgagctggcttcaagagcatgttgcagatcttagtcgaagcttgtgtggaattattccgggacttagcagtatcttccttccccgaatgaatccatttgttttgattgatcttgctggagcatttgctctttgtattacatatatgctcattgaaattaataattattttgccgtagacactgcctctgctatagctattgccttgatgacatttggcactatgtatcccatgagtgtgtacagtgggaaagtcttactccagacaacaccaccccatgttattggtcagttggacaaactcatcagagaggtatctaccttagatggagttttagaagtccgaaatgaacatttttggaccctaggttttggctcattggctggatcagtgcatgtaagaattcgacgagatgccaatgaacaaatggttcttgctcatgtgaccaacaggctgtacactctagtgtctactctaactgttcaaattttcaaggatgactggattaggcctgccttattgtctgggcctgttgcagccaatgtcctaaacttttcagatcatcacgtaatcccaatgcctcttttaaagggtactgatgatttgaacccagttacatcaactccagctaaacctagtagtccacctccagaattttcatttaacactcctgggaaaaatgtgaacccagttattcttctaaacacacaaacaaggccttatggttttggtctcaatcatggacacacaccttacagcagcatgcttaatcaaggacttggagttccaggaattggagcaactcaaggattgaggactggttttacaaatataccaagtagatatggaactaataatagaattggacaaccaagaccatgatagactctaacttatttttataaggaatattgactccttggcttccaatttatttagtaatccaactttgcattgactgtttaatcatttactctaaatgttagataatagtagtcttgttcacatttcatgaaacctatgaaactatatttttgtaaaatgtatttgtgacagtgaaatcctcgtaaatgttaaaggctttaaataggcttcctttagaaaatgtgtttctttaaatttggattttggtatctttggttttgtagttgactgcagtgtgatgtgaccttacctttataagagccacttgatggagtagatctgtcacattactaagatacgatatttctttttttttccgagacggagtcttgctctgccactgtgcccggccaatacattattattaacttaaggctgtactttattaaggcttccttagtttttgttttgttttgttttttgagatggagtctcactctgtcgcccaggctggaatgcagtggcatgatctcagctcactgcaacctctgcctcctgagttcaaatgattctcctgcctcagcctcccgagtagctgggattacaggcacctgccaccacgcccagctaatttttgtatttttagtaaagacgggggatttcaccatgttggccaggctggtcttgaactcctgacctcatgatccacccaccttagcctcccaaagtgctgggattaggtgtgagccaccgcacctggccgatattttctttaatgaaatttataaatatgcttcttgaataatacacattttgggaaagggaaaaatgtctgttcaaaaagtaaaagtctcttttatagcttttccaaacttaattgctaaatttttctttgaggttctcctgaattatgtcttacaaactaaaagcaaaaatttttagcagaaattttggaatacattctatctagcacaatttgaatttttaattatcaagatttttgttaaagtttctctcctttaaaaattttagtacatttgtaaatagtccatggttctcagtgttttattttgattaagtgactacccaacttttggtgatatgcagtgaaagaatcccaattttctatgttacatttaatcaaatactgacataatgaatttatctttcctgacacattttcattcattggctttttaatttcttattttattaacaaaatatatcagatatattaccaaaacacatggagttccatacataatatggaatttgatgtcttttcaagttgcacaaagaatttgagcatatataattttaccaaagcataatggaccttagattatagaatacagcattgttaggtctgcagtgggcagtttctttttgttttgctttgtcaaaaatgggaaattgttaactgtgatgaaatgtgagaattacatagattatgttattttttagttgttttccaaatgcagagtttaaggactttctaacatggctagtattacttccaaaaagtataacaagcagcagtcacacatgacctaggagggttttttattgttttattttattatgcattccataacagttttaaaatgggattttgagaatggacttaactttcctggaatccaatgctcctggagatttatgactttcccagccatcagccagctatctagagaagatttttgtttttcttttgcaacagtttcttcagtcaactcattcactttcaaataggagcagcactttgaaatcctttttcttcactgtggattaaaaacatccaagaagccatctctgtcaagcagaattgtcatctgtggtaataagtgaccatgtcctaaatacctttttcttagtgaggagttggtcattgtctttggcatctgcaacccctgttcaggcatgtgacctgctaaagaaatacagcctacactaccttgactactggggaaaatgatacttcgtaaaatgtaataaggcaacctgttccttggcctttatcttatgttttccaactattactgtatctgttattggtctactattacaggatgattcttcttcctccattgatctcaactaaatatgaattagggtcatgcatgaaatctgaactgccgtgtcctgagttatggttaagaggtatgtgctgccaccccatgcatgtcttccccatccccataggattttaaagtgttcaggtaccaaacacagttctgtgtgaggttttatgcctacttcctcaacaccaattcagaggcaacacctgtgcatctgtcccaccaaaggtgctttaatacctaccttcactatttgagaaaggacactcacagttgcctgtgggttatgaaagaattggccctacgtcctgcatgtaagatgttacaggggacattgggccaggcattattatatagagaagtcttatttgccaagctctgactaacttctggatatgaaaataaggaacttgcccagcataggcctataggcagcagccttactagtaaatcttgccacagaatcacttgaagctagacagagaaagaagttcaatttaaatatttgtcccattgtttgtgattaggatgtaagctttgtggaatgtaattaaccctgctttacgaagtcaccatattataataggaaaaacactgcctaggaggcaagagatctgaattccagttctgatgctgccactgtgtaaggaagtagttttataacccatgggcaaatcatctgagctttctcatctgtaaagttagggagaggaattaattagttgatctgtaaaataatcagcttcaaaacgttatggctaaatctgtagaatgtatgcccaattgctaaacggatgttgtgcccagaattttatctagtgactacctcaacatacaggccaagcgttacctacaccaacacccaagccattaatttgaggtgccatgagaataggtgaaccacagcctaacaccatttaggtttttgtgtttttttcaggcttgcctctacttaaatatatttagatgagagagttctcttagacttctttctttgtaaggaagggttatttggggaagtgttggaaaaaagattagggcagggtacccttagtttatatagggtacaaaagaatgggaaacatcttccctttcttctttaatctctgaagtcatgtttggaattacatataatgtagcaggtactggagaggacctgaatttcaagcttctgatttagctgtttgtaaacttccaagttttgcttgactaaagaatgctgatcttttttgggagtctgatctccttctaatatcagaaagtgctttttatattccagattgcttgaattaaactgtttggattaaagaacatatatggagtttcctctctggtttta

SEQ ID NO: 412 - DNA, 6609 bp, Homo sapiens
ggggggagtcggcgtctctctcccccgcgccagctcccgtacacggagccgcattccttggcccccccacccccctccctcggggcccccccgcccccctcgggaaaaaaatccaccccgaatcactcgaacccgagggaggcttcctttcacccttggggagacgagctttcaacggttacctcttcttcgtctccccccaagcccccgtcccctccccctgctcccacccccttctggcgccgggtgtaaggtccctttaaggcgacggcgccttcctcgggtcagactaccggcggcgacgaccacaggagcatggcggacaccgacctgttcatggaatgtgaggaggaggagttggagccatggcagaaaatcagtgatgtcattgaggactctgtagttgaagattataattcagtggataaaactaccacagtttctgtgagccagcagccagtctcggctccagtgcccatcgctgcccatgcttctgttgctgggcacctctctacatccaccaccgttagtagcagcggggcacagaacagcgacagtacaaagaagactcttgtcacactaattgccaacaacaatgctggcaatcctttggtccagcaaggtggacagccactcatcctgacccagaatccagccccaggtctgggcacaatggttactcaaccagtattgaggcctgttcaggtcatgcagaatgccaatcatgtgactagttcccctgtggcctcacaaccaatatttatcactacgcagggatttcctgtaaggaatgtccggcctgtacaaaatgcaatgaatcaggttgggattgtgctgaacgtacagcaaggccaaacggttagaccaattacactagttccagccccaggtacccagtttgttaagccgacagttggagttccacaagtgttctcccagatgacccctgtgaggccaggctccacaatgcctgtgaggcccaccaccaacaccttcaccaccgtcatcccggccactcttaccattcgaagcaccgtcccacagtcccagtcccagcagaccaagtccactcccagcacttctaccactcccactgccacacagccaacctcactggggcaactagctgttcagtctccaggccagtcaaaccagaccacgaatcccaagctagtgagcattgccagctttgtcactgtgaagcgacctggtgttacaggcgaaaatagcaatgaagtggccaaattggtgaatacccttaacaccatcccttccctgggccagagtcctgggccagtggtggtgtccaacaacagctctgctcatggctctcaaagaaccagcggacctgagtcttcaatgaaagtgacctcttccatcccagtatttgacctccaggatggtggacggaaaatatgtccacgatgtaatgctcaatttcgtgttactgaagctttgagaggtcacatgtgttactgttgcccagaaatggttgaataccagaagaaaggaaagtccctggattcagaacccagtgtcccatcagcagcaaagcccccatcccctgagaaaacagctcctgttgcttccacaccctcttctacacctattcctgctctgtcaccgcctaccaaagtaccagaaccaaatgagaacgtgggcgatgccgtccagaccaaactcattatgcttgtagatgacttctactatggacgggatggtggcaaagtagcccagctcacaaatttccctaaggtcgccacatctttccgatgcccacattgtaccaaaaggctaaaaaacaatattcgattcatgaaccatatgaaacaccacgtagaactcgatcagcagaacggtgaggtagatggtcacactatctgccagcactgttaccgccagttttccactcccttccagcttcagtgccacttggaaaatgttcatagtccctatgaatctactaccaagtgcaagatctgtgaatgggcgtttgaaagtgagccactatttctccagcatatgaaggatactcataagcctggagagatgccttatgtttgccaggtgtgtcaatatcgctcctcactctactctgaggtagatgtccattttcggatgatccatgaggatacccggcatctgctctgcccttattgcctgaaggtcttcaaaaatggcaatgcattccaacagcattacatgaggcaccagaagagaaatgtttatcactgcaacaaatgccggctgcagtttctctttgccaaggacaaaattgaacacaagcttcaacaccataaaaccttccgtaaacccaagcagctggagggcttgaaaccaggcaccaaggtgacaatccgggcttcccgagggcagccacgaactgttcctgtatcctctaatgatacacctcccagcgccttgcaggaggcagcaccgctgacctcctcaatggaccctctgcctgtcttcctttatccccctgtccagcgcagcatccagaagagagctgttaggaaaatgagtgtcatgggccggcagacatgcctggagtgcagcttcgagatcccagacttccctaatcatttccctacttacgtacactgctctctgtgtcgctatagcacctgctgttctcgagcttatgccaaccacatgatcaacaatcatgttccacggaagagccccaagtatttggctttgtttaaaaattctgtgagtggaatcaagctggcctgcacttcatgtacctttgttacctctgtgggcgatgctatggccaagcatttggtattcaacccctctcacagatccagcagcatcctgccacggggactcacttggatagctcactcaaggcatggccagactcgtgaccgagtgcatgaccggaacgtgaagaatatgtaccctcctccttccttccccactaacaaagctgccactgtgaaatctgcgggggccaccccagctgagcctgaagagctactaactcccttagccccagcactcccatcaccagcctcaactgcaaccccaccaccaacccccactcacccgcaggctttagcccttccaccgctggctacagagggagccgaatgtctgaatgttgatgatcaggatgaagggagcccagtcacccaagaacctgagctagcatcaggtggtggtggtagtggtggagttggcaaaaaggagcagctgtctgtgaagaagcttcgagtagtactgtttgctctatgctgcaatacagaacaggcagctgaacacttccgaaatccccagcgacgtattcgccgttggcttcgacgtttccaggcctcccagggggagaatctagagggcaaatatctgagctttgaggcagaagagaaactggctgagtgggtgctaacccagcgcgaacaacagctacctgtaaatgaggagaccttgttccagaaggccaccaaaataggacgttctttggaaggggggtttaagatctcctatgagtgggctgtgcgtttcatgctgcggcaccacctgactccccatgcccggcgagctgtggcccacaccctacctaaggatgtagcagagaatgcaggactcttcattgattttgtacaacggcagattcacaaccaggacttacccttgtctatgattgtggctattgatgagatctctttgttcctggatacagaggtgctgagcagtgatgatcgaaaggagaatgccctgcagacagtgggcacaggggaaccttggtgtgatgtagtcctagccattctggcagatggcactgtccttcccaccctggttttctacagagggcagatggatcagcctgctaacatgccagactccatattgctagaggcaaaggagagtggctacagtgatgacgagatcatggagctgtggtcaactcgagtgtggcagaagcacacagcttgccagcgcagcaaaggcatgcttgtgatggactgtcatcgcactcacttgtcagaagaggtactggctatgcttagtgcctctagcactttgcctgcagtggtcccagcaggctgtagctccaaaattcagccattagatgtatgcatcaaaagaactgtcaagaacttcctgcataaaaaatggaaggaacaggctcgggaaatggcagatactgcatgtgattctgatgtcctgcttcagctggtgcttgtctggctgggtgaagtgctaggtgtcattggggactgtccagagctagttcagcgctccttcctggtggctagtgttctgcctggccccgatggcaacattaactcacctacaagaaatgctgacatgcaggaggagctaattgcctccctagaggagcaactgaagctgagtggggaacattctgagtcttccactccacgacccagatcatctcctgaagagacaattgagcctgaaagtcttcaccagctctttgagggtgaaagtgagaccgagtctttctatggctttgaagaagctgacctagatctgatggagatttgagtgttggggtcatgagggggtgtggagtgagggtgggaacatgtgagggagggtaaaggggcttagggaaaagggggcataccaggtggggtatttggtttctattttttaattttataccaccactcccccctgaagttgacttacacttccctgtggatttgtggattaattaggaaaaccaatagtaatcacgtctgagccaaggagctggcccattggtcattcacttctgctaaaaacaggtttttgtgactttttttttttttaaatttaaatcactgtgtttggtatttttctgacaaaattaagaaaaagaaaaaaaattatttgtgggcaaatgttaaatttttttgtttccccttttacctcaattgtatcatagtactgggtttttttgtttgttttattgtgtggccaatgtctttgggcatgatgctatctaatcattgttaatgtgagaacatttctgaagatgggaaagacaaattatgtagctcacaaactggtttattatatatatggataaaaaacttttttcattgtggtcttaacacttttatataaaaatgaaaatggaaaaaaagtcccactgaactctctcttccttctccttttctttccttccctctccagagatgttggtttctacagcaaccctagatataaaattgtggctttaaaaatgcatgaaaccacctttaattatccagaatgaatagatttgtcttttcctcaccaccttccctccaaaacatgacataaacaatattttttgcacttgtgatccttggcccctttccccattctcaacaccatccatccctctggacaaaggatcatacaggtgttattagcaagcaagagatactgaagcgatcaaacagttttagggtggaagccattcccagtttgagtcttcatcctgtaagcccccaggggcagtccctgctttactgaacttcatcctgttagatggagagcatgcctgtttaagggattactggtcctacagccaggagctaattgttcaagaagtgttgaactttaaaaagacaagaccacttgttgaaatccagcgtgctctgtggctttcccctatttctcttaatacttagggaagaatctgacaggaagaagcgcacaggggtgtgcacaaagaaaatgacatgaatctttatttttcactgccagcttcaaggaaagaaaattttttctacaatttgcatgagggatttttttaattgtatgtactcatggttgtaaaccaaaacgtactgtaccgtacagagaaaaggagcaaaaaaccaagtcttctgtttatcctgaggctttccacaatgttcccctcctgtgagccaaggaggcaaactgcacaagcttgtaaatggttcgtctttaaaatgtacataagtggaacatttaataaaatgaggggaaatggatttataaacttgttttttttctaggtgaccctgtttaataggctttcacagactggggaatgctcaagatgtgatgggcctggtggtacaggtgtgacatttgttaccacccatttctcccaccccaccctgcttttttgtttgtttgttttttcatcccccagcacactataatatagtgaactggaaaagtcccttccagaaacagcttggccagctttgtgaacctttgacatctgaaaacaaccaaggatccatctgggcttctcttccccagctttttgcctgatgccattttattgacagacaatggactttgaagtcagcctttgcctttgagaaagttcaagaactatggttggtcacgtctatctacaacctaatcctactctttggtagtctctgcagcagccacagccttagcagagctggggttcctgtcttctgcacacgattgactttcttgatgggtaattttttttaagattataccaacagtggatcagctgggttttggccaggaagttgtctttgtggactctgcctgcatggcttagtagtagaaggaaatttttttttggttttgttttttataattcagtttaatcaataaacatgtatttattgactgttaaaaaaaaaa

SEQ ID NO: 413 - DNA, 5593 bp, Homo sapiens
ggcgccagtcccgctccgcgccgcgccgctccgctccggctcgggctccggctcgcctcgggctgggctcgggctccgggggcggcgtcccccgcgccgggccccgggacgggcggcgacgctccaaccatggcccgtgcccaggcgctcgtgctggcactcaccttccagctctgcgcgccggagaccgagactccggcagctggctgcaccttcgaggaggcaagtgacccagcagtgccctgcgagtacagccaggcccagtacgatgacttccagtgggagcaagtgcgaatccaccctggcacccgggcacctgcggacctgccccacggctcctacttgatggtcaacacttcccagcatgccccaggccagcgagcccatgtcatcttccagagcctgagcgagaatgatacccactgtgtgcagttcagctacttcctgtacagccgggacgggcacagcccgggcaccctgggcgtctacgtgcgcgttaatgggggccccctgggcagtgctgtgtggaatatgactggatcccacggccgtcagtggcaccaggctgagctggctgtcagcactttctggcccaatgaatatcaggtgctgtttgaggccctcatctccccagaccgcaggggctacatgggcctagatgacatcctgcttctcagctacccctgcgcaaaggccccacacttctcccgcctgggcgacgtggaggtcaacgcgggccagaacgcgtcgttccagtgcatggccgcgggcagagcggccgaggccgaacgcttcctcttgcaacggcagagcggggcgctggtgccggcggcgggcgtgcggcacatcagccaccggcgcttcctggccactttcccgctggctgccgtgagccgcgccgagcaggacctgtaccgctgtgtgtcccaggccccgcgcggcgcgggcgtctctaacttcgcggagctcatcgtcaaggagcccccaactcccatcgcgcccccacagctgctgcgtgctggccccacctacctcatcatccagctcaacaccaactccatcattggcgacgggccgatcgtgcgcaaggagattgagtaccgcatggcgcgcgggccctgggctgaggtgcacgccgtcagcctgcagacctacaagctgtggcacctcgaccccgacacagagtatgagatcagcgtgctgctcacgcgtcccggagacggcggcactggccgccctgggccacccctcatcagccgcaccaaatgcgcagagcccatgagggcccccaaaggcctggcttttgctgagatccaggcccgtcagctgaccctgcagtgggaaccactgggctacaacgtgacgcgttgccacacctatactgtgtcgctgtgctatcactacaccctgggcagcagccacaaccagaccatccgagagtgtgtgaagacagagcaaggtgtcagccgctacaccatcaagaacctgctgccctatcggaacgttcacgtgaggcttgtcctcactaaccctgaggggcgcaaagagggcaaggaggtcactttccagacggatgaggatgtgcccagtgggattgcagccgagtccctgaccttcactccactggaggacatgatcttcctcaagtgggaggagccccaggagcccaatggtctcatcacccagtatgagatcagctaccagagcatcgagtcatcagacccggcagtgaacgtgccaggcccacgacgtaccatctccaagctccgcaatgagacctaccatgtcttctccaacctgcacccaggcaccacctacctgttctccgtgcgggcccgcacaggcaaaggcttcggccaggcggcactcactgagataaccactaacatctctgctcccagctttgattatgccgacatgccgtcacccctgggcgagtctgagaacaccatcaccgtgctgctgaggccggcacagggccgcggtgcgcccatcagtgtgtaccaggtgattgtggaggaggagcgggcgcggaggctgcggcgggagccaggtggacaggactgcttcccagtgccattgaccttcgaggcggcgctggcccgaggcctggtgcactacttcggggccgaactggcggccagcagtctacctgaggccatgccctttaccgtgggtgacaaccagacctaccgaggcttctggaacccaccacttgagcctaggaaggcctatctcatctacttccaggcagcaagccacctgaagggggagacccggctgaattgcatccgcattgccaggaaagctgcctgcaaggaaagcaagcggcccctggaggtgtcccagagatcggaggagatggggcttatcctgggcatctgtgcaggggggcttgctgtcctcatccttctcctgggtgccatcattgtcatcatccgcaaagggaagccggtgaacatgaccaaggccaccgtcaactaccgccaggagaagacacacatgatgagcgccgtggaccgcagcttcacagaccagagcaccctgcaggaggacgagcggctgggcctgtccttcatggacacccatggctacagcacccggggagaccagcgcagcggtggggtcactgaggccagcagcctcctggggggctccccgaggcgtccctgtggccggaagggctccccataccacacggggcagctgcaccctgcggtgcgtgtcgcagaccttctgcagcacatcaaccagatgaagacggccgagggttacggcttcaagcaggagtatgagagcttctttgaaggctgggacgccacaaagaagaaagacaaggtcaagggcagccggcaggagccaatgcctgcctatgatcggcaccgagtgaaactgcacccgatgctgggagaccccaatgccgactacattaatgccaactacatagatggttaccacaggtcaaaccacttcatagccactcaagggccgaagcctgagatggtctatgacttctggcgtatggtgtggcaggagcactgttccagcatcgtcatgatcaccaagctggtcgaggtgaaatgctcacggtactggccggaggactcagacacctacggggacatcaagattatgctggtgaagacagagaccctggctgagtatgtcgtgcgcacttttgccctggagcggagaggctactctgcccggcacgaggtccgccagttccacttcacagcgtggccagagcatggcgtcccctaccatgccacggggctgctggctttcatccggcgcgtgaaggcctccaccccacctgatgccgggcccattgtcatccactgcagcgcgggcaccggccgcacaggttgctatatcgtcctggatgtgatgctggacatggcagagtgtgagggcgtcgtggacatttacaactgtgtgaagactctctgctcccggcgtgtcaacatgatccagactgaggagcagtacatcttcattcatgatgcaatcctggaggcctgcctgtgtggggagaccaccatccctgtcagtgagttcaaggccacctacaaggagatgatccgcattgatcctcagagtaattcctcccagctgcgggaagagttccagacgctgaactcggtcaccccgccgctggacgtggaggagtgcagcatcgccctgttgccccggaaccgcgacaagaaccgcagcatggacgtcctgccgcccgaccgctgcctgcccttcctcatctccactgatggggactccaacaactacattaatgcagccctgactgacagctacacacggagtgcggccttcatcgtgaccctgcacccgctgcagagcaccacgcccgacttctggcggctggtctacgattacgggtgcacctccatcgtcatgctcaaccagctgaaccagtccaactccgcctggccctgcctgcagtactggccagagccaggccggcagcaatatggcctcatggaggtggagtttatgtcgggcacagctgatgaagacttagtggctcgagtcttccgggtgcagaacatctctcggttgcaggaggggcacctgctggtgcggcacttccagttcctgcgctggtctgcataccgggacacacctgactccaagaaggccttcttgcacctgctggctgaggtggacaagtggcaggccgagagtggggatgggcgcaccatcgtgcactgcctaaacgggggaggacgcagcggcaccttctgcgcctgcgccacggtcctggagatgatccgctgccacaacttggtggacgttttctttgctgccaaaaccctccggaactacaaacccaacatggtggagaccatggatcagtaccacttttgctacgatgtggccctggagtacttggaggggctggagtcaagatagcggggccctggcctggggcacccactgcacactcagggccagacccaccatcctggactggcgaggaagatcagtgcctcctgctctgcccaaacacactcccatggggcaagcactggagtggatgctgggctatcttgctcccccttccactgtgggcagggcctttcgcttgtcccatgggcgggtggtgggccaaggaggagcttagcaagtctgcagcccagccccacctccatagggtcctgcaggcctgtgctgagaggcctggtgctgcctggcagagtgacaaaggctcaggacggctggctctgggggactcaggccaagccccttggcaccatcctggcttttggcagggatgagtgaggccctgcagagagcatcccaggccaaggttcccactcagcctgccccctctgcatgtgggtagaggatgtactgggacttggcatttaggattccatctggcccagcccctgaaggtcctggggaagcaggtctcaattctgaatagccagtggggcacactgactgtcctccccaggggaactgcagcgccctcctccccactgccccctgcagcccctgagatattttgctcactatccctccccacttgcttccctgatatgtgctctgagcttccctgaaccaggatctgcctattactgctgtgccccatggggggctccttccctgcctgacccactgttgcagaatgaagtcacctcgcccccctcttcctttaatcttcaggcctcactggcctgtcctgctcagcttgggccagtgacaatctgcaaggctgaacaacagcccctggggttgaggcccctgtggctcctggtcaggctgcccgttgtggggaggggcagtgttagagcagggctggtcataccctctggagttcagaggaagaggtaggaccagtgcttttttgtttcttttgttatttttggttgggtgggtgggaaggtctctttaaaatggggcaggccacacccccattccgtgcctcaatttccccatctgtaaactgtagatatgactactgacctacctcgcagggggctgtggggaggcataagctgatgtttgtaaagcgctttgtaaataaacgtgctctctgaatgccacagagcagccctgaaaaaaaaaa

SEQ ID NO: 414 - DNA, 6383 bp, Homo sapiens
ctgttagtcagcagaggcagtacaccagatttccttgtggcttttagtggaaaatgttaaaagcgcactcatttttcagttatagaattttttagtttgatttggattagtcacagaactggcatgaaccttctaattgtgaaggctgtccaaatgcactatttttttctcctgctagaggaagttacatcccgagaagtagctcagatctctgccatcactggtgcaagctatatttaacggagatcctgatgaagttcgagcactaatatttaagaaagaagatgttaactttcaggacaatgaaaagcgaaccccattgcacgccgcagcttaccttggagatgcagaaatcattgaacttcttattttatctggagctagagttaatgccaaagacagcaaatggttgacacctttacacagagcagttgcatcttgtagtgaggaagcagttcaggtacttttgaagcattctgcagatgttaatgctcgagacaaaaattggcaaacccctttacatatagctgctgctaataaagctgtaaagtgtgctgaagctttggtacctcttctgagtaatgtaaacgtatctgatcgagcagggaggactgcattacatcatgcagctttcagtggacatggtgagatggtcaaactactcttgtctagaggtgccaatattaatgcttttgacaagaaagataggcgtgctatccattgggcagcatatatgggtcacattgaagtagtgaaattgcttgtgtcgcatggagctgaagtgacatgcaaggataaaaagtcttatacacctcttcatgcagcagcctctagtggaatgatcagcgtagtcaagtaccttctagatcttggagttgatatgaatgaaccaaatgcctatggaaatacacctcttcatgtagcctgctataatggacaagatgttgtagtgaatgaacttatagactgtggtgctattgtgaatcaaaagaatgaaaaaggatttactcctttgcactttgctgctgcatcaacacatggagcattgtgtttagagcttctagttggcaatggggccgatgtcaatatgaagagtaaagatgggaaaaccccactacacatgactgctctccacggtagattctcccgatcacaaaccattatccagagtggagctgtaatcgactgtgaggataagaatggaaatacccctttgcacatagcagcacggtatggccatgagctgctgatcaacactcttattacaagtggtgctgacactgcaaagcgtggcatacatggaatgttccccctccatttggcagccttaagcggcttttcagattgctgcagaaaacttctttcttcaggatttgatatagataccccagatgattttggcaggacttgtctacatgcagctgcagctggagggaatttggagtgcctaaaccttctgctgaatactggtgcagactttaataaaaaggacaaatttgggagatctccactgcactacgctgctgccaactgcaattaccagtgcctgtttgctcttgtgggatcaggagcaagtgtgaatgaccttgatgaaagaggctgcacacccctgcactatgcagctacatcagacacagatggcaagtgcctggaatacttattaagaaacgatgcaaatccagggatccgtgataagcaaggatacaacgcagttcattattcagctgcttatggtcaccgtctatgtcttcagctgattgcaagtgaaactcctctagatgttttaatggaaacctcaggaacagacatgctgagtgattcagataatagagcaacaataagccctttacacttggctgcctatcatggtcaccatcaagcactggaagtgttggtacagtctttgttagatcttgatgtcagaaatagtagtggaagaacacccctagatcttgcagcttttaagggccatgttgaatgtgtggatgtactcattaatcagggagcctcaatcttagtaaaagattacattttgaagaggacacctattcatgcagcagcaacaaatggtcattcagaatgcttacggctattaataggaaatgcagaaccacagaatgcagtggatattcaagatggaaatggacagacgcctctgatgctatctgttctcaacgggcacacagactgtgtttactcattgctgaacaaaggagcaaatgtagatgccaaagataagtggggaaggacagcgttgcatagaggggcagttacaggccatgaagaatgtgtagatgcattacttcaacatggtgctaagtgcttacttcgggatagcaggggccggacgcctatacacctgtctgctgcctgtggacacattggtgttcttggagcccttttgcagtcagcagcatctatggatgcaaatccagccacagcagacaatcatggatatacggcacttcactgggcttgctacaatggtcacgagacatgtgtagaactgcttttagaacaggaagttttccagaaaacggaaggaaatgcttttagtccattgcattgtgccgtgataaatgacaacgaaggtgctgctgagatgttaattgatacattaggtgccagcattgtgaacgccacagattcaaaaggaagaactcctctccatgcagccgccttcacagaccatgtagagtgtttacagctgctgctcagccataatgctcaagtcaattctgtggactctacagggaaaacacctcttatgatggctgcagaaaatggacaaacaaatacagttgagatgctggttagcagtgctagtgcagaactgactttacaagataacagtaaaaatactgccctccatttggcttgtagcaagggtcatgaaactagtgccttgttaatactggaaaagataacagatagaaacctcatcaatgcaaccaacgcagccttgcaaacacctctgcatgttgctgcccgaaatgggctaacaatggtggttcaggaacttttgggaaaaggagcaagtgtgcttgcagtagatgaaaatggctataccccagctttggcctgtgctcccaataaggatgtggctgattgcctggctctcattttggccaccatgatgcctgtctcatcaagtagtcctttatcatccttaacattcaatgccattaaccgttataccaacacctcaaaaacagtcagctttgaagctttgcccatcatgaggaatgaacctagctcctattgcagtttcaataacattggaggggaacaggagtacttatacactgacgtggatgagctcaacgactccgattctgagacctactgagaggctgaggaggagggagttctcacagtaaagcttcaaactgtgctttttcaggaaaaaggcactttgatattcacgtagaaattcaacctaagaggaaagatcccacagtgagccaatgttaagagatctgatggcattaggaggaagagttttaaaggcaagttttacaaaaggaacttctagaatcttgaaatagacctgactgaggaaaacacattgatgtcagaattctttgtggaattgtttaatttggttttgcagtgccaggaacaattggggacactgtgcactctaacctgcttacacaagcaacactattgtaacagaagaaataaagacactagatttaaattttatcaataaaattacaactaaatttaaaggcaataaaagtttggtacagtaggcattatgtgcacagcaaattgcaaaaggaccaaataactgaaaggtttttttaataaaatgccattttgtggaaactggagtagattaaatgaaacattacctaaaccaaactgcaatatttctggaaatgaagctgagatttggttttaaatgttgagtttttttgggttttgttttttttttaagaaaacatctgaaagccttccaatgctgtattaaaccatgagagaaagcagatgtatttttacatttttttcttttacagaactatttcaaatttccaatttttatactattagaattaaaaaccagctgactgggtgcaatacgggtgaaaatacttgtgacatagacattgagatggattggggtcaggctgttgccctgttttgaatggtttgggtttaaaatagtactatttttgtttgaaaatgtaaagaatttcctagaaaaaaattcatgaaatcaaaaagtagactatttcaccctattgcagctaagtggtcctggggcatggagtcttcaacctctctatgaatggcacaccttagtcacttatgttacttttgtgtccccaccatgggttgggggattttttgtttattctgatctatgagttttgaaaaagtgaataatcaaaaggaaaataattccttgttgttcataaattaagcatcactaaagtctcttgaaaggcatttctgtattgggcaagatttaaaatactaaagccttaggtcctattcatatttaaagtagcatgtttgtaacctgttactatttggagagagaagcagttgcctgccaaattgaagactacctttcaaatagcaaaagagagagagaaggctgatatttcggcttttaaataaagatttgtgtggttctgcttttactgtaactgtcactttcccagtgaaaatgatttcatatacattgagggtcttacaggtatgggtaaagttctataaattgcaacaaaatgatacccaatttcattttatcctttttgtattgtgaaactggaaactttatgacattgtaaattatcagctggtttttctgaatataaagtgtgaaaacacagaacagtattttgatctatttgataattttgtgggttttttgaagaattaatgagcatgtacatagaaatagtgactgcttgaatactgtatttacttgcactctttcagtacatcaagattcctgtatattttagagtataataaaacacagatgtgagttgtatttaatgaataatgtatttgtatctgtgcatattatctacaaatctataaagtttctagggcattgactactagattttaagcattttttctaaaatatttacagaaattataaatctaatcccccatcttttctttataatataaagaagtcataatgaacccttcctaattattagtagtaggaaggtgaatatgcattttaatgacagtggactacattttctattgtaccttttgaaaaaaaaaaaaatcaagcagattctaaaagtatacatatgtgtgctttctctttccttttaggaattctcttctgaattccctgagggaattttctagaatctcagaattgaaagagacctgaggttcatccagtctctaacctcttaacaaatgcaggagtcccttctacaagggtgatctttccaccttgaacacttccaagtgactctacctcaccaagcagtccattcagttgttgagcagctctaactgttagaaaggtcttccttagatggagttgaagcctccctcccggtaacttctgtctttgggcctgggtctgtcctccaagagaaccctgagaatgttggaaggatgaatctcgcacattctgccatgtcttctcttttacaggctgtttgacttctctgctgaagtgatttccagaaggactcatttgacacactattagatttaccacatctaatgaaatccaaggtgtagctataaagtgacaagctgtttttaatttatcacatacaccagaacttctatcctgcatcacttatatgtaaatgatgctgttaccaaaaacattaaggtagttcttgcgaatgccaccccactaagaaaactatttcattacttttgtaatccatctgtgagagtctgccccccagcttaaccacttcctttggtctgcacccaatgaagggaaaccccaaagtactgtctcaaatggtatttgaactacgccagtattgttggaataagtacattaattacttgaatgaatgaacacagcaccgtagaaatttcctttatggttacaccttgtatgtctaaagcattcaggccctgttctgtagtgtttcttatcctcacacagagtagaaaagcctgtttgctttatttaacttatacataaaagatgacatctgaaatatctgatgtgtattataataccagcttctgctctagaactactttgggtgaaatggtggtaatagcaaatgacctcctttaacaagacactcatctcaaacaatgccatttagttcaggagatctctaagtgtagctgtaaattttggggttaatttggcttatattggaccttttaaaagaaataaagttttttaatgcaataaa

SEQ ID NO: 415 - DNA, 3463 bp, Homo sapiens
gtttttcgttggaatatacgttgcacatttatggcgattctgagtgtgagggcagacttctgccaggctcagcacagcattttcgctgacaagtgagcttggaggttctatgtgccataattaacattgccttgaagactcctggacaccgagactggcctcagaaatagttggctttttttttttttaattgcaagcatatttcttttaatgactccagtaaaattaagcatcaagtaaacaagtggaaagtgacctacacttttaacttgtctcactagtgcctaaatgtagtaaaggctgcttaagttttgtatgtagttggattttttggagtccgaaggtatccatctgcagaaattgaggcccaaattgaatttggattcaagtggattctaaatactttgcttatcttgaagagagaagcttcataaggaataaacaagttgaatagagaaaacactgattgataataggcattttagtggtctttttaatgttttctgctgtgaaacatttcaagatttattgatttttttttttcactttccccatcacactcacacgcacgctcacactttttatttgccataatgaaccgtccagcccctgtggagatctcctatgagaacatgcgttttctgataactcacaaccctaccaatgctactctcaacaagttcacagaggaacttaagaagtatggagtgacgactttggttcgagtttgtgatgctacatatgataaagctccagttgaaaaagaaggaatccacgttctagattggccatttgatgatggagctccaccccctaatcagatagtagatgattggttaaacctgttaaaaaccaaatttcgtgaagagccaggttgctgtgttgcagtgcattgtgttgcaggattgggaagaaaaagaaggggagcgttcaattccaaacagctgctttatttggagaaataccgacctaagatgcgattacgcttcagagataccaatgggcattgctgtgttcagtagaaggaaatgtaaacgaaggctgacttgattgtgccatttagagggaactcttggtacctggaaatgtgaatctggaatattacctgtgtcatcaaagtagtgatggattcagtactcctcaaccactctcctaatgattggaacaaaagcaaacaaaaaagaaatctctctataaaatgaataaaatgtttaagaaaagagaaagagaaaaggaattaattcagtgaaggatgattttgctcctagttttggagtttgaatttctgccaggattgaattattttgaaatctcctgtctttttaaactttttcaaaataggtctctaaggaaaaccagcagaacattagcctgtgcaaaaccatctgtttggggagcacactcttccattatgcttggcacatagatctccctgtggtgggattttttttttccctttttttgtgggggagggttggtggtatatttttcccctcttttttccttcctctcctacatctcccttttcccccgatccaagttgtagatggaatagaagcccttgttgctgtagatgtgcgtgcagtctggcagccttaagcccacctgggcacttttagataaaaaaaaaaaaaaaacaaaaaacaacaccaaaaaaacagcagtgatatatatatatatatatatatatatatatatatatatatatatatatatatatatatatatatataatataatatatatatatatatatatattttccaggtggtttttagtctttactgatgaaagggtgttcatgttagtttcttcaaaaccctatctaatactaggcaaagtagccaagagccttttgttttgtttttattttgataaattagtggagaaatggcattttaagaggagtctcttctcaacttacctgagagtcgaattcttctcttccctaaccaatgaagctaagtggttatcccagaaacttgtcttctaaaagggaggactccaggccatcaataaagatgtccaggcagtgagcgtactttttacaccctgtagaattgtgggctgtagcgttactctgattttctgtctagtatcagagaatgctggtagcttaaaatttttattttaggacttgtactctgaattttcaggaaccgtcaaaggagcagcagcaaattcacatattttcgacttgagaaatgcttgtggtatgtgttttccaaactgccccctatatgtaaagttcagtttaaccactgattgccttgttattactaggttttttgagattaaaaaaaaaaaatccctggtttaaaaccaacaatgatgcctagtgagtatgtgtccacaggccataacagggtagaagagagacatcgtgcaacccaatgagtagtgaagggactgtgttgcttgtgaagcggtgtagtagcatttttgcagattcttggctgggtttagtgtactgatctagaaaagctgtttttctgctcctttgtggaaggcagttatgatcaggctgcatggacaaagcaggtagaggggcaccatcaggggctcttgcactattttcacctctaaatattacgtactcagtagtgccctgcttctagggctctgaatacgggcttaaagtcatcttgtcctgctggaatttgctgtgcagagccataagcctcccattttgttagcgtcagctaggccaataggaacagaccgggaccttgtctcacactgatgatacctcacatgttgaccggctatgtgaactgcctatttcctatgctggagttttgatttttaactaaacgcaaatctgtagattctctcctctcccatcccagaaaacaaaacaaaataatgcttttcgaaattgtttctaggactttaaaacataatggtatatccaaaattctttatttcagaatgcaacaatagattccattaatatagactcaagatcaaaacagcatacctgctaagctaagatagatggtgttgattccactgggttttgatcaatacaataacaaacctttttcctttgacatactctgaattttgttgtttggggggagggggtgtgtgtgtgtgtgtgtgtgtgtgtgtgtgtatgtgtgtgtgtgtgtgtgcacgcgcagtgtccatcagtatcagtgcctgcctgagttaggaaaattacattcctggttctgtattgaggagaaggatgtataaagcaacatgaaacattagccctccttttattttaaagactaatgttaattgttcttaaaactggattttttttccttaaagcaatttttttcttttcgatttaatgaagtattgctagctgaagccagtttgacatagagagatgtcagattgatttgaaaggtgtgcagcctgatttaaaaccaaaccctgaacccttttaaagaacaataaaacatattttacacgctcaaaaaaaaaa

SEQ ID NO: 416 - DNA, 10558 bp, Homo sapiens
cgccgctttgttccgggtgcggcgagggaaggcgaggctgcggcggatcatgcccatggtgtagccgccaagcggaggcatggctgccggaaggttactgctctacactggcctctcgctagcgctctgcgccctcggcatgctggccgtggccatctgctcggaccactggtacgagacggacgccaggaagcacagggacaggtgcaaggccttcaacacccgccgggtcgaccccggcttcatttacaacaataacaacaacttgccgctccgggcgagccgctcgcgcctggaccgctgggagggcaaactcctccgggcccggaatcgccggcagctgttcgccatgagccccgcggacgagtgcagccggcagtacaactccaccaacatgggcctctggaggaagtgccaccggcagggcttcgaccccgagatcgccgccctcattcggaaaggagaaattgagcgatgtacgtacatcaaataccactactcctcagcaaccatccccaggaacctcactttcaatatcacgaagaccatccgtcaggatgagtggcatgccctacacctgcgcagaatgacggctggcttcatgggcatggcggtggccatcatcctctttggctggatcatcggcgtgctgggctgctgctgggaccgaggccttatgcagtacgtggcagggctgctcttcctcatgggaggaaccttctgcatcatttcactgtgcacctgtgtggccgggatcaactttgagctgtcacgctacccacgctacctgtacggactccctgatgacatcagccatggctatggctggtccatgttctgtgcatgggggggcctgggcctcacactcatctcgggattcttctgtaccttagccccttctgttcaacctgtcccgaggaccaactaccctaaatccagacccgagaatgggacagtgtgctaaaaaacaaacccatacatacatatatatatataaatatatatatataatatacatatataaaacaaaacaaaactaaatcaagacgatgccagtgccaaggtagagttgagttggctcaggcacctgcatctcgccggactttgtgttgcctcatctctgagatggggaaagtttttccatcctgtggctcttccatcagttcttgacttttggcttcatggtctcttgaagacagagcaaacaccaccacttgcgaccgcgtcttgatccccatcactggcgaggatggggtggtgaagggacagtggaaggggtctgaggcagcacagatgtagagaaggaagtgccacccactgggtcaacgggagaggacgccacccctaaccagtcatatcacagggtaacaaagccctcagttcctagaatgtaaccaaattattgaggccattttcagaatcacttcttctcctgctcttcctgttcggacttccttcccagcccaccagcaacacacaaggagtggaagagaaaacaaactgagaaggacgttttctctttgctgccaaacttttggaccatgtttcataggtgggaagggaagagaacatgctgagaggcaagatctgcatcaatgaaaggacgcttcggtggatgctcagacaacccagtcttaccttccagctgccttacacccagtgaaacaagaggccaccctgtccccagccgcacctgcactccctgggcagactggagccttggagtcatgctgtgatgtgtgtgtgtgggtgtgcgtgcatgtgtactttgggcggtttcctttttttcttttctaccttttaaatggaaatactgcattatgactgttgtctctcttatcactgtagtggtttcatggccccagatagaggcccagagacctagaaattgtcatgagggacaggcctataagggtgccaattctgcagctacagatccctggagtggtgtgtgtgtgcgtgtgtgtgtgtgtgtgtgtgtgtgtgtgtgtgtgtggtggatgtttcttgagcgtggggttttattgtttgtgttgtgtttttttaaattgtttctggtatagctgaaatttccagagggcagaaccaagaacaaagccactgggccagaggacccccgtggttctccacattacagctctgggactctgcacgatttagtcctctaattttggaagttcaagacacagctgggcacataagccatgagagaagagggggaacacacagttcaggagagagaagaaatgttgctctggttgctgttgtacaagaacataaaccaacaagaccttcactccccattatagaagctgtcctttgtcactggacatctcccctttccctaggggtgacctctgtacaaacgaaaggaagtgggtcacatgcagagagagcacctccatttcccatgggctcaagtttgtatgatattgtgtaaattaatgcagaactcttgactctttccatcctcttcctttccctcttgatattcaaggccatgaatcccaaaataacagtcttagtggctagcacccaaacagaggtggaataaatccaccccagtgtctcgggctcatttgagcaaattagcactgcaggtgctggcaagcaaagtcagccagagagttgtgaacgctgtaggggtgggagtctgctggagtgggctggagccgctcacagtcatctcagtgagcctgctggtgcccagcagccctggggaggccaggtgagaatccctgagctggtgtagccatggtcaactgtgtagcagagaatccccttgtttcataaacaaatatgctttgggagctttgccaggcactcagcagcctttcttccactgctgtgtaatctgtttcatttacacgtcttccaacccatcttcctaccactctcctccttttctcacctactaaccacttaccttctctctcttctatcttccaccctcatctgctcctttgaactgcgtgtatgtaattcatatctggatatgatatgacatctgatgtgcatgaatggggttgaatgtggatctctctgtatgtgtatctctctggtgcattttgtgtacgtttgtgtcagtacacacctgcacacaggtgtgggtgccctactcaagacttccttaccggggactctggtcagcttctgcaaaaggtctcatgtgtgagttccctgtgtgtgggtgtgctgggcgatagggtaaggtgtgcaacgggaaaagttgttagcttccagttggggttctaaggattatttttaaaacaaaggatttattctatgagaagggaaataattttcaggaaaacccagtttttcaattgggcattttatttctaattttctttgaaaagttagatttctcccttaaggggaagggcatacttgggcttaaggaaaagtgaagaaaagtatctcagattgagaggccttttgtcttccttccaagcgtcctgaaggggctctgccgaggaagggacagacaggttcacaagcatccatttgggggagagggcttgtctatgaccacactgaaattccagcttttttccagttgcaggagagaggggaaaaattctaaatggggaaatttgctatgaaccatttaaactttttgtaagtaatcatgtttgaggatgctggctcacagacctatcattatttatatcctctttttaaaaaaaaatcccatactttcaatgaatagattatctgctctatccaattattgtctttgtgacagacatttagcaaagcttactgcatccctttgaaaccttgagagttcctgaaatgttagaaagctcccaggaaagacgtaaacaacctgggctcaactcaccagcccagagcaggggctttgagtgacttctttgatagcaggaccagataaatacgaacacactttgggatctgatcctgctgggaagcaaaagacgcccagccacatgaccaggatagaggcccctttcagacggcaagtcctggccaatgggaggacttctcaggtgaccttgatccctctagcataagggcttgaccacagattaaaacatgtgactccaaccagttacggaagctttctggctgtgaggtagctgagggagatgaggaggaggaagagaggagccttgacttgtgaggctctgtaggtcagactctgctaactccaaatcaaagtggaacccaaccttatgagggcatttagggtcaatgacctcactaaagtcaccagccgcaaccccaggtcaagttcaaacttcttactggcatatgaacatgtatgtgctttgagctccatgcaagtcaaccttgagcctggggcccattgcaacttttatttccttccctactctactaccttgagattcaggaaagtgaggtattctacctagagagaggtcccatatctttttctccttattttgggagttacggtttcttcttctgtttccgtttcctctctctctactcactcctactttctcctgcatcaactttggtcaattaacatagacaagtgattcatctgtagagaggctcctagactccaagcagcccccttccttgttcattgtggctgtaggttttataaggaggtctgtggctccctggcatcaaaatatgaaaaataaaatctgtgcctgttccagcttcaatcctcctccaagccttagcttttcaacaaccctaccctttcaacttcagggatcatggagtcacagagactggacaactcctccaaatctagacaaagactttcttaagcgccctgagcccaggtgcatatcttcccatcagggatgagtggtcccacctagcaatgcttgcctctcctgtgacaagagggtaggatatcctaggactctgagactgggccctatatctcaatattcatccacactcatgataagatgccggaaatgaatgcactgtgtgtagctgtcttgatttagtgggaggatgtgctgcttaggtctccaaagatgcccacctgggtcaaattcagaataatgaactcaggtacatcacccagaggcatttagaatggactctctcttcacctggattatgtgctgagtgttaagtgatttttcaaatatctgggggaaggagtgggaagagatacactctggtcatcctttggtgtggtttgtgggggatacttggttgattcttgtagttaaagtgaagttgcttttctgaaaatgttccctgtcttcaggggacttacccatcccaggggacacatccatcccaggggacacagccagccctttccagggaaatacgatgtttctgagtgagaggtgatttcagtgcagataggaagagctggtgcacaccagcagggttgccttccatgccatcttccagctggtgtgggatagactaagggggcagatttttaagaaccccaccagagttgacatacacacgtgattctcgtgtctgtctctcaaagctctcaatgtctggggctgtgtttgccctcttttcattgatgctgccatgatgcaaaatgtttcttaaacattattcctggttcttagaatatgtgattactgagtattggatttctttcctgaataataactgctcattgtagaaaataagaaaaataaaatacaaaaaagactacaagatttttcataatccagtcactctgaggcatctaccgcgggcccaatccaaatggtcatgacctcaaaacttccccaatgagtgcttgtctctgggttggcagctggggccatgtgagcagtgtacaccacagaaccgcactggtctgcgttgagttgaccctgtgttcctggcagcaagagtgcagggccctgagcccccagagatagcaaagaggcctaaaagtttaatgccagaccttaggggcaggatggagcagggctaaaagatgtctctttgggcctgtctgcctgctttccttccttccttttctttcctttttttttttggtcagttgccatctcaatctaatcatagatgtaagaatgcggaagccagagtaactcactcattaagctacacttgtgtaacagttactgtaaatttcactacagctctgcactgaaatgatttgtgactctgggcactgtgtcttctccatacttgaacttcctcatctacaaaatgaggataagtgataacaccttacctcatggtatattaagggtgacaaagaaattgcaaagtgatttgcaaacatgaagtgtcatatgagttatgtatgttctaattatccctcagaagaccccccgctggaatggaattctcacatcaagtgtctgtgcctcgctgctgaaggataacccagagtgcaaggtcatctttgttgctgaacagggctggacctgtcgcacttaagcacacttaaaggattctattcttcattcaggtcccccagagaaattggctccttatttttctttacctattcctagacttccttttgtctagagccagttttgcaaagggcacttttatccatctcagttattcccagaggtgacagaatgagtaaaccatatggggcaaatagcatatatgagctaaaccagttaactgttaaccaaggcacatggtcaatgccttagtatttttttttttaattctcctaacgttatttctagctgtacattcccaaaaggaatgggtggaagcaaatcagattctgaaaggtttcaatgatctttcaagtttaggatgagaccaagtctcaaggagctgggatcttctttctcttgtcagttgctgaagccagtagcttcgtcaaaaacatatgaattcatataaggaagccctttagatggtacattcactaagacgtgtctgggtgtgatcctgtttgggaaaaacagaatcctaggttctaaacaagaaaagaacgcccttcccaaagggtccgcacactttctgctttgcagcggatcaagtgtccttgtgagggtgagacttccttcaagggaagggaagccattgctctctctgtagatagagcccagctggtaacgggggagccacccaactgcaggggggtgtatgttcaggtgtgaaaaacagaaaactgggtctgaacatgaagagttgcacagcagtagttcgaagaagctggcatctctttggcaaacaccaacctcagcaaatgcaactcctacacttcattcccaaggaccaggtgttgctccttaaggaactctgtatccctctctcctctccagaaccccattcctcccactggctgagcttttcctttcctttccgggtcacccatagaccctctccgtctgtaccagtgcgtctgtgttgtgagcgtgacgaagcctttcctgtgaagagctttcatgaactcattctcatactccttccccatttccacccatggtgtgactgttttgctattcaagactatctgtaaaaatgtacaaataaaagtgaaaactgaaaataaaggggagggagattgagattaaacaaatgcaatgatgtagcccttagttttctgaggacttctgtggacggccctaaaatcctgagttagggtgggatatgaagggagggataccattgacacaggaggtttttttctggttgtttctctcacagtcatcagtgtctgcttagaactctctgttctaaaggtttttccctgtaaagtagaatgcacttcccccaaaataaaagtaaatcagcaatgtttgaagggtcatggcaagggtcatgacaaagacctgactctggggtggcatgagtggccctgtcaccggctcactcagggccttgggggagtctcattacctcaccttgtctccacgtcttctcagccaaatggggatcaggggcttccagggctctgggggtgcgcagtccccttgtgtattttgctgctatttctagagagactttgagcccttgctagtgcgtgcttactgcatggaggtaaattaggagatgttttctctctgctactcctggcctctgctttcgcccctcagaaagtgaccttgagctagcagccagtttgcactcagagtccagagccttctatctaccgtttcattctcagattccttttcccacccactttgacgatctcattttactatcagtctctactgactgagctttgctgcactgggctggggtaggagaaagagcatccaaggagatgatgtgtgaattgctttgtaatttatgactcaccatataaatgtggcttgcagtgtcagaagcagggagtctggccaagggttgctaccaaataagactgaagatggtggaggcagtggtggcgtggaggcagtaggcagaagatgtgggttgggagcagaggtaagatgaacggagctttgggaaggacagatggcagaagcaccagaaaatcctcagcaaggcagcagagaaggatcctcaaagcagtaaccctgaagtaataggaagtaggaaagaggagcagggattaggtaaatctgcagcataaacagctgtctccctgcaggactgagaagaccagctgccccagagaggggaggcacgtcgagcttggccagtgacccaacccatgattagaggcaccttcaatcccaactttcctctcctctgctgggtcacagtgatggaaccagcttcaggaaggtagtatagaccagcgtcatccaatggaaccatgatccaagccacatatgcaatttaaaatattctagtagccacattttttaaagtccaaagaaacagctaaaatcagtgaaattaatttttagactacattttaacctaacatgtcaaaaatagtatcacttcagcatggaatcaatataaaaattactgggatattttacattcttttttccaaatgaagtcttcaaaatccaatgtgattttcctcttagaaaacatctcagtctggcccagccctatttccagtgttcaatagccacacctgactactggttgctgtataggacagcacggacttaggttcttcattaggagactgatggggggggtccttcctggtgggtcactcactgccatagctcttgtcatagctgatgaaggcaggagtgagtcttattatgttggcctagagtagaaagcacagagctatgtcgaggctgctgtctcagcctctggaagttctgcttcacctgcttagtaagaggagatgaccactcctgtggactgcatgtcccatctgcccccagagggtgtcggcgctgccccagtcatgtcccttatgacctgtccaagtcctagaggccaaagcaggtcatattcttcagctgcaggaatgtcagctactgcctcccaccccttaacctgatccccttatcatatagtggggaaggggcaggcaggccttctctctgtcaagaacaaagatctctacaacatttcgtcacctgggccagtcacctgctaatatcatctcaccaatatttggagctgttttctgaatcccttaattttcttaaatatttatcttaaagtcaaatgctataaaggagataccctgggaagggcagtggccacaggcagactgggtctcctaggaggtggtggtgttggtgacaagttctacttggactgggactcaacccaccattgcctacctctcttccctgcctggagaccttccttaggattgaagaaacctcttttgtttgtgaaaaagataggtatcgagatcttaatggagagaacagaataaaatgcaaggagccaacccctgggtattctcaaagcatttcaacggtcagtataacaaggtttgattgatttaaaatataacattctgagccctgtgttactgagcaaaaatgagctgatttggtgagtatgttttatatatggtcattagacagggaccataactgacaaaactctcaaacgcctggagtgtttatggcccaccagattattgctcagtcaatataaatttatttacctttattttaatttgcatagtgctttctgattggtcagacaaggagtggtgtgtactgcaggattctaacaatgcctctgcccttggaggcagcaattcctgtggttattggtgctaaaataagataaaatattatgttaatttgttctgatatgatgtgaataaatgtgttgtttaatcttaacaagaatgctacatcttatcagatctattgtactgtctgttccttctcataattaattaattacaggaaaggcgattcaaaccagatcttgaaactattgtgatgttctgagaggtaaatttaacagggaagtgggaggggggatgaaaagggaaattgccaggttcctgtgactttgaaaggactgaggaagcagagagcatttggggacttcactgaaactgactgcatcttgcaattttctttttcgaattggcagaaatattgtatttccattgattgaagaaaaacaagtgtctggtaattaattaaatgacttgttcatggaaaaaataaataatctgtcagttgtggaatgtaaactgattaaacaattaaataaagaagattatgttgtgtgttttaaa

SEQ ID NO: 417 - DNA, 9921 bp, Homo sapiens
taagctgtgctagaacaaaaatgcaatgaaagaaacactggatgaatgaaaagccctgctttgcaacccctcagcatggcaggcctgcagctcatgacccctgcttcctcaccaatgggtcctttctttggactgccatggcaacaagaagcaattcatgataacatttatacgccaagaaaatatcaggttgaactgcttgaagcagctctggatcataataccatcgtctgtttaaacactggctcagggaagacatttattgcagtactactcactaaagagctgtcctatcagatcaggggagacttcagcagaaatggaaaaaggacggtgttcttggtcaactctgcaaaccaggttgctcaacaagtgtcagctgtcagaactcattcagatctcaaggttggggaatactcaaacctagaagtaaatgcatcttggacaaaagagagatggaaccaagagtttactaagcaccaggttctcattatgacttgctatgtcgccttgaatgttttgaaaaatggttacttatcactgtcagacattaaccttttggtgtttgatgagtgtcatcttgcaatcctagaccacccctatcgagaaattatgaagctctgtgaaaattgtccatcatgtcctcgcattttgggactaactgcttccattttaaatgggaaatgtgatccagaggaattggaagaaaagattcagaaactagagaaaattcttaagagtaatgctgaaactgcaactgacctggtggtcttagacaggtatacttctcagccatgtgagattgtggtggattgtggaccatttactgacagaagtgggctttatgaaagactgctgatggaattagaagaagcacttaattttatcaatgattgtaatatatctgtacattcaaaagaaagagattctactttaatttcgaaacagatactatcagactgtcgtgccgtattggtagttctgggaccctggtgtgcagataaagtagctggaatgatggtaagagaactacagaaatacatcaaacatgagcaagaggagctgcacaggaaatttttattgtttacagacactttcctaaggaaaatacatgcactatgtgaagagcacttctcacctgcctcacttgacctgaaatttgtaactcctaaagtaatcaaactgctcgaaatcttacgcaaatataaaccatatgagcgacagcagtttgaaagcgttgagtggtataataatagaaatcaggataattatgtgtcatggagtgattctgaggatgatgatgaggatgaagaaattgaagaaaaagagaagccagagacaaattttccttctccttttaccaacattttgtgcggaattatttttgtggaaagaagatacacagcagttgtcttaaacagattgataaaggaagctggcaaacaagatccagagctggcttatatcagtagcaatttcataactggacatggcattgggaagaatcagcctcgcaacaaacagatggaagcagaattcagaaaacaggaagaggtacttaggaaatttcgagcacatgagaccaacctgcttattgcaacaagtattgtagaagagggtgttgatataccaaaatgcaacttggtggttcgttttgatttgcccacagaatatcgatcctatgttcaatctaaaggaagagcaagggcacccatctctaattatataatgttagcggatacagacaaaataaaaagttttgaagaagaccttaaaacctacaaagctattgaaaagatcttgagaaacaagtgttccaagtcggttgatactggtgagactgacattgatcctgtcatggatgatgatgacgttttcccaccatatgtgttgaggcctgacgatggtggtccacgagtcacaatcaacacggccattggacacatcaatagatactgtgctagattaccaagtgatccgtttactcatctagctcctaaatgcagaacccgagagttgcctgatggtacattttattcaactctttatctgccaattaactcacctcttcgagcctccattgttggtccaccaatgagctgtgtacgattggctgaaagagttgtagctctcatttgctgtgagaaactgcacaaaattggcgaactggatgaccatttgatgccagttgggaaagagactgttaaatatgaagaggagcttgatttgcatgatgaagaagagaccagtgttccaggaagaccaggttccacgaaacgaaggcagtgctacccaaaagcaattccagagtgtttgagggatagttatcccagacctgatcagccctgttacctgtatgtgataggaatggttttaactacacctttacctgatgaactcaactttagaaggcggaagctctatcctcctgaagataccacaagatgctttggaatactgacggccaaacccatacctcagattccacactttcctgtgtacacacgctctggagaggttaccatatccattgagttgaagaagtctggtttcatgttgtctctacaaatgcttgagttgattacaagacttcaccagtatatattctcacatattcttcggcttgaaaaacctgcactagaatttaaacctacagacgctgattcagcatactgtgttctacctcttaatgttgttaatgactccagcactttggatattgactttaaattcatggaagatattgagaagtctgaagctcgcataggcattcccagtacaaagtatacaaaagaaacaccctttgtttttaaattagaagattaccaagatgccgttatcattccaagatatcgcaattttgatcagcctcatcgattttatgtagctgatgtgtacactgatcttaccccactcagtaaatttccttcccctgagtatgaaacttttgcagaatattataaaacaaagtacaaccttgacctaaccaatctcaaccagccactgctggatgtggaccacacatcttcaagacttaatcttttgacacctcgacatttgaatcagaaggggaaagcgcttcctttaagcagtgctgagaagaggaaagccaaatgggaaagtctgcagaataaacagatactggttccagaactctgtgctatacatccaattccagcatcactgtggagaaaagctgtttgtctccccagcatactttatcgccttcactgccttttgactgcagaggagctaagagcccagactgccagcgatgctggcgtgggagtcagatcacttcctgcggattttagataccctaacttagacttcgggtggaaaaaatctattgacagcaaatctttcatctcaatttctaactcctcttcagctgaaaatgataattactgtaagcacagcacaattgtccctgaaaatgctgcacatcaaggtgctaatagaacctcctctctagaaaatcatgaccaaatgtctgtgaactgcagaacgttgctcagcgagtcccctggtaagctccacgttgaagtttcagcagatcttacagcaattaatggtctttcttacaatcaaaatctcgccaatggcagttatgatttagctaacagagacttttgccaaggaaatcagctaaattactacaagcaggaaatacccgtgcaaccaactacctcatattccattcagaatttatacagttacgagaaccagccccagcccagcgatgaatgtactctcctgagtaataaataccttgatggaaatgctaacaaatctacctcagatggaagtcctgtgatggccgtaatgcctggtacgacagacactattcaagtgctcaagggcaggatggattctgagcagagcccttctattgggtactcctcaaggactcttggccccaatcctggacttattcttcaggctttgactctgtcaaacgctagtgatggatttaacctggagcggcttgaaatgcttggcgactcctttttaaagcatgccatcaccacatatctattttgcacttaccctgatgcgcatgagggccgcctttcatatatgagaagcaaaaaggtcagcaactgtaatctgtatcgccttggaaaaaagaagggactacccagccgcatggtggtgtcaatatttgatccccctgtgaattggcttcctcctggttatgtagtaaatcaagacaaaagcaacacagataaatgggaaaaagatgaaatgacaaaagactgcatgctggcgaatggcaaactggatgaggattacgaggaggaggatgaggaggaggagagcctgatgtggagggctccgaaggaagaggctgactatgaagatgatttcctggagtatgatcaggaacatatcagatttatagataatatgttaatggggtcaggagcttttgtaaagaaaatctctctttctcctttttcaaccactgattctgcatatgaatggaaaatgcccaaaaaatcctccttaggtagtatgccattttcatcagattttgaggattttgactacagctcttgggatgcaatgtgctatctggatcctagcaaagctgttgaagaagatgactttgtggtggggttctggaatccatcagaagaaaactgtggtgttgacacgggaaagcagtccatttcttacgacttgcacactgagcagtgtattgctgacaaaagcatagcggactgtgtggaagccctgctgggctgctatttaaccagctgtggggagagggctgctcagcttttcctctgttcactggggctgaaggtgctcccggtaattaaaaggactgatcgggaaaaggccctgtgccctactcgggagaatttcaacagccaacaaaagaacctttcagtgagctgtgctgctgcttctgtggccagttcacgctcttctgtattgaaagactcggaatatggttgtttgaagattccaccaagatgtatgtttgatcatccagatgcagataaaacactgaatcaccttatatcggggtttgaaaattttgaaaagaaaatcaactacagattcaagaataaggcttaccttctccaggcttttacacatgcctcctaccactacaatactatcactgattgttaccagcgcttagaattcctgggagatgcgattttggactacctcataaccaagcacctttatgaagacccgcggcagcactccccgggggtcctgacagacctgcggtctgccctggtcaacaacaccatctttgcatcgctggctgtaaagtacgactaccacaagtacttcaaagctgtctctcctgagctcttccatgtcattgatgactttgtgcagtttcagcttgagaagaatgaaatgcaaggaatggattctgagaaaagttttctgcaaatgtaccccgttcccctgtgcgagaattgcttgaaatggaaccagaaactgccaaatttagcccggctgagagaacttacgacgggaaggtcagagtcactgtggaagtagtaggaaaggggaaatttaaaggtgttggtcgaagttacaggattgccaaatctgcagcagcaagaagagccctccgaagcctcaaagctaatcaacctcaggttcccaatagctgaaaccgctttttaaaattcaaaacaagaaacaaaacaaaaaaaattaaggggaaaattatttaaatcggaaaggaagacttaaagttgttagtgagtggaatgaattgaaggcagaatttaaagtttggttgataacaggatagataacagaataaaacatttaacatatgtataaaattttggaactaattgtagttttagttttttgcgcaaacacaatcttatcttctttcctcacttctgctttgtttaaatcacaagagtgctttaatgatgacatttagcaagtgctcaaaataattgacaggttttgtttttttttttttgagtttatgtcagctttgcttagtgttagaaggccatggagcttaaacctccagcagtccctaggatgatgtagattcttctccatctctccgtgtgtgcagtagtgccagtcctgcagtagttgataagctgaatagaaagataaggttttcgagaggagaagtgcgccaatgttgtcttttctttccacgttatactgtgtaaggtgatgttcccggtcgctgttgcacctgatagtaagggacagatttttaatgaacattggctggcatgttggtgaatcacattttagttttctgatgccacatagtcttgcataaaaaagggttcttgccttaaaagtgaaaccttcatggatagtctttaatctctgatctttttggaacaaactgttttacattcctttcattttattatgcattagacgttgagacagcgtgatacttacaactcactagtatagttgtaacttattacaggatcatactaaaatttctgtcatatgtatactgaagacattttaaaaaccagaatatgtagtctacggatattttttatcataaaaatgatctttggctaaacaccccattttactaaagtcctcctgccaggtagttcccactgatggaaatgtttatggcaaataattttgccttctaggctgttgctctaacaaaataaaccttagacatatcacacctaaaatatgctgcagattttataattgattggttacttatttaagaagcaaaacacagcacctttacccttagtctcctcacataaatttcttactatacttttcataatgttgcatgcatatttcacctaccaaagctgtgctgttaatgccgtgaaagtttaacgtttgcgataaactgccgtaattttgatacatctgtgatttaggtcattaatttagataaactagctcattatttccatctttggaaaaggaaaaaaaaaaaaacttctttaggcatttgcctaagtttctttaattagacttgtaggcactcttcacttaaatacctcagttcttcttttcttttgcatgcatttttcccctgtttggtgctatgtttatgtattatgcttgaaattttaatttttttttttttgcactgtaactataatacctcttaatttacctttttaaaagctgtgggtcagtcttgcactcccatcaacataccagtagaggtttgctgcaatttgccccgttaattatgcttgaagtttaagaaagctgagcagaggtgtctcatatttcccagcacatgattctgaacttgatgcttcgtggaatgctgcatttatatgtaagtgacatttgaatactgtccttcctgctttatctgcatcatccacccacagagaaatgcctctgtgcgagtgcaccgacagaaaactgtcagctctgctttctaaggaaccctgagtgaggggggtattaagcttctccagtgttttttgttgtctccaatcttaaacttaaattgagatctaaattattaaacgagtttttgagcaaattaggtgacttgttttaaaaatatttaattccgatttggaaccttagatgtctatttgattttttaaaaaaccttaatgtaagatatgaccagttaaaacaaagcaattcttgaattatataactgtaaaagtgtgcagttaacaaggctggatgtgaattttattctgagggtgatttgtgatcaagtttaatcacaaatctcttaatatttataaactacctgatgccaggagcttagggctttgcattgtgtctaatacattgatcccagtgttacgggattctcttgattcctggcaccaaaatcagattgttttcacagttatgattcccagtgggagaaaaatgcctcaatatatttgtaaccttaagaagagtatttttttgttaatactaagatgttcaaacttagacatgattaggtcatacattctcaggggttcaaatttccttctaccattcaaatgttttatcaacagcaaacttcagccgtttcactttttgttggagaaaaatagtagattttaatttgactcacagtttgaagcattctgtgatcccctggttactgagttaaaaaataaaaaagtacgagttagacatatgaaatggttatgaacgcttttgtgctgctgatttttaatgctgtaaagttttcctgtgtttagcttgttgaaatgttttgcatctgtcaattaaggaaaaaaaaaatcactctatgttgccccactttagagccctgtgtgccaccctgtgttcctgtgattgcaatgtgagaccgaatgtaatatggaaaacctaccagtggggtgtggttgtgccctgagcacgtgtgtaaaggactggggaggcgtgtcttgaaaaagcaactgcagaaattccttatgatgattgtgtgcaagttagttaacatgaaccttcatttgtaaattttttaaaatttcttttataatatgctttccgcagtcctaactatgctgcgttttataatagctttttcccttctgttctgttcatgtagcacagataagcattgcacttggtaccatgctttacctcatttcaagaaaatatgcttaacagagaggaaaaaaatgtggtttggccttgctgctgttttgatttatggaatttgaaaaagataattataatgcctgcaatgtgtcatatactcgcacaacttaaataggtcatttttgtctgtggcatttttactgtttgtgaaagtatgaaacagatttgttaactgaactcttaattatgtttttaaaatgtttgttatatttcttttcttttttcttttatattacgtgaagtgatgaaatttagaatgacctctaacactcctgtaattgtcttttaaaatactgatatttttatttgttaataatactttgccctcagaaagattctgataccctgccttgacaacatgaaacttgaggctgctttggttcatgaatccaggtgttcccccggcagtcggcttcttcagtcgctccctggaggcaggtgggcactgcagaggatcactggaatccagatcgagcgcagttcatgcacaaggccccgttgatttaaaatattggatcttgctctgttagggtgtctaatccctttacacaagattgaagccaccaaactgagaccttgatacctttttttaactgcatctgaaattatgttaagagtctttaacccatttgcattatctgcagaagagaaactcatgtcatgtttattacctatatggttgttttaattacatttgaataattatatttttccaaccactgattacttttcaggaatttaattatttccagataaatttctttattttatattgtacatgaaaagttttaaagatatgtttaagaccaagactattaaaatgatttttaaagttgttggagacgccaatagcaatatctaggaaatttgcattgagaccattgtattttccactagcagtgaaaatgatttttcacaactaacttgtaaatatattttaatcattacttctttttttctagtccatttttatttggacatcaaccacagacaatttaaattttatagatgcactaagaattcactgcagcagcaggttacatagcaaaaatgcaaaggtgaacaggaagtaaatttctggcttttctgctgtaaatagtgaaggaaaattactaaaatcaagtaaaactaatgcatattatttgattgacaataaaatatttaccatcacatgctgcagctgttttttaaggaacatgatgtcattcattcatacagtaatcatgctgcagaaatttgcagtctgcaccttatggatcacaattacctttagttgttttttttgtaataattgtagccaagtaaatctccaataaagttatcgtctgttca

SEQ ID NO: 418 - DNA, 4864 bp, Homo sapiens
atggtctctagcgaccggcccgtgtcactggaggacgaggtctcccatagtatgaaggagatgattggaggctgttgcgtttgctcagacgagagaggctgggccgagaacccgctggtttattgcgacgggcacggctgcagcgtcgcggtgcatcaagcttgctatggcattgttcaagtacccactggaccgtggttttgcaggaaatgtgaatctcaggagagagcagccagagtgagatgtgaactttgtccccataaggatggagctttaaaaagaacagataatgggggttgggcccatgtggtttgtgccctgtatattccagaggtacaatttgccaatgtttccacaatggaaccaattgttttacagtctgttccgcatgatcgttataataagacttgctacatttgtgatgaacaaggaagagaaagcaaagcagccactggtgcttgcatgacatgtaataaacatggatgtcgacaggctttccatgtaacatgcgctcagtttgccggactgctttgtgaagaagaaggtaatggtgccgataatgtccaatactgtggctactgtaaataccattttagtaagctgaaaaagagcaaacggggatctaataggtcatatgatcaaagtttaagtgattcttcctctcactctcaggataaacatcatgagaaagagaaaaaaaaatataaagagaaggacaaacacaaacagaaacacaagaagcagccagaaccatcacctgcattggttccatccttgactgttactacagaaaaaacttatacaagcactagcaacaactctatatctggatcattgaagcgcttggaagatactactgcacgatttacaaatgcaaatttccaggaagtctctgcacacacctctagtggaaaagatgtttcagagactagagggtcagagggcaaagggaagaaatcttcagctcacagctcaggtcaaaggggaagaaagcctggtggtggaagaaatccaggaacaactgtgtcagcagctagcccttttcctcaaggcagtttttcaggaactccaggcagtgtaaagtcatcttctggaagttcagtgcagtctccccaggatttcctgagctttacagactcagatctgcgtaatgacagttactctcactcccaacagtcatcagcaaccaaagatgtacataaaggagagtctggaagccaggaagggggggtaaatagttttagtaccttaattggcctcccttcaacctcagctgttacttcacagcctaaaagctttgaaaattcacctggagatttgggtaattccagccttcctacagcaggatataagcgggctcaaacttctggcatagaagaagaaactgtaaaggaaaagaaaaggaaaggaaataaacaaagtaagcatgggcctggcagacccaaaggaaacaaaaatcaagagaatgtttctcatctctcagtttcttctgcttcaccaacatcatctgtagcatcagctgcaggaagcataacaagctctagtctgcagaaatctcctacattgctcaggaatggaagtttacagagcctcagtgttggctcatctccagttggttcagaaatttccatgcagtatcggcatgatggagcttgcccaacaactacgttctcagagttgctgaatgcaatacacaacggtatttataacagcaatgatgtagcagtatcgtttccaaatgtagtatctggctcgggatctagtactcctgtctccagctctcacttacctcagcagtcttctgggcatttgcaacaagtaggagcgctctctccctcagctgtgtcatctgcagcccctgctgttgctacaactcaggcaaatactctatctggatcttctctcagtcaggcaccatctcatatgtatggcaatagatcaaattcatcaatggcagctcttatagctcagtctgaaaacaatcaaacagatcaagatcttggagacaatagccgcaacctagttggcagaggaagctcaccccgaggaagtctctcgccacgatcccctgtaagcagcttacagattcgctatgatcaaccaggcaacagcagtttggaaaatctgcctccagtagcagccagcatagaacagcttttggagaggcagtggagtgaaggacagcaatttttactagaacagggtactcctagtgacattttaggaatgctgaagtcattacaccaacttcaagttgaaaaccgaagattagaggaacaaattaaaaacttgactgccaaaaaggaacggcttcagttattgaatgcacagctttcagtgccttttccaacaataacagcaaatcctagtccgtctcatcaaatacacacattttcagcacagactgctcctactactgattccttgaacagcagtaagagccctcatataggaaacagctttttacctgataattctcttcctgtattaaatcaggacttaacctccagtggacaaagtaccagcagctcatcagctctttctaccccacctcctgctgggcagagtccggctcaacaaggctcaggagtgagtggagttcagcaggtcaatggcgtgacagtgggggcactagctagtggaatgcagcctgtaacttccaccattcctgccgtgtctgcagtgggtggaataattggagctttgccaggtaaccaactggcaattaatggcattgtaggagctttaaatggggttatgcagactcctgtcacaatgtcccagaaccctacccctctcacccacacaaccgtaccacctaatgcaacacatccaatgccagctacactgactaacagtgcctcaggactaggattactttctgaccagcaacgacaaatacttattcatcaacagcagtttcagcagttgttaaattctcaacagctcacaccagaacaacatcaagcctttttgtatcagttaatgcaacatcaccaccagcagcaccaccaacctgaacttcagcagctgcagatccctggaccaacacaaatacccataaacaaccttcttgcaggtacacaggcacccccacttcacacagctaccaccaacccatttctcaccatccatggagataatgcaagtcagaaagtagcaagacttagtgataaaactgggcctgtagctcaagagaaaagttgacacctgagaaacatctagaaattgcctatcctgctgttctagcacttcatctggctgcctttgcagtccttttactacagctatgaagaaacgcaacaagaaactcaatgcacaacaaaggattaattgctgcaaggacattcttgtaaggctttgattagttttcttgttgctttgttgcactgaaatggaattcccatgcccctaccccttaccccagttttttgaacatggaaagaaaatttaataactttttaaagtgacataatttacatgcaatatgtttatcaactcaagaatttaatatagttggtacacaactagttttgtttataaattggagatgcaaatagcaaaactaaatacttgctccatttacaaactacttgattttattgtacaagttgaaatatgctcttttgtttgggttacagtatgcttgctctaagtcaaattccaaggaactaatttcttctcctggagttgcattgattcagtattacaaatatatagcacatcacctgggacttggcaatctttgttaaaaaaaaatttcctttctaatgggatttggccaattttggtaatgaagttaggatggtaatgtctgcatctgctaaaggtaattttcttttgagaattgctttctttagtgttaagacctactcatattttgaagaaatcttgagttaagtgagttctgaggctgctgggggaaccagatcaattcaaagctaaatacttctttcagaaaggggccactgtggaaagtgctggtggggtttgcccttgatcaagtgcctccattgtgctgcaagggctgtagacagcagggtgggacagtcagtcctccgagcagcaggaatcatcccgtcacctgcagccttcccatgcttccgcctttattcagaactttctgtgccactgtagatagctcaggcaaaactattacctgggtatttatccactaatgagtcacaagaaaaggagtggatttggtaagaatagagatttgttttatttaaaccacttcccattactgaccattaaaagctcaccactagagttcctgaaacaggtgaaacctgtatgacagcccttccactttggggagccacgcttttgatgtgacagtaccgcagagtgattcccccactgaggatgtcatcatcaaactcttctttggtgtgtgaattattagtggaaaagacccagctgtaattagacctccactgtgtacttagctggaagaacatgttaattctgcaatatgtttcttggttaaacattgcacagttcttacctcatttctgtaaataaagttttgtgaatctgttttgtattgtgacaaattcataagataacattgatattttgatttgtaatatttctaattggtagatttaattgaaaagtaaaattaatttatttttatatgttcaggggaattttaaagtcaaatcttttgtagataatttaaaaaatcagtgtggtttattttacttatttaacccactggttgttattctgtaacagtttgtataaatggtaaattttgaatgtgttgttattttacctagatgtaaaattccacatgtattaaaatgtacaaaatgttttgttaataaaatttaataatgtttataaaaaaaaaaaa

SEQ ID NO: 419 - DNA, 6472 bp, Homo sapiens
gagagcccccggtggggccggcggaggagcgcccttccccccgcgcgctgattgctgtggcgtcctgcccgtccccgcccgcgtgtgtgcgagggagggcgagtgcgccgggtcggcctgatgggggtaatcgagggtttcggggacgccgagcggcactttcctcttcccagcgagtgaaggagggcagtcggcggctctcgcgccccggccactttccctgcgcgattcccggagctccctgcaggaggtgagagtccccagcgggtccggatggcgtagttttgccgcggcgcagcagctgccggagctcgccgccgccgagcgctgggcggggaaacttgccgccgctttcctccaacttgctgcgggtggatctccgctggacacaccgcctccgaggcagtttgaaaattgcaaggagggactttaagactacttctgatttgcaaagattgtctgtgctctgagcaggctgaagtgactggacgagacgcactgttggagaaataaaaatgacttcccattatgtgattgccatctttgccctgatgagctcctgtttagccactgcaggtccagagcctggtgcactgtgtgaactgtcacctgtcagtgcctcccatcctgtccaggccttgatggagagcttcactgttttgtcaggctgtgccagcagaggcacaactgggctgccacaggaggtgcatgtcctgaatctccgcactgcaggccaggggcctggccagctacagagagaggtcacacttcacctgaatcccatctcctcagtccacatccaccacaagtctgttgtgttcctgctcaactccccacaccccctggtgtggcatctgaagacagagagacttgccactggggtctccagactgtttttggtgtctgagggttctgtggtccagttttcatcagcaaacttctccttgacagcagaaacagaagaaaggaacttcccccatggaaatgaacatctgttaaattgggcccgaaaagagtatggagcagttacttcattcaccgaactcaagatagcaagaaacatttatattaaagtgggggaagatcaagtgttccctccaaagtgcaacatagggaagaattttctctcactcaattaccttgctgagtaccttcaacccaaagcagcagaagggtgtgtgatgtccagccagccccagaatgaggaagtacacatcatcgagctaatcacccccaactctaacccctacagtgctttccaggtggatataacaattgatataagaccttctcaagaggatcttgaagtggtcaaaaatctcatcctgatcttgaagtgcaaaaagtctgtcaactgggtgatcaaatcttttgatgttaagggaagcctgaaaattattgctcctaacagtattggctttggaaaagagagtgaaagatctatgacaatgaccaaatcaataagagatgacattccttcaacccaagggaatctggtgaagtgggctttggacaatggctatagtccaataacttcatacacaatggctcctgtggctaatagatttcatcttcggcttgaaaataatgaggagatgggagatgaggaagtccacactattcctcctgagctacggatcctgctggaccctggtgccctgcctgccctgcagaacccgcccatccggggaggggaaggccaaaatggaggccttccgtttcctttcccagatatttccaggagagtctggaatgaagagggagaagatgggctccctcggccaaaggaccctgtcattcccagcatacaactgtttcctggtctcagagagccagaagaggtgcaagggagcgtggatattgccctgtctgtcaaatgtgacaatgagaagatgatcgtggctgtagaaaaagattcttttcaggccagtggctactcggggatggacgtcaccctgttggatcctacctgcaaggccaagatgaatggcacacactttgttttggagtctcctctgaatggctgcggtactcggccccggtggtcagcccttgatggtgtggtctactataactccattgtgatacaggttccagcccttggggacagtagtggttggccagatggttatgaagatctggagtcaggtgataatggatttccgggagatatggatgaaggagatgcttccctgttcacccgacctgaaatcgtggtgtttaattgcagccttcagcaggtgaggaaccccagcagcttccaggaacagccccacggaaacatcaccttcaacatggagctatacaacactgacctctttttggtgccctcccagggcgtcttctctgtgccagagaatggacacgtttatgttgaggtatctgttactaaggctgaacaagaactgggatttgccatccaaacgtgctttatctctccatattcgaaccctgataggatgtctcattacaccattattgagaatatttgtcctaaagatgaatctgtgaaattctacagtcccaagagagtgcactttcctatcccgcaagctgacatggataagaagcgattcagctttgtcttcaagcctgtcttcaacacctcactgctctttctacagtgtgagctgacgctgtgtacgaagatggagaagcacccccagaagttgcctaagtgtgtgcctcctgacgaagcctgcacctcgctggacgcctcgataatctgggccatgatgcagaataagaagacgttcactaagccccttgctgtgatccaccatgaagcagaatctaaagaaaaaggtccaagcatgaaggaaccaaatccaatttctccaccaattttccatggtctggacaccctaaccgtgatgggcattgcgtttgcagcctttgtgatcggagcactcctgacgggggccttgtggtacatctattctcacacaggggagacagcaggaaggcagcaagtccccacctccccgccagcctcggaaaacagcagtgctgcccacagcatcggcagcacgcagagcacgccttgctccagcagcagcacggcctagcccaacccagcccaacccggcccaacccagcccagcccagctcagctcagctactgccaagggcaggaccaatggctgagcctcgtgtccagactcagagggctggattttggttcccttgtaaagacagagtgaatttcagtataaagatcacccgttgtattcaccccacacccagggctagtataaacatgaccctgggcttctgtaccacactagaattcatgtgagaaagctaaaatggtggtcttctccaccagcccctcacaggcttgggggttttcaatgtgaaacacatgccagtttttaaaatgctgctttgtccaggtgagaacatccataatttggggccctgagttttacccagactcaaggagttggtaaagggttaatagccagatagtagaaccagtgaggagatgcggccaaagattctttatatctgaaccaagatgtaaaacaagaaatgctttgaggctttctaagcgatcctcctgtctaatttgcacctttgtctggatgcacacttctgaccttgctgccacaacctgtggggtctgatgtgtcccttgatgggtgctgccctcagggactgcaccctgacaagtgttaaggcaacattcctttcttgtgccctgggccaaaaccaatgctgatgaccttatcagcttcctgtttcttcccatacttgcatacaccactgcaaaatgtcttaatgcaaattttgtatttcttacaggcctacagaaattgaaaatgaccaaaatcaggaaccacagatttgtgcccattcctaatattttgttctgcaaattaatgtataatttgaggtgaaattcagttataaagtcaaggacgaatttgcacagtgatatatttctatgtgtatgcaagtacaagtatataatatgtcacctggcacattcattttctcagttgaagaagagaaaatttgaaaatgtccttatgcttttagagttgcaacttaagtatatttggtagggtgagtgtttccactcaaaatatgtcaacttaaaaaaaaataggccctttcataaaaaccaaactgtagcaagatgcaaatgcatggcaaatcctgtcggtctccagttggttatctgaatagtgtcaccaattccaccaagacagtgctgagattggaaaagggcactcatttggattgccttacttctcttgccttaaatatatcccatatatttaatatgtcaaaaagggcttgaggtgaatttcattaaatggaataatatgatgccactttgcagctaaaataagctcagtgatacctccttgttaaaaaaaaaaaaaaaaaaaaagaatgccaggggggaattatcatgctaaattattttactgctgaagatagcttcattgcaaattattctttttccagaatttcccccaaacaacttagaattccataagtagaacaagatagattctacccccaaaatattcataagcaaatcccactgcccttaaaataaggaagttatgcctggttgtctgtgaatggaacctcagtaggtaatcctgatgaagcttaaaaccttagggcagtgtctacatgggaaacaagtatgtggaaattgacaatcatttttaccaaatcgttgagtaataatatgacttacctgatagatatacacattcaataaggaacatttttttttttcaataaggaacattttaactaaaacattactttagggctgagatttccaggctatctacattgatctactgaaaaatttctagatttccatatacaaacgaagaagacatgagtttagagaatttttttcctttaatttttttttaacagaagggtatcagagtggaggacctagattacgctacctgtgtttgaaaatattgcgctttgcctaaccttcggtggaatgtattgtttcagcatattctatgtataaaaaagtttaaagatgtcttcaaagaagactagagtctttaagtcacttatagctatattttactacaaaatttgtgtataaagatatatttaagtgttttagataaatttaagttactccatatgaaatgtttaatttcagctactgtgaattctttcgatcagtcctttgcttttttaaaaaatcttttccatcgtgttaaaaagaaaattagctattaggagatattaaaagattgatgtcttagaaggacagggttaaaaccttctgtaatatatttaaatatatatttttaagagagatgctacattgccaatgattttataaataatttaaaattaatttacaaatttatagatgcaaaccaaaagatctttttaaaagagagagagaggaaaaaaatcaccttttatttgtttgggtctcattgtcagaattattattcagatcaagaaatctgtgtcgataaaacctaatctcatattggagagtgaatgtcgttaagtatttctgaaatgtttctaaaaaatgaacatgaaaaaaataaggtattttctccctagcttctcattacagtatttctaattgcttcacactttacagttttaatacaaagtacaagctctacttttataacgtgtactacaagtttctttaaaagtattgttgtatttcagctgaactcttgtatctgcagtcttttgttatttctgcaggctacacccttaatttgcagaggccattttgttgtttgtttgatgctgaagctgttgttaaaatgccccaaactccaaggcagattgtctgtataatacgctatagcttttcaccatgtggtgtttaccagctgttactctgtattttaaaaagccagagatttcttctgtctaaactgtttctatagcattttctaaacaaaaaaaatggtttttttctttgccttgtaataagattgtaaatccatttcctgcttgtgttcttagtgggcatgattgtgagtgtgtgtggggtgctcacacgcgtgccagtctttttgtactgtaactacctcatggtttgaatgatgattgtactgctggttgtgttaacagagcacattttgttgggtgagtcctatgtgatttttttcatgtttgttttatctgggggttgttcatgaaactgacagatgtttttctaaaaaggactattatcagtttccaaatacaatacttctctcttctggtttttcctgaatgagcctgattttgttgctggttttcatcatctatgagggtaaaacgagtacccttaaaatccctgtggccagtttgaacacccctgttgtattcttttctctgttcagtgtgtcagctattttgtgaagatgcttagatgtatagttttgataaccacagttttaaatcttttatctgtgcataataaaaagatatatatcagttattaaaaaaaaaa

SEQ ID NO: 420 - DNA, 3018 bp, Homo sapiens
ggtgatacgtttgtgccacatgaaacattctctgcctctgaaggctccagaggctgtgggaagcagcacatcagcgacagctcctggctgctggactccgcagggagggaaggaagattggtcgcaatgtcccagcagaagtgcatcgtgatctttgccctggtgtgctgctttgccattctggttgcactgatcttttcagccgtggacatcatgggagaggatgaggatggactctcagaaaaaaattgccaaaataaatgtcgaattgccctggtggaaaatattcctgaaggccttaactattcagaaaatgcaccatttcacttatcacttttccaaggctggatgaatttactcaacatggccaaaaagtctgttgacatagtgtcttcccattgggatctcaaccacactcatccatcagcatgtcagggtcaacgtctttttgaaaagttgctccagctgacttcgcaaaatattgaaatcaagctagtgagtgatgtaacagctgattcaaaggtattagaagccttgaaattaaagggagccgaggtgacgtacatgaacatgaccgcttacaacaagggccggctgcagtcctccttctggatcgtggacaaacagcacgtgtatatcggcagtgccggtttggactggcaatccctgggacagatgaaagaactcggtgtcatcttctacaactgcagctgcctggtcctagatttacaaaggatatttgctctatatagttcattaaaattcaaaagcagagtgcctcaaacctggtccaaaagactctatggagtctatgacaatgaaaagaaattgcaacttcagttgaatgaaaccaaatctcaagcatttgtatcgaattctccaaaactcttttgccctaaaaacagaagttttgacatagatgccatctacagtgtgatagatgatgccaagcagtatgtgtacatcgctgtcatggactacctgcctatctccagcacaagcaccaaaaggacttactggccagacttggatgcaaaaataagagaagcattagttttacgaagcgttagagttcgactccttttaagcttctggaaggaaactgatccccttacgtttaactttatttcatctcttaaagcgatttgcactgaaatagccaactgcagtttgaaagttaaattttttgatctggaaagagagaatgcttgtgctacaaaagaacaaaagaatcacacctttcctaggttaaatcgcaacaagtacatggtgacagatggagcagcttatattggaaattttgattgggtagggaatgatttcactcagaatgctggcacgggccttgttatcaaccaggcagatgtgaggaacaacagaagcatcattaagcaacttaaagatgtgtttgaaagggactggtattcaccgtatgccaaaaccttacagccaaccaaacagccgaactgctcaagcctgttcaaactcaaacccctctccaacaaaactgccacagacgacacaggcggaaaggatccccggaacgtataacatgatgaagaaactgacaggacagctctgtatttcatatttatacataaaggacttgaggagagaaaaaacactttaatatgtctctttttttagggaaaaagcacacttataaaaaatattctctgaacaacacataatacctatctaacaatatcttagcgtcgtgtacactaaaattaagacttttgtatttgttacctctgacagagaatgtcattctggcgtagaagttagtttttacgtttgcatacaaattttaagactttcattcctgctcctttctagttttagaactttttctgctgacctacccggtcagttgttaggaagcttagcatgaggtgggctctttaacaccattctgagaactgttgatttagagaggaaggtgaggattttgccttggagaagagactgataaaaccaagtgtttattcttgtaaatcgtctccaagacctacacagtcagctaagcatgaatagcttacatctcatgccagccttcaacacccttgaaaaatatccttttctgtcttgctcattttcttcttataccataagttttatttggtatcattttctcttctcacaaaatgttcctattatatagcattttctgtattcacctcaacattacttctaactatgataacatcttttgaaaacatacaaatttttcagaatggatactaagtggaaatagcagtctttcattttcacctttcaactgaatccttttttcccctaccgaattggtatttaaaaaaaatcacagtcagcaatatgtatcctttctctcaagctcagaaaaattatgtagccacctgctaatatccagcaagctatcaagtctgcattttgggaataaagtagtttttcacatttttgttcagtttatggtattataaaggaaaaaatctctatgcgtcagtggattttaatttctttagaatcattatgctgttaagagtatgccagcaaacgtttctagagctatttaatataccttctgctatttaatataccaaatgcttttcagagaaatgcaatttaaatactgtgcttaacatattttactaagaagcagaaatattgaattattgttctataacgtaattgtgtgttgttgttttatatctatacaatatatacccctgtattaatggagaccattgctacactagggagaggcatggcctcttcagagcccacagcaggtggccgggatgtccagttccaatgttgttcccgactctgtgactcaaagcggagcccctcactgcttggcctcgggcttctcttggtaatgtagacggtaataactcacctacctcgcaaggatgttgtcacggtaggaaatatttataacttgttttgaaatcaaaagaacctatataaatgctaagcattataatatataatctttttcttgaaataaactttgtcatatcttgatggaatcaa

SEQ ID NO: 421 - DNA, 7851 bp, Homo sapiens
ccctgggcatgcgcgagcgcgtcccgggcccggcgagtcgagggttcaggtggtgcgccgtggcgccgcctgcgaccggcagctcgttcgccgcactttggaggcttcggctgcccctccgacccacgtagggcccggacccgggcctccttgtgaacagcgtgccggcttcgccccacgggttcaccggctggctgggcttcaagcgccgaggccgccgcagtgaccccgcccccgggccgaggatgtgaggcgggccgggcgtccccacaccgggcccgggcgccgggagtgggcgtctgggcagcgccaggcgatggccctgctgctggtgctcctcgcctcttggggcctggggcagtgagggggccggcgggcgtgggccgagtggccgcgggcgccatggagggggtgctgtacaagtggaccaactatctgagcggttggcagcctcgatggttccttctctgtgggggaatattgtcctattatgattctcctgaagatgcctggaaaggttgcaaagggagcatacaaatggcagtctgtgaaattcaagttcattctgtagataatacacgcatggacctgataatccctggggaacagtatttctacctgaaggccagaagtgtggctgaaagacagcggtggctggtggccctgggatcagccaaggcttgcctgactgacagtaggacccagaaggagaaagagtttgctgaaaacactgaaaacttgaaaaccaaaatgtcagaactaagactctactgtgacctccttgttcagcaagtagataaaacaaaagaagtgaccacaactggtgtgtccaattctgaggagggaattgatgtgggaactttgctgaaatcaacctgtaatacttttctgaagaccttggaagaatgcatgcagatcgcaaatgcagccttcacctctgagctgctctaccgcactccaccaggatcacctcagctggccatgctcaagtccagcaagatgaaacatcctattataccaattcataattcattggaaaggcaaatggagttgagcacttgtgaaaatggatctttaaatatggaaataaatggtgaggaagaaatcctaatgaaaaataagaattccttatatttgaaatctgcagagatagactgcagcatatcaagtgaggaaaatacagatgataatataacagtccaaggtgaaataaggaaggaagatggaatggaaaacctgaaaaatcatgacaataacttgactcagtctggatcagactcaagttgctctccggaatgcctctgggaggaaggcaaagaagttatcccaactttctttagtaccatgaacacaagctttagtgacattgaacttctggaagacagtggcattcccacagaagcattcttggcatcatgttatgctgtggttccagtattagacaaacttggccctacagtgtttgctcctgttaagatggatcttgttggaaatattaagaaagtaaatcagaagtatataaccaacaaagaagagtttaccactctccagaagatagtgctgcacgaagtggaggcggatgtagcccaggttaggaactcagcgactgaagccctcttgtggctgaagagaggtctcaaatttttgaagggatttttgacagaagtgaaaaatggggagaaggatatccagacagccctaaataatgcatatggtaaaacattgcggcaacaccatggctgggtagttcgaggggtttttgcgttagctttaagggcagctccatcctatgaagattttgtggccgcgttaaccgtaaaggaaggtgaccaccagaaagaagctttcagtattgggatgcagagggacctcagcctttacctccctgccatggagaagcagctggccatactggacactttatatgaggtccacgggctggaatctgatgaggtggtatgatggctgctgggcagcacctcctaacttcagggaataagtgctaaagtgttttgttgccctacttaatttccagcaacagcctcaaccctctccaaccccttcacctggggggatggacaggaggtggcaaaacccagtgcttttataatttttaaaatgcatatgtgttttgtttaaagatcaaggtgctatatatttcagttcagcaggcctactggaaaccaaatgataagctgctgtagacttgaacagcaagttataagagcagatttaacaaacaaatttgctgttattgtgtattgtattgtttttatattttagtctaatgggccacccaaacccaagctgaaaatcagcaaattccatattaagtaccataattcatagccagtgtttcagccaacttagactagacatttggaggtagtataagctgctttgttgaagctgtgtagagtttgctgttcctagatgttcttcagtggaccctcttcactgcaactctgtcagtgataagggcctgtgtagtaaagatgttcagggcattcacatgaccatgcaattgtgggaggcgaagaagacgtggacaggagtcccatccttgctgacaggcatgaaaccgttgctctgagaagattaatggtgtgccctagccccaagttggaggggagaatatgagagaggtgggacaggtcatttgagatgacacctcccaactgcctaccatttaccagcatgttccccatgcattatctcaattggacatcacaagtaatgatacccagagggattattactccacttcaaaagcaaggtttagaagttgagggatctgttcacagtcacatagtttttaagcagaggagccagataatttccaagtgtgacctggactgcctctgcatcaaagtcatatggagtgcttgttcaaacagcagattcccaggccttattttggcctaaagaaccagagtctaggtggtgggacataggaatctgcatttcagtaaactttacacgtgattcttctgcacacagtattgaagagcaactagattaaattctagtttacaaaattaccagttttcttcaagaactaaatgatatgtcctttttttttttttcaaagaggataaggctgctatttaaataaaatagctaaatggagagtgagaagtggagcaggttcattcagcagcattcttaattgagccagcattgacacccagccagcaggcctttgcattgcattcggggaccatgactctgaatctgcttaccaatcaatctcggtttaatcaccaaaagtgcagagcaggcaaaatgcagctgtttatcaatctcaaaagctttgggacagtgtcatagttgaaagatgagacttaagaaaacagtttcttaaacttcttaaaacttaagaaacattgtttcataaaacaatattgagtgggcattcttctgcacagtgtgatgctccaaccctggccctagtctcagtagaccatgctgcctcgagtgtgcatcggagagaagccatgggtaccttccccattagaggctacttccttctagtaacaggaagggaagttccagcatgaggtagttatccagggtagaaggtcctttgaggggcttggttgaattgagagcatcatctctagatgatgctgttcctgctgcagatctctaggatggagagaattctctctttagtcagagaagtttatgtagggaggggtattggttttgcctttgtgtgtctttaaacaaatgaacatttatttagctcagattaattaggtattttgcccacataaagacttctggaaaatacttaaacttgaaaaatcaacatcacatgttttaaagctagggagaaagaaggggggtattaaaatgatgttgattattttgtattttgccaaggtgtgtgtgtgttatttccctcccactctcatgagcagtgagtatagatctccttctctgattagtatgaatatgatggcaggactcggggatagtccctgcccttgacatagccccctaaaacggaaaaagaaaaagccagtttttgcttgtactttgaatgaagatgttttaggcattgtaccatttagcggggatgataccaggtggttgttagaattgtgcagtgtgatcattctaaacagctgctggtgctccctgtcacctcaggtgaactctgtggtctcttggagaggtagcactctgaaaatacctcaggtttgccaccgcaactctgaatacacacaaaaggaaagctgctcagcatggccattttgcatttgtataggtagtgactagatgtacacaacttaatttgctgggaatgaggggcttaatattatctgagatcattgagaacccagatcagacagaatagcttgaataagttacattttccaattaccctttttccacatctgtagaaagagggtaatattttttaataggtattttccccactggagcatattacgtttgcctaagatgtataaaagtttgtttaagatgtgtaaaagtttgcttaaggaactgaggatccttaaataaaaatattagaaattagaaattgaacctaatactaaacagtaaattcagcttaacctgaaccttggcatagtcagagcttcctcctacatctaaagtatttgctctctgttttagttaaagtcataatttgcgctgatgtgtaatcactttccaagaagagggcaatgagaaaagatatttaaagctttctctccatagccctccaagacttctgggacaactaaatttactttcaccattactgtgagaggaggtgagaaaactctagtattttgttggcagagtaatcactttgttctcatcgctcaaagcatttttaggattatttttctagcgtaacctttagagagaactggaagaaaaaggaaattggtctactaggtattgtagacacaaataagtaacattaggctaaccccttatgagacatttccacacaatttcatcgtgcctgtacttttctctatggtaaaagccagtgtttacactttgtagggatcagggtgtatttgttgaattaaacaaaatattttcaatgatggcaagtctcttgacttttgaaagcaagtcagattccttatagctaatgctggtgaaaaatgttaaattggagagatcccttttgggagtgaaaccaaattgtaactatgaggagaagatggtcttctcattggctcttgatgtagctctgaagggagttccagaagaggagctctcacagaatgttgagcctgtgggcccaagacattgacttcgaagggtagttctcattaggatgtataagtagtggcttgaggcaccttcttatcattttttgcatgttattctgattattaaacttcccccaatgtcatattccatgatgagggatttctgaactccatagtccagcgttgttgcttttctctcttctttgctactgaaaattgccagcagtaccgccatcagcacaccaaatctacccccacttatgtttgttctgccccatttcccaggagcagcttctagcacatatgtagagtatctggcaccaccttagcccagggctgcgtgcctgatcagtggggattctgttcccccaccccccagactgcaagagcttcttaagaaggagcccatattcccatttgtagctggaaagcgggtgaatgacatgacatggggcacctaggaaagatgattattagaggagtgcagcggaaaaaaatttgcactcttctccttttggttattactttccaaatatattaacaaaaagttgatgcttttaactttatattttcagaaaagtgtttttaattaaaaatatgtgatagggaccaaataagtaaagtacatttttctccactaaatttgaagtgagggaaagaggagccaaagtaagagatttttttttaaggaaacttaatctgattgtgaaaatcatacatatggagaaacatcagatcaggcaatagagtcagagggtcatgagcaatagacgatgatgcgaggcatttggggagcttcctggaggaaaattaagtttttttcctagcaaactaccatgtcctacaagaacttggttatataatggtgcgtctctgaatcactgattaaaaccagttgcttctgattttagtcacaggttttacaagtattcagctctccctcatgtttcatttctttttttaagataatctatcaaccttttttaaattttaaaatttttagatgtagagtttataagtaaaatatatttttagccattgttctgttagctgagctgatgtgtttggtcttagagggcctgacttcagatactctttgtgatcttgtaagggctctacacaaacttcattatgtatggtaaatttgtattcttatggattgtatatagaatgctttcgttagaagtacattctacttctgtatgtccctttgtaatccgcagttgcttactcaggggtttcatagtcatttcataaaaaataattcactagctgtctaatggtattttaagactgtttatctgtatcacaacgtcattaggagttctttcaacaattccataaatatactgtttactagaccttccctgtaaatgttcccaattcccatcctgtctcagacagtcaatagtcctgtgtacagtgactatttgcatgatttctcattgcactgctgcattcaggcactccagggcatgattaaacagtcattaacagtgcctctctggtacagttgatgcatgcattgatctttcttctctgctgtttttatatagcctttaattaaaaggaaaaaaataccactactctgcaatgcaaaagtcttcaaaattctttgtttcctgtattaatcacttctgttccagagtgaacaaatgttttcagctaagctatgtgagaatgtaagaataatatcctgcttgttctaaatagttcatatatttaaagtgtggtcagtatttcctccctgtaccttacaaacagaaaccaccctgggatggttgataccccttacaaagtcgatcttacccacacagactcctgtgtatgcgtgtctgtttataggtgtatatggagtcagtgttgataggaaggatgctctagaagtacttctgttgtttcctagaaggctatgagccagttccatggcatgtttaatgtataattcccatgtatcatgagaatttcactagaatgtcattaaacagcccaactacctcatgtgaaattggctgtggacaatctgtgtcagatgagaaatgtgttcagataaatttaatctggttaatagacttaacaaattaatgtctacataaagaagaaacatgatagaccagatgccaaaggctaaaatgtacatagatttccttggattaatttttaagtcactgtttaattccatgcctagtattcttatgaatgtttgtggtttcatagatttatgcactttgaatatctgtcacgtgcagtgttaatgttacctgttcttgtctctcagcattttgaatgagcatcataatcagagtagaaggcaagttaaactataaaagtgtcaagtggcttgttaacttcttaatttaatggacctttacttagaatataatatgttggagcctcttgggaccaaccgatgagcgacagtttcatgtttagatttgtattgtttctctgtccaagtccttattctctatcttgtggggaggggtgacaggggagggttttactttttttgcaaaaatgtttgaaaatatctgtcagattttatattcgttagttataataaacttatttttaaagtattaagttcttaaaaaaaaaaaaaaaa

SEQ ID NO: 422 - DNA, 5496 bp, Homo sapiens
tgctccgcgcgctagctggctgtgtggctcgctggctcgctagggacaagcaggaatcggagcagcactgccgcctctggcgcgaaggctcaggcgcctcctcccgccacagtcactgtggctcggcgcacgctgccggcggctgccctttccgcctctggggaagaaaaacccgcgggccgctttcgtgcttgaaccatggcctcgggccggaggggctgggacagctcccacgaagacgatctgcccgtgtacctggccaggccgggcaccacggaccaggtcccgcggcagaaatacggcggcatgttctgcaacgtggagggcgccttcgagagcaagacgctggatttcgatgccctcagcgtggggcagcggggcgcgaagactcctcggagcggccagggcagcgaccgaggatcggggagtcggcccgggatcgagggggacaccccgcgcaggggccaaggccgggaagagagcagggagcccgcgcccgcctcccccgcccccgccggggtagagatccggagcgccaccggcaaagaggtgttgcagaacctcggccccaaggacaagagtgaccgtctccttatcaagggaggcagaatcgtcaatgatgatcagtccttttatgctgatatttacatggaagatggcttaataaaacaaattggagacaatctgattgttcctggaggagtgaagaccattgaagccaatgggaagatggtgatccctggaggcatcgatgtccatactcacttccagatgccatataagggaatgaccacagtagatgacttcttccaagggacaaaggcggccttagcaggtggcaccaccatgatcattgaccatgtggtgcctgagcctgagtccagcctgactgaggcctatgagaaatggagagagtgggctgatgggaagagttgctgtgactatgccctgcatgtggacatcacccactggaatgacagcgtcaagcaggaagtgcagaacctcatcaaggacaaaggggttaactccttcatggtttatatggcttataaggatttgtatcaagtatctaacacagagctctatgagatcttcacctgcctgggagagctgggggccattgctcaagttcatgctgagaatggggatatcattgcccaggagcaaacccgcatgttggaaatggggataactggcccagaaggccatgtactgagcaggccagaagagctggaagctgaggctgtgttccgtgccatcaccattgccagccaaaccaattgccctctctacgtcacaaaggtcatgagcaagagtgcagctgacctcatctcacaagccaggaaaaaaggaaatgtagtctttggtgagcccatcactgccagcctcggcatagatggaacccattattggagcaagaactgggccaaggcggctgcatttgtgacatccccacccctgagccctgacccaactactccggactacatcaactccttgctggccagcggggatctgcagctatctgggagtgcccactgcaccttcagcactgcccagaaagcaattgggaaggacaacttcacagccattcctgagggcaccaatggtgtggaggagcggatgtctgtcatctgggacaaggctgtggccacagggaaaatggacgaaaaccagttcgtggctgtgacaagcacaaacgctgccaagatcttcaacctgtatccccgcaagggaagaatatctgtgggttctgacagcgacctcgtcatctgggatccagatgctgtgaagatcgtctctgccaagaaccaccagtctgcggcagagtacaacatctttgaagggatggagctgcgcggggctcctctggttgtcatctgccagggcaagatcatgctggaagatggcaacctgcacgtgacccagggggctggccgcttcataccctgcagcccgttctccgactatgtctacaagcgcattaaagcacggaggaagatggcagacctgcatgccgtcccaaggggcatgtacgatgggcctgtgtttgacctgaccaccacccccaaaggtggcacccccgcaggctctgctcggggctctcctactcggccgaacccacctgtgaggaatcttcatcagtcgggatttagcctgtcaggcacccaagtggatgagggggttcgctcagccagcaagcgcatcgtggcgcccccaggcggccgttctaatatcacatctctgagttaagcaagccttcctcaaagagaggggcagaagcaagaagagattgttttgaagccaaaatggtacaccgatatttaagaaggaaagcgaatccaaacggttgtgatctaaagaatcaataagcctcaagccttatgtttctccaatgttacgctcgcttgcctagctttacgaatattgctttgttttctgtttatgcatagccttgatttgtttgactcccctccccccatttacatgcatgcaatcagacaggccactaaggtaaaagagtctgctctatcatagtgttgagagcgtgtgtagtgctgcatcttatgacaaggggacagacaagctgggacgtcagggaaatgaacaaaagggacgcaggttatttggggtgagtgggtggtgggagcctggagcaaggtggagggtgcagaggggctggggtagggcatgtaggagggaggtgggtgggtcaggtgagtggaaggggtgttgtatattgtgttgatgacgtacgttatttccatggaagatagccgctgtggcagctgtcacatcaccacagctccctagggtctgccgagaaggcaggcagtctttgggttctgttctttgtcacgtcccctacaagtaaattttgtttctttgaacgtttattaaaatgccaagacccaaccatttcttccacctgcttgattgtgccagtgtttgctcaggcctctttcttagtgttgctttcaaatccttctctttcctgggttgggaaggccaggcagggacagagcaaatgacacttctcttcctcttgccctccctgcctctttggtgctcttaaaagccagcagctgagaacatagcacaggcccacgtggtgagggcacccacagcttaaagacgcttccttctaaacacggcgaggtcacctctcactcttctgtctttgcaaaccgagaagagtggcatgcttctggcatcccaagtcaggattttagctcagatgaggcagaatgaagggcctctcttacaggcagtttgtgtttgattctctcgatcctggcacatccatgataaataggagtttttgaaagttggttttattaggtgttccctaatttttaccgtaataggtcatctcagcttatatgaaagtcaagtggggaactgggaaagccaaagtcagtcttgagcagagggagcacattttgtggacctggttccacctttccattccaaaccacctgtttccccttccattagcagaaactctgggggaactttgtgtctcagtcctagaatctccccaagtgagtggaagtgacatgatgcagtcttcctcatggggcacctgaaagaaattagtgtgggtgcttcgatctaccttgtctgtcagagttgaatatctctttccctatcatgctgcttctgaaaattcagttttggagcaagtcctgtgagcaagataagaatctatagaaccaagatgctcattttcagaagaaatatgttcaacctgggatcagacttccatgctctggggaatccaagtggtagcacctgtaaccctgtgtactaagtgctttgaagagaagagcaggcctcagacaccttttaattgcttaggagaaaccattgtctctgactgcaggtttgaataagttgaagaccagagaaaagtacacactgggctacaaaggaatttggagatagccaaggaacaggatttcccctagcaagctaccttctgttcaaatcatgaaaaaagactatttccccttagaatagggaagcttgctattttaaagctcttgtagtgcttttcttttaagggagatgtagtaaaagggaaaatgtagctcttagtttacacttcaaagatgtgggggtctttcagagaactaagaataacagttttatgtgcagagagagtttgccagatctgaagcatatacctcattgactaggctgttactttgggataggttgcagtaccagccacagccagcagatagaggaaaagacacacataaactcgcttctgagcgtccacttctgcactctctgctctgctgttactcagcccctgagtctgactcatctctgcacaacctctctgtgccatgaagataagtcttccatggccaaatcggtcatccgcactgcccttgggacttccgaagtgaaccattccaccagaacctttgattctgcacaagatttccttgctctgggaacaacccccaaatgcccttgggaggaacaacatgagctcaggaagcctctctttcttcacttaccattactaactctccaagcatagaaatccctgggaattgcgagaataactcccactattttaaaatttatattcagatttgtttcgtttcataagacacatcaaacaggcctatacaaaaggtttaggaaaagaaaacaatggtgagtcccggccctcttcgaattcactggcacctcatgcaagtgtaggaaggcacgctggatcgtctatctgattccaaagctgtcctttgccatctcatcccttggcctgccccccaaccctgaggatgcccctgccatccccccaacctcctcatattgcctctgaacccagatggcaatccatcccggttctctctgagggccacgggcttgggtagtggaaagggtgtttgggaaattgttaaatcagttacccgtagtagagctatttcttgtacttctaagttttctagaagtggaaggattgtagtcatcctgaaaatgggtttacttcaaaatccctcagccttgttcttcacgactgtctatactgagagtgtcatgtttccacaaagggctgacacctgagcctggattttcactcatccctgagaagccctttccagtagggtgggcaattcccaacttccttgccacaagcttcccaggctttctcccctggaaaactccagcttgagtcccagatacactcatgggctgccctgggcagccagcattcattgtaagttccctctttgaaaactggtgtgtgggtgttcagttctgtgtctggtgggtatggacagacagtaatctcctgtgatctgtgctagctgtgaggcagctctggaacgtgaagagctgtttggtttgaaccgtgaacaaaactgtgttttgagtttagctgacattaaagaaaaaagttcatcacgtgactgttaatgtaaacctggttattaaaataactatgaaattaccaaaaaaaaaaaaaaaaaa

SEQ ID NO: 423 - DNA, 4745 bp, Homo sapiens
gcaatgcattatgggccgccgtttcagtcggtcgacgctcaccggacaggaagcgtctcggagacagtctgcgaccggacgggtctaggtgagacagaagccaaacaggaggaggaagtggagggactgatcctttgaaatactccagccatgactaaaagagaagcagaggagctgatagaaattgagattgatggaacagagaaagcagagtgcacagaagaaagcattgtagaacaaacctacgcgccagctgaatgtgtaagccaggccatagacatcaatgaaccaataggcaatttaaagaaactgctagaaccaagactacagtgttctttggatgctcatgaaatttgtctgcaagatatccagctggatccagaacgaagtttatttgaccaaggagtaaaaacagatggaactgtacagcttagtgtacaggtaatttcttaccaaggaattgaaccaaagttaaacatccttgaaattgttaaacctgcggacactgttgaggttgttattgatccagatgcccaccatgctgaatcagaagcacatcttgttgaagaagctcaagtgataactcttgatggcacaaaacacatcacaaccatttcagatgaaacttcagaacaagtgacaagatgggctgctgcactggaaggctataggaaagaacaagaacgccttgggataccctatgatcccatacagtggtccacagaccaagtcctgcattgggtggtttgggtaatgaaggaattcagcatgaccgatatagacctcaccacactcaacatttcggggagagaattatgtagtctcaaccaagaagatttttttcagcgggttcctcggggagaaattctctggagtcatctggaacttctccgaaaatatgtattggcaagtcaagaacaacagatgaatgaaatagttacaattgatcaacctgtgcaaattattccagcatcagtgcaatctgctacacctactaccattaaagttataaatagtagtgcgaaagcagccaaagtacaaagagcgccgaggatttcaggagaagatagaagctcacctgggaacagaacaggaaacaatggccaaatccaactatggcagtttttgctagaacttcttactgataaggacgctcgagactgcatttcttgggttggtgatgaaggtgaatttaagctaaatcagcctgaactggttgcacagaaatggggacagcgtaaaaataagcctacgatgaactatgagaaactcagtcgtgcattaagatattattacgatggggacatgatttgtaaagttcaaggcaagagatttgtgtacaagtttgtctgtgacttgaagactcttattggatacagtgcagcggagttgaaccgtttggtcacagaatgtgaacagaagaaacttgcaaagatgcagctccatggaattgcccagccagtcacagcagtagctctggctactgcttctctgcaaacggaaaaggataattgagccccaggacattctgagactccaaagtctttcttaaaatgtttagagcaagtatagctcttacctttattactgaatttgaatcttcttttatttctaggctgtacagtctgatgcatgatttttttataaatatttcatactcttgtgaatttggatctttttactttgagcatatattttagaatatgtgtatgttaaaggatctccacaatgtctgcagtgtgaaggcaggttcattgtggaatagtttaacagtcaggaaggctaaactggtcagtattaatgtgtagccctaccaaaaatagccagtagtatctgaaaatgaaaaataaatgaagtatctctaggaaacagtctggcttaactatttttgaaaatataactgtttcccctctctgctgctttagatgttgctttacatagaaccagaaaatggaatttctcagctaaagcatgtgtgcctgtttcatctaatcaagcagagctaaaatgttcataccgaataaatttatattaataaattactaaactaagagtatcaggttatttatatatttgcaagcaaaggacagtaagaagttgactggcaaaagagcagtgctgaaggaggagatccaggtttaaatctggcttattaactcaagccaattttaaggattttctgtatagattactcatgtcagaccaagaatttaaattattttgagagaggcatttaattctaataaaccagctgttataaaaattataaaatgatctctgtttttcctgtcagagatttaaaaaactgaaaaggtatacctcaacccaaaaataaaggtttgttttggtttgttatggcttccttttttaaaaaattaccctgtagtgccagtttattatgcaaagcagcttatattcctttgtttctgataaaatgaagactttaaatcagtcagtagtactttacctttcaaggcattagtaaattacttgcaaatagttttaaaaggaaaatacgacctttgttataggcagtcttctctttaagacaatacttttccacttgttttccttttccatattatatatgtgtattcatatagctgtatacatattcagttgatcattttataaacatatgaaggcataaagatatacagaagaaaaattattaaacaactcattttaagattcaaattaactaattcctgcatatatgacattccttacataagcgaacactaaacaaaaatggctagaaatgtctttttctttcttttctctctttgttgtttaaggtattaagcacgaattattacatgagactggcagatagctattaatcctcttacagatttgagaaagttgattctcaaatatttatgcaccttctccttcattgttttctttaaatctgtcctcttaaaaagcttcttaagagctcagttaatgcttttgacttaactaggagaaaaaggcatgataatacaggcaagatggcattgttagcaattctggtagtggtttggaatgaatcctaagaggcagggatcttaaggacaaggaagagaagagagagagggagggatctttgatctctttctctggtaatcttaatgcataattttactaaaacatgttctcaattcattcatattattaagctcttcctgcagttgatatctgagcagagtaagatttgtatttccatttttacttttttgaaagagaatatatggacagattattagtacaatttgggcactgtggttttaagaatatctgagtaaaataacaatatgaaataataaacagaagctctaacgtcaggtaacaaatagacagcaagaaaggttttgcaccatcctcttacggcctagagagttgacaagttgcttgtagttttaaaaaaataataaagtatacccttctggtatatcatcaagagcttaagaatcttggctttcatatttaaaatgcttttggggagacatatattaaaattttagccaagatgatagacatgtctcaattatatatgtgtgtgtatgtttttaaagctaaaaacattacttttagatccctagaatgaaaatttttttctcatctatgcaattcccatatggtttttttttaaatcatattttattcattttctccctttagcaattttcattttatttctcataatttgaacagagacagttctcatacatgatcagatgctttttttttcttcttaccatcatttatgcatgacataggtaatgtgactaatttctccagttgattcaagaaactcattactttgcctcaaattatatgtaaaatatttgttttacttaggttacagttatcagaaaggtagtttttttcttctattaaaatataacattgtgaaagaaaataaaatttatgctattctttgctttgtttttataaatgaatttttcatagaatttacagtatattcaaaggaagaaagataaaattattggtcatcatttgtaccttagaagtacaagaatttaagtaaaagaaatgttcatttttgttttaaaatttgttttccatgtgaagtttttattgagccaactttcatacatatcttgctagcctaaagtctaaatatttgtgttggcatcagaaaaacaaatgaggcagaattgctatgtgtggttgatcttcagataaattgactgatcacagttatttttgtatcagtctatgttattaggaaaaattgtttagttgttttctcccctgattaatggtgatattcaagtatgatacaaaaagaattgtaccaccaaatatttttgtgaggtctgctgttttccatattcattttatgctactgcctttaagaaagaactagtgtatccttgaaatagcacaaaaatgttttaaaattcataattgcaaaacaaatctgtgactaacttaatgtcttcagatctaaagggtgtaaaaatattgatacttcaatatttcacttgctgccaggaaaaacaaaattctcaatcttttgtaaatgggaggaggacttttgcatacatttttactctttaaataacgacaacgacacttatactgtcataataacaattatgtatttctttgtggttttaattttttttgtaattttacataaaacagttattttctatttttacgcagataaatatttgtgcataaaatgtaaaaatagtaaaatgagaaaaataaaactattatacagtaaa

SEQ ID NO: 424 - DNA, 5165 bp, Homo sapiens
gggaagccagacggttaacacagacaaagtgctgccgtgacactcggccctccagtgttgcggagaggcaagagcagcgaccgcggcacctgtccgcccggagctgggacgcgggcgcccgggcggccggacgaagcgaggagggaccgccgaggtgcgcgtctgtgcggctcagcctggcgggggacgcggggagaatgtggactgggtagagatgaacgagacttttctcagatgttggatatttgcttggaaaaacgtgtgggtacgaccttggctgcccccaagtgtaactccagcactgtgaggtttcagggattggcagaggggaccaaggggaccatgaaaatggacatggaggatgcggatatgactctgtggacagaggctgagtttgaagagaagtgtacatacattgtgaacgaccacccctgggattctggtgctgatggcggtacttcggttcaggcggaggcatccttaccaaggaatctgcttttcaagtatgccaccaacagtgaagaggttattggagtgatgagtaaagaatacataccaaagggcacacgttttggacccctaataggtgaaatctacaccaatgacacagttcctaagaacgccaacaggaaatatttttggaggatctattccagaggggagcttcaccacttcattgacggctttaatgaagagaaaagcaactggatgcgctatgtgaatccagcacactctccccgggagcaaaacctggctgcgtgtcagaacgggatgaacatctacttctacaccattaagcccatccctgccaaccaggaacttcttgtgtggtattgtcgggactttgcagaaaggcttcactacccttatcccggagagctgacaatgatgaatctcacacaaacacagagcagtctaaagcaaccgagcactgagaaaaatgaactctgcccaaagaatgtcccaaagagagagtacagcgtgaaagaaatcctaaaattggactccaacccctccaaaggaaaggacctctaccgttctaacatttcacccctcacatcagaaaaggacctcgatgactttagaagacgtgggagccccgaaatgcccttctaccctcgggtcgtttaccccatccgggcccctctgccagaagactttttgaaagcttccctggcctacgggatcgagagacccacgtacatcactcgctcccccattccatcctccaccactccaagcccctctgcaagaagcagccccgaccaaagcctcaagagctccagccctcacagcagccctgggaatacggtgtcccctgtgggccccggctctcaagagcaccgggactcctacgcttacttgaacgcgtcctacggcacggaaggtttgggctcctaccctggctacgcacccctgccccacctcccgccagctttcatcccctcgtacaacgctcactaccccaagttcctcttgcccccctacggcatgaattgtaatggcctgagcgctgtgagcagcatgaatggcatcaacaactttggcctcttcccgaggctgtgccctgtctacagcaatctcctcggtgggggcagcctgccccaccccatgctcaaccccacttctctcccgagctcgctgccctcagatggagcccggaggttgctccagccggagcatcccagggaggtgcttgtcccggcgccccacagtgccttctcctttaccggggccgccgccagcatgaaggacaaggcctgtagccccacaagcgggtctcccacggcgggaacagccgccacggcagaacatgtggtgcagcccaaagctacctcagcagcgatggcagcccccagcagcgacgaagccatgaatctcattaaaaacaaaagaaacatgaccggctacaagacccttccctacccgctgaagaagcagaacggcaagatcaagtacgaatgcaacgtttgcgccaagactttcggccagctctccaatctgaaggtccacctgagagtgcacagtggagaacggcctttcaaatgtcagacttgcaacaagggctttactcagctcgcccacctgcagaaacactacctggtacacacgggagaaaagccacatgaatgccaggtctgccacaagagatttagcagcaccagcaatctcaagacccacctgcgactccattctggagagaaaccataccaatgcaaggtgtgccctgccaagttcacccagtttgtgcacctgaaactgcacaagcgtctgcacacccgggagcggccccacaagtgctcccagtgccacaagaactacatccatctctgtagcctcaaggttcacctgaaagggaactgcgctgcggccccggcgcctgggctgcccttggaagatctgacccgaatcaatgaagaaatcgagaagtttgacatcagtgacaatgctgaccggctcgaggacgtggaggatgacatcagtgtgatctctgtagtggagaaggaaattctggccgtggtcagaaaagagaaagaagaaactggcctgaaagtgtctttgcaaagaaacatggggaatggactcctctcctcagggtgcagcctttatgagtcatcagatctacccctcatgaagttgcctcccagcaacccactacctctggtacctgtaaaggtcaaacaagaaacagttgaaccaatggatccttaagattttcagaaaacacttattttgtttcttaagttatgacttggtgagtcagggtgcctgtaggaagtggcttgtacataatcccagctctgcaaagctctctcgacagcaaatggtttcccctcacctctggaattaaagaaggaactccaaagttactgaaatctcagggcatgaacaaggcaaaggccatatatatatatatatatatatctgtatacatattatatatacttatttacacctgtgtctatatatttgcccctgtgtattttgaatatttgtgtggacatgtttgcatagccttcccattactaagactattacctagtcataattattttttcaatgataatccttcataatttattatacaatttatcattcagaaagcaataattaaaaaagtttacaatgactggaaagattccttgtaatttgagtataaatgtatttttgtcttgtggccattctttgtagataatttctgcacatctgtataagtacctaagatttagttaaacaaatatatgacttcagtcaacctctctctctaataatggtttgaaaatgaggtttgggtaattgccaatgttggacagttgatgtgttcattcctgggatcctatcatttgaacagcattgtacataacttgggggtatgtgtgcaggattacccaagaataacttaagtagaagaaacaagaaagggaatcttgtatatttttgttgatagttcatgtttttcccccagccacaattttaccggaagggtgacaggaaggctttaccaacctgtctctccctccaaaagagcagaatcctcccaccgccctgccctccccaccgagtcctgtggccattcagagcggccacatgacttttgcatccattgtattatcagaaaatgtgaagaagaaaaaaatgccatgttttaaaaccactgcgaaaatttccccaaagcataggtggctttgtgtgtgtgcgatttgggggcttgagtctgggtggtgttttgttgttggtttttgttgctttttttttttttttttttttaatgtcaaaattgcacaaacatggtgctctaccaggaaggattcgaggtagataggctcaggccacactttaaaaacaaacacacaaacaacaaaaaacgggtattctagtcatcttggggtaaaagcgggtaatgaacattcctatccccaacacatcaattgtattttttctgtaaaactcagattttcctcagtatttgtgtttttacattttatggttaatttaatggaagatgaaagggcattgcaaagttgttcaacaacagttacctcattgagtgtgtccagtagtgcaggaaatgatgtcttatctaatgatttgcttctctagaggagaaaccgagtaaatgtgctccagcaagatagactttgtgttattctatcttttattctgctaagcccaaagattacatgttggtgttcaaagtgtagcaaaaaatgatgtatatttataaatctatttataccactatatcatatgtatatatatttataaccacttaaattgtgagccaagccatgtaaaagatctactttttctaagggcaaaaaaaaaaaaaaaaaaaaaagaacactcctttctgagactttgcttaatacttggtgacctcacaatcacgtcggtatgattgggcacccttgcctactgtaagagaccctaaaaccttggtgcagtggtggggaccacaaaacaaccagggaggaagagatacatcattttttagtattaaggaccatctaagacagctctattttttttttgccactttatgattatgtggtcacacccaagtcacagaaataaaaaactgactttaccgctgcaatttttctgttttcctccttactaaatactgatacattactccaatctattttataattatatttgacattttgttcacatcaactaatgttcacctgtagaagagaacaaatttcgaataatccagggaaacccaagagccttactggtcttctgtaacttccaagactgacagctttttatgtatcagtgtttgataaacacagtccttaactgaaggtaaaccaaagcatcacgttgacattagaccaaatacttttgattcccaactactcgtttgttctttttctccttttgtgctttcccatagtgagaatttttataaagacttcttgcttctctcaccatccatccttctcttttctgcctcttacatgtgaatgttgagcccacaatcaacagtggttttattttttcctctactcaaagttaaaactgaccaaagttactggctttttactttgctagaacaacaaactatcttatgtttacatactggtttacaatgttatttatgtgcaaattgtcaaaatgtaaattaaatataaatgttcatgctttaccaaaat

SEQ ID NO: 425 - DNA, 7769 bp, Homo sapiens
ccctcctgcctgtccctttctgtcttctctctctctctcccacttttcctccctctcccgctccgtctcacacgcaccctctgtttattttcctgcctccatctgggccctgctgatattgtaatcaccctgatgcacgttggcttctctcctctccctcctgcgctcacacactcactcacacacaatgtgccatcctgacaaggcttttacttctgataagctccaatgtgtgtttaatgaatacaaagccgcggtctgggtgccgcctcggccgcggccgctctcccgcgctcctttgccagaagctggcggagagaatttacatttaaagattagcagagtgagaaagagaaatctgccttttgttgtgtggggtgaggaggaggcatctacccctggccttgacgctatctcccatcacctctgctatccagacaggactcaccgagtatcaaatgataagaactgagcacactggatgaaataatacttgcactgggagcactaagaaaagattgatctctgggctggtgaacataatctctgtcccagtcagaaaaggagagaggaaattagcagagcgattggtggagaatgatatctgtcaaaagaaacacttggagagcactgagtttagtaataggtgactgccggaaaaaagggaactttgaatattgtcaagaacaggaggcatgagcccggaacgcgcttgcttttaggagacagccactttctgtgtggtacgctggattcaaggatgcctgatcgtactgagaagcactccacaatgccagactcacctgtggatgtgaagacgcaatctaggctgactcctccaacaatgccacctcccccaactactcaaggagctccaagaaccagttcatttacaccgacaacgttaactaatggcacgagccattctcctacagccttgaatggcgccccctcaccacccaatggcttcagcaatgggccttcctcttcttcctcctcctctctggctaatcaacagctgcccccagcctgtggtgccaggcaactcagcaagctgaaaaggttccttactaccctgcagcagtttggcaatgacatttcacccgagataggagaaagagttcgcaccctcgttctgggactagtgaactccactttgacaattgaagaatttcattccaaactgcaagaagctactaacttcccactgagaccttttgtcatcccatttttgaaggccaacttgcccctgctgcagcgtgagctcctccactgcgcaagactggccaaacagaaccctgcccagtacctcgcccagcatgaacagctgcttctggatgccagcaccacctcacctgttgactcctcagagctgcttctcgatgtgaacgaaaacgggaagaggcgaactccagacagaaccaaagaaaatggctttgacagagagcctttgcactcagaacatccaagcaagcgaccatgcactattagcccaggccagcggtacagtccaaataacggcttatcctaccagcccaatggcctgcctcaccctaccccacctccacctcagcattaccgtttggatgatatggccattgcccaccactacagggactcctatcgacaccccagccacagggacctcagggacagaaacagacctatggggttgcatggcacacgtcaagaagaaatgattgatcacagactaacagacagagaatgggcagaagagtggaaacatcttgaccatctgttaaactgcataatggacatggtagaaaaaacaaggcgatctctcaccgtactaaggcggtgtcaagaagcagaccgggaagaattgaattactggatccggcggtacagtgacgccgaggacttaaaaaaaggtggcggcagtagcagcagccactctaggcagcagagtcccgtcaacccagacccagttgcactagacgcgcatcgggaattccttcacaggcctgcgtctggatacgtgccagaggagatctggaagaaagctgaggaggccgtcaatgaggtgaagcgccaggcgatgacggagctgcagaaggccgtgtctgaggcggagcggaaagcccacgacatgatcacaacagagagggccaagatggagcgcacggtcgccgaggccaaacggcaggcggcggaggacgcactggcagttatcaatcagcaggaggattcaagcgagagttgctggaattgtggccgtaaagcgagtgaaacctgcagtggctgtaacacagcccgatactgtggctcattttgccagcacaaagactgggagaagcaccatcacatctgtggacagaccctgcaggcccagcagcagggagacacacctgcagtcagctcctctgtcacgcccaacagcggggctgggagcccgatggacacaccaccagcagccactccgaggtcaaccaccccgggaaccccttccaccatagagacaacccctcgctagacgtgaactcagaactgtcggaggaaagacaacacaaccaacgcgaaaccaattcctcatcctcagatgctcaaagttgttttttttgtttgtttgtttattagatgaattatcctatttcagtacttcagcaagagagaacctaactgtatcttgaggtggtagtaaaacacagagggccagtaacgggtcgtaatgacttattgtggataacaaagatatcttttctttagagaactgaaaagagagcagagaatataacatgaaatgatagatttgacctcctccctgttattttcaagtagctgggattttaaactagatgacctcattaaccgatgctttaccaaacagcaaaccaagagattgctaattgctgttgaaagcaaaaatgctaatattaaaagtcacaatgttctttatatacaataatggaaaaaaaaaaaagaggaaaaccctcaagggcatgagcattggatacagcagtagacattttaacaagaagatgaatggcgtccgtgggttgctaactgaactttgaagacccgctacaaaacgcgcagatgtgcagcagattggaaggagacacagatgttcggtttttttcctgtttctgaaaagaaataataatatccaggtcaacagaatgaaaaatgaaagatgatttgcaatgggatgtatgaatacagcagcaagaaaaaaaaatgccataatacaaaaggctccatatatatatatatatatatatatatacacacacacacacgcacatatacacacacacacacacacacacacacacacacacacacacacacacacacacacaagtaagagactcagcctgcagttaattagcattctggcagttttgacatcagccagctgccctaaataacccttcaacgtttcttcacttttgcaaggttccacagagtaagacattgggtctattccagctcattcattttatattgaaaaaaataattttaaaaatggtggcttcagctccagcccctttccaaaatttttcaaccccaccctgtttggatttttaattaaaaactagtagttctcttggtgttaaaacacttctgtcctgtgaggtttcccaatggtgtttttcttgtaaatgtgttggacaaatgtgaagatgcattgtagtttaaccatatgcccacatttagtctctttattcctagttggtgagaaacctgtatctttctatgctgcttttatatctgtatgtattagtgatatttctctagtagttaaaaaaaaaaaaaggaaaaaaagactctttttggttgtcctcaagaaaagaaaagaagaaaagctatctttcggagctgctatttcactctcttataggatttttttttttcctgaaaaccagcatgcttcacggaatgctaacatattggtgtttttgtaagagggatgtacataaatgtattttgcactgtcacaatgactccctaggcatgctttttgtttttttttttttttttttgagcaaattctttttaaatatgctagagccatttcatcaagtttagctgtagcatagagtagtcgtggaatttttcttttttttttttttaaatcattattagggacttttttaaaaaaataaaataacaagatatcctactttaaaaaaaaaggacagtgcatgcatattgctgtaaggtcgtttaagtatttctaattttacaaaagtaaaaatcattagagctccaaatgctgaggtgtagattgacagctttaacactgctgaatgccaggttatacagtattcttacaaaaagggaagtcagccaaagactgatctgatggaccaaaatcggaattttgaaaagcaccagtactactttccaaatgatcagcaggttaaacatgttcagcaaggtatagtatgaatccattaacccttcgttgtccagggtccagaccagaactacttgttagttttgaaaacagtagcccaggatgtggttgtgtgctttaggaaagtcagcagtgctgcaggctgtgtagacaaccaaagtttacaaggctgggaagacacttctccaaatacatatacaccaggcatttctttaaaatcaaaaacaatccattagctttggggcggggggtggggggagggttaaatgtaggccttggaaacagttttaagtggcttttaagtatctgcatagaggcaatcctaaggtttgctttaagtctcttaaatctaacatttttaaaagcatttcttccctgtattttcatatacaagttggttttaattttgtttgggtggtgttattttttttaaatgactttttagtttagaaagttctgatgagcaaataaatacatctatctacatgttggaagtccatctgccagcacacctgcttaaagtgaaatgaaagcacataaccaggctctgaatgggttatattttatcatggtgctcccagaatcctttgacctcactctgctttctagtctgcttgtgacactggacagtcctttcttacagagctattatatgttctaggctacgaagggttaaataatcccaaaaatgaggtatgtcatacccacacgtctttatctctagaagctgtgatgtatgtgaaacagcactgttattcttaacactagtgtgtaaaataaggattagtacagtacgtctcattactttttaattcagggcaccctgagtgaaaacaaatacaaaaaaaaatccctaactctgagctctatctctgattcctcttcctccttcccctcttcctcctcttcctctcctcctgttttgctacattctcctcagtggcaaaaagtttcactctacctctgacagcatgtatattgcaccagtagctaacaaaaactggtctagtcaaaccaaatgggcacaaaagaaccaggataccaaaagttaagctcatacagctgcaaaccatatcacttcttggtaacaatgcagacctcataaacctaaagaagagaaagaaaagaaaacttttgttactttccttttttgcttgtcacttatatacaggctatgtgagaatataatttgtaggtataacacattaagaaaaagttatcttcattggatagaattgaatggtggtcgctgataggaatagggcgtcctctagctcttatctctgtctcttactcttttctctttctctttttctctgtcatgagactgtgtgtgacagggccacctgtcttttttttttcttaaattttttttttttttatgtgtaggtgcatgtcttggggatttaaaaatttcaaggctggtttacttatgcaaagcatgcctacgtctggaatacttagggaaagaaagcgactccatgttgtccgaattcctcaagggacagaaaaaaaattggagactgttgaaatgcagatttgaagtaatttttttaaaatattattttgggttctgcgacattgtgaaaaattaaagttgttgtgcaatacttaattcagacatgtaccacaagttaatggtagactaacactggggggtggggtctaggcatcatgcttttgtcagcatactcttgagcttttaagtctactatgtctgaactgtggtttcttgtttatccttttttccttagttggactgtaatgtatggtctgtcaacctgtgaatctttaaagtatgattcaggtattgttgtattctttactgtgtaataaaaaagttgaaaaaaatctggatcctctgtctccctcgtccccggtgtgccatggttgcccaccagtgaccccagcctgaggagtccatcctccatggtgctgaatcaaatctgtagagtttattcagctacaaagcgtggctctgtaacaggagttggcttatccatgcgtgttgagtagggaatgatgtcagaactttgcaaaagtcgagctcattcataaggggatgtttctcaggcaggaggagtaggaagagtgggaggagaattactaccttccataggaaaggagagcttggcttgcctagattagctgctgcatagatagcagaggcccttttggctgtgttttgataaaattagaaatgagtacctaaatctggatcactctgctcagagaggttcgtgccaacctcatgaggctctgactcttgtcaggttgcttggctgccttgtgcatacccgaatggcagatcagctgacatgacatggaactgctctatctgccttgtcccctctcctctaattaaaagtcgctaccattgtcactcttggttatgtagttaatatccactgtggctatctccaacttgctgggacatccagttatctcctctgacacatattttttcattctctagttacaaagtttgttagagtttgaaaaacaaacccttctcccctaccctgtgaatgctgttagtttttatgtgtagttttcaaaacacagattatcttatatactgtgttgtagcagaaattcctgtttcctctgaatgttctgactttatagaccaaaataatcgttgcaaaaaatcaaggatggcacagcaggtgcatgagcccgtgtctggagaaaggttatgaaggtgaatgctggttacatgggagggtgacttggagccctctagtttccttcttgtgccagctgggttcctgtttcaaggccaggcttctctaacttgtcttcctgggaaatgtagcttttccaagaatttggtagtgcacaccaggaaaaactaggtatcagaacagatttttttttaaatagtggaaacaccctcactcccacactttggacagttagggttggatatttaatttcatagttactctttttttccacagaagaaaggccagcctgacccaagttgcctatttttaatgtgttactgcatcttattttctcttcaaagtgaaaaaggccagaaactagcagatagaaatggaacccgttgacttagttcccttataagaagttcttgcaaacacctctgtgacgttttcattcaagtggatatgttggacaaataggaaacagttttagtttacgcgaacagtatgagacttccaggtggtggacgccatttttttagaagtgttgatgatgtatttgataacattataaaagtatgtgtctcccgtgaaagaacattgagctatttccctggaatggatggggaagaaatgagcaaaggagtgctgttctgtatgggtgtctatacccttattccaaggtgaataaataaagttgtgtttgcctaatcatg

SEQ ID NO: 426 - DNA, 14038 bp, Homo sapiens
aaactcctctgagcaactgaagtttccttattcagttgaagattgctatggtgtaacagaagttgtattttgcttttccccttaatccactttccaccctacgcaacccccctcttttcgcttaagaacatactgtagatttgttagaaatagtagtaccttctttccccaccccaaactgctacctgtttcttccttgtttggactctctgctcctctagaagatttcacagcaatgctggactgcagtgactatgttctagactcaagaatgaacaatccgtcagaaaccagtaaaccatctatggagagtggagatggcaacacaggcacacaaaccaatggtctggactttcagaagcagcctgtgcctgtaggaggagcaatctcaacagcccaggcgcaggctttccttggacatctccatcaggtccaactcgctggaacaagtttacaggctgctgctcagtctttaaatgtacagtctaaatctaatgaagaatcgggggattcgcagcagccaagccagccttcccagcagccttcagtgcaggcagccattccccagacccagcttatgctagctggaggacagataactgggcttactttgacgcctgcccagcaacagttactactccagcaggcacaggcacaggcacagctgctggctgctgcagtgcagcagcactccgccagccagcagcacagtgctgctggagccaccatctccgcctctgctgccacgcccatgacgcagatccccctgtctcagcccatacagatcgcacaggatcttcaacaactgcaacagcttcaacagcagaatctcaacctgcaacagtttgtgttggtgcatccaaccaccaatttgcagccagcgcagtttatcatctcacagacgccccagggccagcagggtctcctgcaagcgcaaaatcttctaacgcaactacctcagcaaagccaagccaacctcctacagtcgcagccaagcatcaccctcacctcccagccagcaaccccaacacgcacaatagcagcaaccccaattcagacacttccacagagccagtcaacaccaaagcgaattgatactcccagcttggaggagcccagtgaccttgaggagcttgagcagtttgccaagaccttcaaacaaagacgaatcaaacttggattcactcagggtgatgttgggctcgctatggggaaactatatggaaatgacttcagccaaactaccatctctcgatttgaagccttgaacctcagctttaagaacatgtgcaagttgaagccacttttagagaagtggctaaatgatgcagagaacctctcatctgattcgtccctctccagcccaagtgccctgaattctccaggaattgagggcttgagccgtaggaggaagaaacgcaccagcatagagaccaacatccgtgtggccttagagaagagtttcttggagaatcaaaagcctacctcggaagagatcactatgattgctgatcagctcaatatggaaaaagaggtgattcgtgtttggttctgtaaccgccgccagaaagaaaaaagaatcaacccaccaagcagtggtgggaccagcagctcacctattaaagcaattttccccagcccaacttcactggtggcgaccacaccaagccttgtgactagcagtgcagcaactaccctcacagtcagccctgtcctccctctgaccagtgctgctgtgacgaatctttcagttacaggcacttcagacaccacctccaacaacacagcaaccgtgatttccacagcgcctccagcttcctcagcagtcacgtccccctctctgagtccctccccttctgcctcagcctccacctccgaggcatccagtgccagtgagaccagcacaacacagaccacctccactcctttgtcctcccctcttgggaccagccaggtgatggtgacagcatcaggtttgcaaacagcagcagctgctgcccttcaaggagctgcacagttgccagcaaatgccagtcttgctgccatggcagctgctgcaggactaaacccaagcctgatggcaccctcacagtttgcggctggaggtgccttactcagtctgaatccagggaccctgagcggtgctctcagcccagctctaatgagcaacagtacactggcaactattcaagctcttgcttctggtggctctcttccaataacatcacttgatgcaactgggaacctggtatttgccaatgcgggaggagcccccaacatcgtgactgcccctctgttcctgaaccctcagaacctctctctgctcaccagcaaccctgttagcttggtctctgccgccgcagcatctgcagggaactctgcacctgtagccagccttcacgccacctccacctctgctgagtccatccagaactctctcttcacagtggcctctgccagcggggctgcgtccaccaccaccaccgcctccaaggcacagtgagctgggcagagctgggctgccagaagcctttttcactctgcagtgtgattggactgccagccaggttaataaactgaaaaatgtgattggcttcctctcgccgtgttgtgagggcaaaggagagaagggagaaaaaaaaaaaaaaaccacacacacccatacacacataccagaaaaagaaagaaaggatggagacggaacatttgcctaattttgtaataaaacactgtcttttcaggattgcttcatggattggagaactttctaaccaaaaattaaaaaaaaaaaaaaaaaaagaaacaaaaaaatcaaaaacaaacaaaaataagtgaaaggactacttatcatttccagcagtcatgatgacaagttaaggtgggttaccaattccaatataggaaggggatttcttgtttgtctaaatttctttttttcttaaaaaaaaaaaatcatttttatgggtctgttgtacaggccattaagtcataacaaggtgtttataatcgtatcaattgtgttgggggttcctttcttaactggtacaatttaggcaggcctgtattactgtattattattgttgttgttgttattgttttatatatatagtttggacatgtttattatctcttgctcctggatcctatttcagtgagctcccacactgtggggagggagggttttggggtaaggggagacttctgttcttaactgtggggaatgttcttgctggtttccttatccttgatgactcttacagaggtgctagaaaattattttcttttgccacttatgcaagaggcttggtgcagaagctgaaggcagtgtgtgcaaacactcccattccacacacgccccttcccctccccacatcaggtggtgcctttggagcacttttgtgtaggaaggaattcctgctgaactgtagctctcactcacccccaaatcattgaatgaccctgaggcccagttcctgtggtgcaacagtgctgctttctgctactttcaatgggaacagctgtacatgttgcagggcaggatttggttcccaagagcaaagactactgcagacacctgacttggtggttctcctgatttcttatctcctgaaaaatgctcctgctgttggtgtgtttgtttgtttgttccattttgtggaagtttttcatccaaactttaactaacttggcaaagaaaaaaaactgacttactgaaattgggaaacttttcccttcttttattttctaaaggaattctactagactattttccattgataatatatacaaaagaggtgtgatgagaagggtataaggttaccaccttttcctctagagagccacagacttcctttccactggatggtttataaattcctctaaccctgagattcttcttggttctctgactaaaggaggcacttattagccgggctgggatctgtagaacctttgaagaaggactttgagcaggaactttgcacacaccttaagtgtctccttggtttgttcatgatgctcctgctaggtaggtctaaatggcaatacacatctctttattcaatgtagaaagtaattagctctgtaattattttcagggtgtttgtagactatataaatgagcccattgaaaaggaagagtttgtgaaagtggatgaagaggaataagggtaacttggagattaaattcctttttttgtcagtgtactgttgttatgccatctgtaccaaaaaattttccaaaagactggatcactgcagtgcagctcatctaagttccccttcttattggagttaaaggttcccatttggtggctgtgggtgcttgcttaaatctctggtggtcccaagactgcactttttctccctttcgagctggggatgtagagagaacttacaggtgatttttattctgattgcttttgtttgtgtccacaagggagcttggattctgtgtacttgtctctttcccattgtccagtaaggcagtaaatacagacacaatgtgtacttttgtgtgtgattcaagtgggagacagtctgttaaaaggtcagaaacattttagtcccctttaaaatatttcttttagtttatttctatcgtgttttatttcacagatatttaattaccacccctaaatttcctcctcttacccttcaccttccctaaaatccttccaaaatcagtgaactgcaagcagggaaactaacaaatgtccattcaccctttttgtgtggtgtgtttttttatgttttgttttgttttttaactaagcttgaaccaaagtcaatttttagcaagctgctgtactaatggactagttgataacgtgcagttcagacacatcgaggagatagatgctactgacaatttctttttcatttgtctttattaattttatatgaaagttgctgcttgtttttaatcttttatgttggtaaattgtgatatcctctgggcagacattaacttgatgtttaactagtttattaggttggtgtgtaaatagaatgacaatgtcaattactaatttctctcctctccattcactttttctctgttgtagttaaatttaatcttctatcctgacttgacatctctacctttagtctgtggaaatgattttagggctatcagtaatgctgtagctgcccataataatgagtccctcccttgggagtggtgaaacttagaaggaaggattcagggagggaaatgctggtacccagtatactggattagaagttatagcattaatttctcaaaattgctaccaaaggaagtgtggagtcccaagggactcaagctcagtgaggtaagacaaagggcaaggaaaggctgtttgggtggtttttttttccccacatatggtttagaaaatgatccctttcccaaacaaaactcaccaacagactttaatattagaaaagatactaagctttaaatgtcaatacagtggtcttttattccctgccctgtctatattttctactcaatttgggataaggggattttatgtgaagcacttgatgagggtagaccagcataaaaaatctgtttaaaagaagaaataatctttaggaaaagataaatctttagataaaaataaatttttttctctttttttacttatttaaaaataagttgtgaaatgaaaggtacatttacacatgtacacacgaaacactaatatagctttttggtggttgtttagtttaaaatcaactccctatccatcatccctagatattctacttatcgtattgcttcatgaacaccttagtcattttttactttacgtatatatttttttatcatctcaagaaatgcattttgaattgaatgaactatcttctaagctaagatactcaaatttaacttttagccaccttatatgggagagcctggaaactaaaggggaccagggaccatttgaccaaaagaggtgtttggtggagtttctgcatttcaaagaagaaaggccagataggtcatcacaattcattgtattattctttttttttccccttaatgtttatgcaaattttattttatatttctgaatttggttagcacatactaagccaaagactattctaaatgcatttatagtgaatactatgtatgcccatggtaatgggtcctccctaaggagtggtgaatgtaattgtgtgaatcctgcttatcacaagtggtgcaatttggtcataaactttatttataccctgtatacatctgaataacagagcagaaagacctaaaaaagggcttctcacaggaacaatattactatgttgttctaagaaaaaataagttgagtgctgtattagtttaagtgtttctaaagttctataggcagcattttagaattaagaattgtgtatatccattaactgatataattcacatgtccttttatttgttatcagaaagatcaatactatcccaatttattcaacttgttacccaagaaatggaaccaaaggaatccaactttcattttgtgtagaatcatacctacttatacttaatgctagcactgtaagaaataagtcttttttgtttaaaaaagggaagataagattaaagattcttagtgagatcatcttgccaatttgttgtacatctctcattcattgttgggggaaaaaaaagcacaactatacctctttaatgttattttcttccattatccctcatttatttggaaagataagggaaaccttgtctgtattatccagaagcacagatatttgcttgacacaatatttaaattcagcccaatctttaacattaaaaaattttctttttaacttgctggaaaagttggatacattggcaaatatagggaattcatgtcttttttttttttttttttctggtcttgctctgttgcctaggctagagtgcaacggcatgatctcggctcactgcaacctctgcctcccgggttcaagcaattctcctgcttcagcctcccaagtagctgggattacaggcgcccaccaccgcacccggctaatttttgtatttttagtagggacgggatttctccgtgttggccaggctttttgaactcctgaccttaggtgatctgcctgccttggcctcccaaagtgctgggattacaggtatgagccactgtgcccatcctcatgtcaatttttaaagtgataaatcctgatattatacattgcaattagtgtagaataaacgcttggcttatagaactctctgttcttagtctaaagctgttcccaaaccaggtcatcctcacgaaacattcttgaccaagaaaaaagataaggtcattgagataggaagacagaggaaaagcctcttgctgttgtttcttcccaagaaaggagaagccctgccagggagaagtcagtagtattgctgactcactgtatcactgagtgtagggtgtggtagcaaggaggaggcaggggattcacgctgacaggtggctctggcctggctcttggggggccttctgaagaccagtctgcagtttgaggaagggccccaacaattcatttggagagcttggccaaatactttctcattaaatcagcacctaaacttgatgaacttaaagtttgtttattagagttgaaaacattaaaagatgactgatactaatgggagaaaaatactaaagacccaaaatttaaaattttccaaaatggacaagaattgatgggttaatttgctcataactgatatgagtttgcttttatgtgtgtgtggaaagcatttaatgtgtgatgctgttcatagtcctggctatttgatgtcattttcagttttacaacattttgaggatgacactttataaaatggtaaatctttctcagcgtttacaaacttggcttttgagaagggaaaaatcctctttgctatttctgtaagaagaataactgagatcagctattatataggtttgcatggatggtgtccacaatacaaatgtaaacttggacaggaataggataaataaattgctttcatcataaaggccaatcatccatttcttagtccaaggagattaaatataaataggacacccctgagatttccagtaaggtatttgaaaggattccactgggagggcagggaatatattttttctcagagcatccagtttgtacccagttttctatatggtttgtgaactgtagcttttaaaaaaaaattttgtagttttcttctaaccttattcattaagtagttccttgttttggcccttctactcttggccttagctaaaagcagtaaatgtgagtgaattttatgttgattatgtcacctggatctcctttccttcccttctttttctcattgaatggtggtaccttaatttgggtaacagctagcttctggcaccttcataaaatacctcagaatagcttagcattgttgcaaaactggttttaaactaaaaaccaaataaataagtgaaaaaattttataaatagtggaaataattctagctgtagcatttagttgaactaatgtttattatgatcgataaacaagattgatgctgtatgtatttgggatcctgtttataggttacaatttatagggttagggagggttgggtgggggaagaggagatgttgattatgttagaaggaaaacattgctcgtgtgtgtgtttgttttttcttatatctgtcttgccaaaggaaacttgattttccctgtgattggctttggcctctgtggtctggtctgcagcagtgtgtggtggcatgcaggtaacatatggggtgtccagtaggttcagggaccctgagggtgcatttacatcccttcctatggttgcccatgccccccagaccctgccaacctctcctaatgattcattacctctgtacatagcaaaagcataggcaaaggatgaatgcgtgaatgcctggatgtgcagttgagaaacagaggcagacatagacatgcaccaattaatttggagccaagaggtgagtgattgatgtatcttaaatctaggaaagttaaagtgaaacaggttctttgtgttgccctctgtcaagttactgaatgttgtgctaataacacaacactttaaaaccttacttacttttctcataccaaggctagttctttctagaccaaaaacacaaacaggataaaaagcaaaccaagaagttgaaagctaacctgcccacctcacccctgtgatacaaagtgtgaaccttaaggattagttggtgggattgaggagagaattattcttggtgggaacatgaatgagaaatgatgctggcttaggaaaaatcacaagccctttctgcccatactctgggacaaactttcttggctccctgagttcggatatagactgtatctctagaaaggctatttttttaaataaatgatcccacagaacttaagtgggatttggtttagataccaaagacactgctaatgtcattgcttatccttaagttttcaaaacaggcagagggaataggagcaaaaagccaaaatttggaaaagctttactttatctctttccttcccttttccccttttcccagtcccctgctttttgaaggaagtcttcttggttatcctggctttggaaaagagatttattttgttttgctctgctggctctttaaagatggatagttgctcaatctagcagtgatgttcttggaattgctgagaaatttggggagggcaaaagataggggtagaattttttcattatttccctttatctaatacttttaaatagaaccaacacagcctatatgagttcagacaatatttagatgtggtatctccatctgtctcctgtaaaagataagaattttcaagaacaggattacgtggaaaaccaaaagatcttcccttactctcctataaatgttttgttccaaatgtttttatatatgggctctagggagtcaggtagttcattgtttcggtgtactattgataggacacagaaagggagagagggtaaagaaatgtatcactctctgaatattgcatcaaaaatgattaggttgcagaacttcatgaaagctttactaataatcttattgttctgacattatgtaaaggtggtattaatattgtatgacttgtcaaagtgctagataggtttataagtaggtaatagggatgttgaagattagagcacttgaaacagaagttctgggaaaacaaggtgtgtgtaatggaacaccactttgagcacagaaacaaaggtcccttggacctggtagggaagatgtgatttatgattgtttctgtgtccctgtatctgcccaccctgcacagggctccaccacccagggccaccttctggtttaaacccaggacactgtcaaaaagttaagaccccaaaactaatttactgtaaaaaacattgaggactgctgcaaagttttcccttgttttctttgtgtacttgttcatcattgtataagttagccacagcttcacaagagcagcttaaggcttctttcataaattggcagtggcattgagttctcaaacattatatcccaaagtctgcaggcagacagctggatacagcgctgtgtataaatgagacgtccaaacacttgagtttcttaagattgggatctctttcaaatgaaaaaggacagagccaagtagagaaaagactttgtgctcccacccagccttaatgagtctcatggtctaaaagtataggaagaaatgaaatgcactttcagaagctaaaatgacagtgtctgctacaaaaggctgtagttgtaggcagtcggggatgccatgtccttggttccattcctgcgtgagtctgcagaaggcacacactttgtaagagtagagtggactagtgccagcctgaataggtttaaaactgcaaacagttggagaacatggaacaggttggtgcaggaagcctaagattttgcaatcatattataacattggcttttgacaacataaatgttgtatcttccctaaggtcaggtcggggaaagaaagacttccagcttcttacctctgcgtgcatgggcacgtgtgcattgctcagtccgcaggaggtctcactccgcaggaaacgctctcctcccgcataagtctgtacttccatcccctcatctgtggtagtagtgaaggctaggtgagtaagcgtgggctgttctacccaccagaagtccaggagctgttgtatacctcatttctaactcgtgaccgagtgacttgctttaactttctcgaaatcctacagagttgccaagtctgccctccctcctcagtcatgttaaactctggcctatagcatcatgggacctgtagcctagggtgggaccccctaaagcctctgaatgtcgctgcttaaaagctactgcaaactgagggcaaattgcaatcttctattcctttttgttgcaaggggtcttcacaggtctcttaacatctgctttccctgccaccctgcctttaggggctggccagctatccacacccctaacccaccctgtgtttctgacagctggccacacgtcaacttctgtacttgccttttccttggtggggtagaggccaaccccttctcctctgaggcctcagggttctgtttcttttcaggactttgggtagaagggaagacaccaaaggctcctttaagctgactgctgcatacacatttcactttttttcctttgacatgaccaaaaatatccaaatatttaagtttattattattattattattatttgacaatcttatatccaatgggctctctagaagctgcatccccagccctttcaccttttctttgaatgtagttcccaaccttcaattcccacccctaatgctgacaaaaagcttagccaggtcatgatactgctgctataagccaggggagggtggtttctttgttttgttttgttttgttttgtttttcaaatttccagccaaaaccaaagatttcttaatgattgtataaactcaaaacaaacaaaagaaccaaagaaaagggaagtcttcagcatcagtccagtctgtggtgtcctggcacttagaagagtgaggccagggaaggtggggcggggggaccctctgactggatcagaaagggcaggcaagctgcttaccaccttccagggtccagcacaggtgcatgcccctagctttggccctcacaaacttgtgagcatgccctgaaacaaattggcatttcagattttccaaaacaaaagtcaaaaaaccccatcaccaccatcatccaccctacaccaaccagggtcactatggggacttagcacagggcctagggagggtgggagctgctgctggactggcccgaggactccacagagtgggggacgttgaagacactggcgcacgattggctgctctgctgggtgctttaacctctggggctgggcgaatgcacgccacggtgcccttctgagcctttttttcttttcctgtactggaactgcttggaagtggctgtcctgtttgtgagaaaacatgcagaaagattatcaagcttttcatttctctttattgtagttttctttcctttttgcagcaccactgtgcaactatgcattgtacttcacaaccttttgtgctaggtagatgcctgtgactttttaacttggggggtggggggattgcaaatgaaggaactttttacatggatctttttaatctcagttggttgggggaggggggtacttggttcttgggtcacacaagctctatcccaaagcaaaatccaaatgttaataatattagcctgatgcagataccaaagataatttctttcctgcagaaccttagactcgtgtattaagtacgattacccagcacttgcattagtctaacctcagtaattccaaagcttagatgtatattttggtatatttctgggatattaaaaaaaaaatgtcgtttaacttcttgtttgtttcagtgtaatgctcttaaagtcatagcatgaaaataattgaactgtcctattcttagtagtttgaaataatagtatttttgtatgttttgggtgtgtctatgtatgtattaacataacagttttcactgcctaggtgttcataataaaaaagaaaatgaaaaaagttctgagtgtacataatattcaataataatctcccaccaggtgtcaatttagattgcatattcctcattactgttcccaactgggattttgttttcttttaaagagacagtgatcgtgtttttctaaagatgttttctttctctctttcaatatcttaactcactttttttttcttccttttttgtcttaattattaattcaggggtgtttgtccactgttgtcaaaggaggggcacaaggggaattggcccccggcctcctagaactttttgttttatgtactttaaaatgtgagtttgagttcttctttgtggaaacttaagatgtggtgtaaatgattctttccaaaattgtccagcagcttgaatgaggcagtgacaattctgaggtggtttattgggagtccttctacatttctcttagataactctgcactctgggtggctattgtgtagccttactgccccagagtgcctgttagccaaatatttcccctctgataggaatattttctaagaatcagctgataacttgcgtgctggaccttgttatctgtgcccctgggagacacacgttttcttggttttgaaaacctgaaacacaggcaactttacattttggggaattagctgatgcctcctgaagcctgaggaggtggcggggaatatgagcggtgctgtctctctcaaaagtgccctttagatgattccccctcctagggctgcctgcaggggctgtaggcttgggaaagattgtgtaggtgacagtgaatcagaatgaagtggtagattttgtgtagatgcatttgtctgctgtaattttttatatatatattaaacttactgtaactgtacagttcatttctgttgtaaaacatcattaaaccatcttccaagtgttttcacattg

SEQ ID NO: 427 - DNA, 9362 bp, Homo sapiens
tttgatatgacgattagagcataacccgagtgacacgttgaattcgccataatcaaggaaaccttttccgggtggggatctctgaaattactcagataacagtgctgtgccaaaaacctgtggattttctctacaaaaattatcatgactgttatctttttgatggaaaagatgaagttcagcgaagaacaaatctacaacttggccagaagactgtagactttgccttcaaagagtgagcaaccctaattaacctgattttttgctgataatcactctcaatggaatcaaatcacaaatccggggatggattgagcggcactcagaaggaagcagccctccgcgcactggtccagcgcacaggatatagcttggtccaggaaaatggacaaagaaaatatggtggccctccacctggttgggatgctgcaccccctgaaaggggctgtgaaatttttattggaaaacttccccgagacctttttgaggatgagcttataccattatgtgaaaaaatcggtaaaatttatgaaatgagaatgatgatggattttaatggcaacaatagaggatatgcatttgtaacattttcaaataaagtggaagccaagaatgcaatcaagcaacttaataattatgaaattagaaatgggcgcctcttaggggtttgtgccagtgtggacaactgccgattatttgttgggggcatcccaaaaaccaaaaagagagaagaaatcttatcggagatgaaaaaggttactgaaggtgttgtcgatgtcatcgtctacccaagcgctgcagataaaaccaaaaaccgaggctttgccttcgtggagtatgagagtcatcgagcagctgccatggcgaggaggaaactgctaccaggaagaattcagttatggggacatggtattgcagtagactgggcagagccagaagtagaagttgatgaagatacaatgtcttcagtgaaaatcctatatgtaagaaatcttatgctgtctacctctgaagagatgattgaaaaggaattcaacaatatcaaaccaggtgctgtggagagggtgaagaaaattcgagactatgcttttgtgcacttcagtaaccgagaagatgcagttgaggctatgaaagctttaaatggcaaggtgctggatggttcccccattgaagtcaccctagcaaaaccagtggacaaggacagttatgttaggtatacccgaggcacaggtggaaggggcaccatgctgcaaggagagtatacctactctttgggccaagtttatgatcccaccacaacctaccttggagctcctgtcttctatgccccccagacctatgcagcaattcccagtcttcatttcccagccaccaaaggacatctcagcaacagagccattatccgagccccttctgttagaggggctgcgggagtgagaggactgggcggccgtggctatttggcatacacaggcctgggtcgaggataccaggtcaaaggagacaaaagagaagacaaactctatgacattttacctgggatggagctcaccccaatgaatcctgtcacattaaaaccccaaggaattaaactcgctccccagatattagaagagatttgtcagaaaaataactggggacagccagtgtaccagctgcactctgctattggacaagaccaaagacagctattcttgtacaaaataactattcctgctctagccagccagaatcctgcaatccaccctttcacacctccaaagctgagtgcctttgtggatgaagcaaagacgtatgcagccgaatacaccctgcagaccctgggcatccccactgatggaggcgatggcaccatggctactgctgctgctgctgctactgctttcccaggatatgctgtccctaatgcaactgcacccgtgtctgcagcccagctcaagcaagcggtaacccttggacaagacttagcagcatatacaacctatgaggtctacccaacttttgcagtgactgcccgaggggatggatatggcaccttctgaagatgcttttttaaatttaagaataagacacacaaaactctattaaaaaaaaaaaagaaataaacctctaactcggtccccaatgatcataaataatatgtttcctaaagaaatgcctttccagagactgtatagcttataccaattatagaatcatgaagtaagaacgttattctgaaatgaaatcaaatgttaaagagccttttgtttaacagaaagctggagagccactgccccaaaagttgttcttccagtcttcctgagtgtttggggagtatgtttacaaatcctgccagggtgaagagagatcttgtagctggcaagatttgggagggatggagcagacctgggcagtcagtaataatcaagggaagccaagtaaactccagagtcttacctctggctcacagctgcttttgtgatacacaaagtcacaaagaggaaaagggaagggaggaggttgcttttcaaaatgcattcaccatggctcactgtgtggggcatgattgcaggcctgagctcatgaaagactgtccaagattttgtggtttcaacctctcttcagcctgaaaattccatccagtcgatttgtcacagatcaggatcttcctgtcccctgcagcccatggggacttcctagaaatagatatgatatgttgtagatgtggttaaaacaaatccaggccccattgtttattcagctcattagtccacacctatttttccctagaactcctaccttttccaataatcatgccagcatgaaatgaccttttctactttaaaattttttgacttgttcatattgcttgattttcatcatctcagactcatttttctcctacctaatatcataaaaaagtaaatcagatatacagaatatcatttatgatacttcttcctttcagcaaattgactgaaaagtcattttaaagagagaagtgcagatttgctctcatttctttgatattgttgcagtatccaccccaccatctagcaatcagagatgcttatattaacttgggattagctttgcattatctaacccatttattttaaatctgccaggaaatcctctaactttccttcctttttgtttcagtaagtatcaggcagcttcaccatacctgagtccttttgtcttgaagctgccacagaaaaatcttacagcaatcattgctgattagaaactgtttcagacaatcagcatgggtgttatttaccaaattccccccagagtcctaggcctcttctccagaaatatctgatgatgaagtgaggggagggcaacggtgctacaaaacacggaacagaggtaaagagaaggcactactttcttgccatacttgtaaatgattgctttgttcaaacataaataatcttaagtccaacaccaaatacctgttactcctacatcaatctcattagtggtttaagacacagtactagaattttcattttttaaaatcccttggcccttaaaaaaatttacagaacacaaaggaaaacataaacacaaagacatggaaaattttgtcaactccttaatggaattctgtgatcaaaaagcaggccagattctaatcaaaatcaggtaaattttaatcacaatcagaagtacttgtaacatttcagttgtcctaactccaatgagataacaaagcctccaaggctacagctgaaactctgaaaggccctgtgctttctactttacatttagcgtctaatatttcctaggacagtagttcccaaagtaggctgtacattagaatctcctggagagctttttaaatgctaatgccaataacatatctcataaaatttacactagaatttccttggatgggtgcctggcatcagtattttttaatgatccctaggtgatttcaatgtgcacctaggtttgggaattgctatattcttgtatttatactctatctctttatttcttttcctttttatttcacttttagtaaatagaaaaatgcaattaaaaaatcatctaagttaagacaaatagccaaatcatatttatcccataaatagtatgaatttaaatgtaacttacgtaggcttcaaactaactctaaaaatgagaaagtaaaacaatcttgtcctaaaacaattcttagatccaaatttacactcccctacagatctgcttttattctcaaagacagtgattacattgacataacaaatgtccattggggcaggcaaatttctactgagtctaaaaagcattccaaattctaggagcaaaagttctgattttccttaaaatctttgcaaataaacagcaaagggtattctggatgtcttgtcaatgcaaattaggtttgatttagagaagttttaaatttaatcgcaatgaaaagattagttaatacatgaatctttttatgagaaaaaatcattattctggataaagtcataattgtttgtttacaatattaagagcagacacctaaacatacaataataccaaagtattgagaaaattaccactggaacaccatctcaagttatcacaccatttacctctttagagccagttttgtataagtaggtagaagtggttttggtttttttgctaaaattttactttgttttagtaatatctagggaatactttgaattccattaaaataccttcatagaaagtgttaatgtgtctaccatgccatatgtttatttttactttccccaagttaggtagatagagcaagtcctgctaccataagtttaaaattattaagacaacgggcttttttaaattgctggtagaaccaaaggctaattttgcataggtttatatttttagacttaagaaattagcacctatataataccttcataccttctgcatcactatcaatttttctgtaatttcttatttgaatgcttcctaattctttacagaaaaaattaaaatttgtcacccaaccaggtgataataacaaaacaataatttaggaacatccagtaaatttgaattagttctctaaattttggtaattaatagcttattgataattaaaatcagcctaatgttgcttaagtaggaggaaattgatcagcaatgggattgggtatctattttctttcctataaaagtgctgcctcttctcaaattgctttatttctctcccactgcattagtatatctagaacagcaccttcaactgcaacaaaatataattctcctagatgactaggatatcctccaatctggtatcatgccaaacaacactatgtttggggaacagcacccgaaatgctgctaaaaagctacctcatgtcaagaaaatatggatttcaaaaaatatctggcacagtggcccatgcctataaccccagtactttgggaggccaaggcaggaggattgctggaggccaggagttcaagaccagcctgggcaacatggagagactccgcctctacaaaaaaaaaaaaaacaaatttaatttaattggccagttgtggtggcgtgggcctgtggtcccagctacttgggaagctaaggcaggaggattgctggaggcctggagggcaaggctgcagtgagccatgttcacatcgctgcactccagcctgggtgacagagcaagaccctgtctccaaaaaagcaaaaataaatatctaacaaaaaggaacctgtttccaaaccacagtttcttaactttttcatgatggaatagaaattaaactataagtatatactgataatagctgtgcaggaaattggtttttattttacttaaaagtattttttagaaaaaatgttattctgattgcatagattagcaaaatattgcatcaatataatgttccatttttattaatttttgttatattctaaatgaccgttttataattctgtcttggacaactgggccacagttagaatccacatagacagggaggttcttaggtgtgccatttgtagaataaagggcaatcaagttaatattcggggtaaattttcattgcattctaacctatgaagtttgataaagtatattattattgaacaactctaacactaagatttcctaaaagtaacttacaacaaaaaatgaactatgtgctcaatattcacataaagtcatgattattctcttcttgcattcatataaaagttcccagggggaagaaaatatatctaaaaattagactagaaacttggcactttttatgtattgtagatacactttcatatattgtaaatacatctgttaaagataaaactaagtttctaacatagcactacaaggaaactttggataaatatttttaaaaagaaaatgttaataggataacttaagattttgtatatacttattggaagacaggaagaaactaggcagtaaatattcctacctgacgtgcaaccattgtcaatcaggttttgttaaactgtcaaatttgattttgaaattttagtttgcccaaataatatcttgaaaatgctctgaattttactagaacatattcatagaaagtgtaatgtatctaccaggctctatgtttgtgtttgccaacattagaaaaacaaagtaagttgcgctataatgagtgaaactaaggaaaatgagatttttctgactcccattccctctcttaaaaagtaaaatatttaagctttttttattaaaggaaaaatgggtacagaatactctattgccctccaaatgtccaacatttttaaagccatgttgtccaacaatgtttatacagaaaatagaatgcataggtttaatatagatagcaatgtatatgtaggctcatttgtgggagattgcaaactttatgtgcccccagttctccttggttttgtaggaaagctaaaagaaaaccttgtactctcactaataatgaaattcatagccaatttagaaagggaaaataacctgaaaaccaaaatacctcattcatctgaagatgcctggaataaaatatggaattcttctgtacctacctcccccttacagacttttctcctattttgagagagaaattcaagaagaagaatacagcttgttctctttccacaaatgatactttgtctaagggaataggagataccaagaaacagtatctttaaaaaagtaagctgcccacaggccttcttggagaatgaagaatatcagccccattcagggtttaccaatgtctctctgaggtgacaatacattctggttttccaggacagtcctggcttaggtctgctgtccttctataaatattaacaatgatccctcttatttccaaacgtgtcccagtttagacaacaaattatacagtgtctgcccccaacacacacacacacaccccaccatctttatgggttgttgttgttttcttgttgtttttaattttgtagaattggctttgtcttctccaaagcagataacagcttaaactaaagagcctagctacttctttctgactgagcagggtcatagtaaacagagaagaatggatcacttcctcctctgaaatctccatcaatccactttctgtccaactatctctctacccagcctatttttggtcctagttttcctctcataacccctgggctgtgagtcctgagttctgccttcatatggcagagcaagctagtcattattatgccaggttaggtggtggggcaagacaaaagatagctcttggggacacttgcttggtctgtagagatccacagggcactagtagggtattagagcatttattggtttctttcttccttgagttgagttacttctatcccaaaacagacaggtcttacgttaaccttcaccttaaaaaggatattgccttttttccttctgcttcacaaatttgctccaacactaattcccttgcatttgatttcatcattatgattgttcatcaaccattcttcacgaaaaatcctcacatcacgtcatataaaggttttattatttttaatggaaaataacattgagagattattttcctttttcataaaatttccctttttccctccctctattctcttcactaacattggaaattaaacaagttttacaggctctattgttattaaccctcaaatctattcttcagagaatatatgatcagcctgtgtttactatgcacctactcttataccagaaactgtgaatacaaatacatatatttcctacttctctctttaattggggcacacagtcccatggtccattctgcatttttcaaaattgaatataattgcaacacctgataggttttgccacttagaattctgaaaataaatcaactctgttctaaaccttaagtttccactattattgccaaactctggactgatacaataagccttttaaaaggtgaatttaacacttcacctattatggttatttaagtaaaatgagttttcaaatatttcccccaggagaaatataaaggactatgcaaaaatagaaggagaaaaaggttagttagaggtccagaaggagaattaaaacatggaattgataaattcacctactgatttatgatgttaatgagcaggtacctatacattttatttacttgaaaacattttggccattaactatttctgttttctaaatacatttgtgtttataaaattttaaaatctatatcacaagacttagacatgcctttctttgcaataaagtatatatacctttttacaaatgtaaattttattttgaaacttggcattttctttataattcctaagatatctttgggcacacagactacagataaatctatttaaatcaattcatcattatcactggtttaaatatttaatgtaaccattggaatttttattcttattccttcagagaattctccttttcttctatgtttctgactgcaatacagcccgatattgttattccctatatcttaatgaaaagcaagctgtcagcaaaatgcatttatagtttccagatgtttaacaatctctttcttcttttcttttttgttattatttttatttatgtgaagttagttagctgaggtaccaaaaaagagacaaagacagtattaaaaagtgtgcataaagcacttatttttgtactttagtacaatgttttatagaactttgtgatctatctaaatatattaagtaaaattacaccattcacttgttgggaaaataatctttggtttggaagatattaacataatgggcatcttagaatcataaatcacatgaaatgagagacaatgcaatattgtataattcctggatgatgcaattgttttaattgaattttcaagtgccattataaagttttaaaaattatcaa

SEQ ID NO: 428 - DNA, 5058 bp, Homo sapiens
ggcgaatagcgccggctaggtcttccaacctctaggtggggtgccagccggggcgggcccagcaccccggccgggcagtactttttttttttttgcatacaccagttctcaggatatcggaatccggtgcacagcagcttcttcaggtttgaggttccggatgcctgggggcggagaaacgggaggggaaaaacagatggcaaggtgaggcgtccatggaacgacttctggcccagctgtgcggcagcagcgcagcgtggccgctcccgctgtgggagggggacaccacaggccactgcttcacccagctggtgctcagcgccctgccccacgcgctcctcgccgtgctcagtgcctgttacttgggcaccccgaggagtccagattacatcctaccctgcagtcctggatggcgcctccgacttgcagcttccttcctgctttccgtcttcccgctgctagaccttcttccagttgctttgccaccaggggcaggcccaggacccatagggctagaggtgttggcagggtgcgtggcagctgtggcctggatcagccacagcctggccctgtgggtgttggcacattcccctcatggccactcccggggtcccttggccttggccctggtagccttgctgccagctccagccctagtgctgaccgtgttgtggcattgccagcgaggcacacttctgcccccacttctcccagggcccatggcccgcctatgcttgctcatcctgcagctggctgcactcttggcctatgcactgggatgggcagctcctgggggaccacgagaaccctgggctcaggagcccctcctgcccgaggatcaagaacctgaggtggctgaagatggggagagttggctgtcacgcttttcctatgcctggctggcacccttgctggcccgtggggcctgtggagagctccggcagcctcaggacatttgccgcctcccccacagactgcagccaacctacctggctcgtgtcttccaggcacactggcaggagggggcacggctgtggagggccttgtatggggcctttggacggtgctatctggcacttggactgctgaagctggtggggaccatgttgggattctcagggcccctgttgctctccctactggtgggcttcctggaagaggggcaggagccactaagccacggcctgctctatgctctggggctagccggtggggctgtgctgggtgctgtgctgcagaatcagtatgggtatgaggtatataaggtaacacttcaggcacggggggctgtgctgaacatcctgtactgcaaggctttacagctggggcccagccgccctcctactggggaggccctgaacctactaggcactgactctgaacggctgcttaactttgctgggagcttccatgaagcctggggcctgcccctgcaactggccatcaccctctacctgctgtaccagcaggtaggcgtggccttcgtgggtggtctcatcttggcactgctgctggtacccgtcaacaaagtgattgccacccgcatcatggccagcaaccaggaaatgctacagcacaaggatgcgcgggttaagcttgtgacagagctgctgagtggcattcgggtcatcaagttctgcgggtgggagcaggcactgggagcccgagtagaggcctgccgggctcgagagctggggcgactccgggtcatcaaatacctggatgcggcctgtgtatacctgtgggctgccctaccggttgtcatctccatcgttatcttcatcacctatgtcctcatggggcaccagctcactgccaccaaggtgttcacggccctggcactggtgcgaatgctcattcttcctctcaacaacttcccttgggtgatcaatggtctcctggaggccaaagtgtccttggaccggatccagcttttcctcgaccttccaaaccacaacccccaggcctactacagcccagatccccctgcagagccatctacagtattggagctgcatggagccttgttctcctgggacccagttggaaccagcctggagaccttcatcagtcatctcgaagtgaaaaagggtatgctggtgggcatcgtggggaaggtcggctgtgggaagagctccctgctggctgccatcgctggagagctccacaggctgcgtgggcatgtggcagtgcgggggctgtccaagggctttggcctggccacccaggaaccctggatccagtttgccaccatccgagacaacatcctctttgggaagacatttgatgcacagctgtacaaggaggtgctagaagcctgcgccctcaatgatgacctcagtatcctgcctgctggagaccagacagaggtgggggagaagggtgtcacccttagcggaggacagcgtgcccggattgcccttgctcgtgctgtctaccaggaaaaggagctctatctcctcgatgaccctctggccgctgtggatgcagatgtggccaaccacctgctgcacaggtgcatcctgggcatgctgagctacaccacacggctgctctgcacccaccgcactgagtacctggagagggctgacgcggtgctgctgatggaggccgggcgcctcatccgggctggacctccctctgagattctgccactggtacaagctgtccccaaagcctgggctgagaatggacaagagtctgactcagccacagcccagtcagtacagaacccagagaaaacaaaggaggggctggaggaggagcagagcacatctggtcgcctgctgcaggaagaaagcaagaaggagggcgccgtggccttgcacgtgtaccaagcttactggaaggccgtgggccagggcttggccttagccatcctcttctctctgcttctcatgcaagccacgcggaacgctgctgactggtggctctcccactggatctctcagctgaaggctgagaatagctcccaggaggcgcaaccctccaccagcccagcttctatggggctcttctctccgcagctgctcctcttttcccctggaaacctctacatcccagtgttcccactgcccaaagctgcccccaatggctcctcagacatccgtttctacctcaccgtgtatgcgaccattgctggtgtaaattccctctgcacccttctccgggcagtgctctttgcagcaggcacccttcaagcagctgccactctgcatcgccgcctgctgcatcgagtccttatggcaccagtgactttcttcaatgccacacccacgggccggatcctaaaccgcttctcctctgatgtggcctgtgcggatgacagcctgcccttcatcctcaacatcctcctggccaacgcggcaggcctgctggggctcctggccgtgctgggctctggcctgccctggctgctgctcctgctgccgcctttgagcatcatgtactatcacgtgcagcgccactacagggcctcctcacgggagctgcggcgcctgggcagcctcaccctgtctccactgtatagccatctggccgataccttggctggcctctctgtgctccgggccacaggggccacctacaggtttgaggaggagaacctgcgactccttgagctaaaccagaggtgccagtttgccaccagtgccacaatgcagtggctggacattcggctacagctcatgggggcggcagtggtcagcgctatcgcaggcatcgctctggtgcagcaccagcagggcctcgctaacccagggctggtgggcttgtcgctgtcttatgccctgtccctgacgggcctgctctcgggcctggtgagcagcttcacacagacagaggccatgctggtgagcgtcgagcggctggaagagtacacctgtgacctgccccaggaaccccagggccagccactgcagctgggcaccggctggctgacccaggggggcgtggagttccaggacgtggtgttggcgtaccggccagggctgccgaatgccctggatggagtgaccttctgcgtgcagcctggagagaagttgggcatcgtgggccgcacaggctccggcaagtcttccctgttgttggtgctcttccggctgctagagcccagttcagggcgagtgctgctggacggcgtggacaccagccagctggagctggcccagctcagatcccagttggctatcatcccccaggagccctttttgttcagtgggactgttcgggaaaacctggacccccagggcctacataaggacagggccttgtggcaggccctgaagcagtgccacctgagtgaggtgattacatccatgggtggtctggatggtgagctgggtgaggggggccggagcttatctcttgggcagaggcagctgttgtgtttggccagggctctcctcacagatgccaagatcctgtgtatcgatgaggccacagcaagtgtggaccagaagacagaccagctgctccagcagaccatctgcaaacgctttgccaacaagacagtgctgaccattgcccataggctcaacacgatcctgaactcagaccgggtgctggtgctacaagcggggagagtggtagagctggactccccggccaccctgcgcaaccagccccactccctgttccagcagctgctgcagagcagccagcagggagtccctgcctcactcggaggtccctgagcccaatcccacaccctgcagagttctcccctctctctgatccaggccgggcctatacagaggtgctggctgcttgtttacattctcctctggggctctacctctccacacttccccagaagggaaaagggcaccctggattactctttggaaatcactccttggtgggcagcatcctgaggcttccccagaaccaggcctctgctctggccctcttgcatctggaacgccaggtgggtttttctggcataggagcccacttgcattttcatagttttatttgataaaattccatcttacattctgtgtattaaaaaaataatatttctggtgtaaaaaaaaaaaaaaaaaaaaaaaaaaaaaa

SEQ ID NO: 429 - DNA, 2488 bp, Homo sapiens
gagagagagaatgacgaggaggaggaggagggaagtgagatggcggaaaggaaaactgcttaaatgatttttaaagggccgcgatgggcctcttggaacattggtgtgttcatctgcattcgatgtgctggaatccacaggaatctgggggtgcacatatccagggtaaagtcagttaacctcgaccagtggactcaagaacagattcagtgcatgcaagagatgggaaatggaaaggcaaaccgactttatgaagcctatcttcctgagacctttcggcgacctcagatagacccagctgttgaaggatttattcgagacaaatatgagaagaagaaatacatggaccgaagtctggacatcaatgcctttaggaaagaaaaagatgacaagtggaaaagagggagcgaaccagttccagaaaaaaaattggaacctgttgtttttgagaaggtgaaaatgccacagaaaaaagaagacccacagctacctcggaaaagctccccgaaatccacagcgcctgtcatggatttgttgggccttgatgctcctgtggcctgctccattgcaaatagtaagaccagcaataccctagagaaggatttagatctgttggcctctgttccatccccttcttcttccggttccagaaaggttgtaggttccatgccaactgcagggagtgccggctctgttcctgaaaatctgaacctgtttccggagccagggagcaaatcagaagaaataggcaagaaacagctctctaaagactccattctttcactgtatggatcccagacgcctcaaatgcctactcaagcaatgttcatggctcccgctcagatggcatatcccacagcctaccccagcttccccggggttacacctcctaacagcataatggggagcatgatgcctccaccagtaggcatggttgctcagccaggagcttctgggatggttgcccccatggccatgcctgcaggctatatgggtggcatgcaggcatcaatgatgggtgtgccgaatggaatgatgaccacccagcaggctggctacatggcaggcatggcagctatgccccagactgtgtatggggtccagccagctcagcagctgcaatggaaccttactcagatgacccagcagatggctgggatgaacttctatggagccaatggcatgatgaactatggacagtcaatgagtggcggaaatggacaggcagcaaatcagactctcagtcctcagatgtggaaataaaaacaaaacacctgtatggctgccattctcttcagccctcgctctcccctttccacagcctccacccctgacccccatcctcttttcctacctctctgtttggtttagaaattgctcaataagtcatttggggtttggcatcctgcccagccacttcccaaacatgaagacctctctgttgctttatgttgtacatgccccatagccatcccaacgtcctccccagtcctctcctggcaccagcaccttagaagttgttggcagaaggcacttaaactgtgggagaagtgtgcacacctttgagtcccttccctcaaggttaaagctcctgtcagactctcagaagggtctgtgggtgttgtatattaggcaaacaggggaaagcttagaggtccttctatatgtgttaataagctgtttctaagtgtttaaatttgaaaagcatcatgttctcatgatttatgggaatgaagcaagtactgaaatcaaattaaatactccctgggtcctgggtcagtttgaccctagccctggggtgaggcaagccccctcctatgaggatgagcaaaaatactactctcttcgccctgagttgctttctggatctggggcttcaggacttgctgcttcagtcagcctttattagcaccaaagactttatgaagatcccacacacagacacacatcccttcccgcctcccccctgccttcagtaggatctggctccgtggctggaggaccaacccctatagtgggaatgcagagcttaacgtgtactgcttgtgtgtgtgcgtgagtgtgtgtgtgtgtatgagtgtgtgttccgcctcccaccctctccccatctgctctgggtatttttgtttttgtttagttttaggtttacaacagagaggaattaatttatcagcagcctaaaactgttgtgtttttcttatggtttaaaaaacgccatgtcattgataactccctttctcccttcccttctcccggtctgctgatcactctttcatgcctgtgtatccagggtgctctgtttccccaccgttcccaggtgtacgaggcagagggccgggacagctttcctctcagtcattgttcaccccacttgaaaattcagacaagaaaactttgcttaaaagatttcatgtgtgggaaccacagttcctggctgcctttctcctgtgtatgtgtaaattccttaataaatattgcagggaaggac

SEQ ID NO: 430 - DNA, 4726 bp, Homo sapiens
gcgtccggcccgcccgcaggccagcttctctcgggagcccccacccaggcgcatggctccatgaagcaagaggaggaggcagagcgcgagaggtcccgtccgccccagccgcgtctgggccaggagaaaaggtacaggaagaaggaatggaatcggaaggaagaaaattcattccagagacaaaatagctcccctcctctgttgtagctgttcctctggcaatacaaactttctgctttcaggttctgcagcattccagaccttgagcactgaatcaggatgggaaaaagacgttgtgttcctccactcgagcccaagttggcagcaggctgttgtggggtcaagaagcccaaattatctggaagtggaacgcacagtcacgggaatcagtccacaactgtccccggctctagttcaggacctcttcaaaaccaccagcatgtggacagcagcagtggacgggagaatgtgtcagacttaactctgggacctggaaactctcccatcacacgaatgaatcccgcatcgggagcgctgagccctcttccccggcctaatggaactgccaacaccactaagaatctggtggtgactgcagagatgtgctgctactgcttcgacgtactctactgtcacctctatggcttcccacagccacgacttcctagattcaccaatgacccctatccgctctttgtgacgtggaagacagggcgggacaagcggcttcgtggctgcattgggaccttctcagccatgaatcttcattcaggactcagggaatacacgttaaccagtgcacttaaggacagccgatttccccccctgacccgagaggagctgcctaaacttttctgctctgtctccctccttactaactttgaggatgccagtgattacctggactgggaggtaggggtccatgggattcgaattgaattcattaatgaaaaaggtgtcaaacgcacagccacatatttacctgaggttgctaaggaacaagactgggatcagatccagacaatagactccttgctcaggaaaggtggctttaaagctccaattaccagtgaattcagaaaaacgatcaaactcaccaggtaccgaagtgagaaggtgacaatcagttacgcagagtatattgcttcccgacagcactgtttccagaacggcactcttcatgccccgcccctctacaatcattactcctgacacacggctgcatgaccagtcccacccccccgtggccaccaatggctatgacatcattggagcagatgcctcctcttcctggtccagttacttctattactgcaccattttatgatgctagcttccgttgccaagtctgcctcccgctgactgagggagggtagggttaccttgaacgaaacagaacttgaggggcccaagccttatctcagcctttcctcaatatggggttccgttggattggggctcctccatgactagtgggaattactgtgggttcagaagacccttgtctggtatttgccacatggggtattggccacacgctggaagctgaaattgatgatccctgaaggttgaacccacacacacccctgcagcctccccagatgaagtaggtgtattcccctggcagtctgggcaacggagaccaagaaacatttttaggttgttttaaattcctttttttaaacttccagtttattgcgtaccaagagttgattacaacctccatgcttcataagcggacgccacgttagggttggacgtgggcaccacgagtcctttgaggctcctggacagagacccacatcaagatcggaagccctttgggtggcgttgcagatctcattgctcagtaggccgtgaagattttcatcctcatcccactctcagttggattttctggcactcttcctgcattgagtctcctgattactgaacagagctccgtcatgtagcctgctgaggaatggaatggaatggagatgcccacaggaggtcctgatgtcatcactgcacgcaggtgtgagaggagagacctcttctgcaccgcctggctacctcactcctctgctggtagcagtgcctatagctggacctaagttctcagaagcgtagatgtgcaaacaagcgattgagttgggctttaggaggacacatcataggagagaatccagggtctgtaagctggttttcttttcaggtgacatcctgaggggcctgtaagcaggggagctcctttttctagtttgcctgtagaggtgggaagactgttggtgtttctgtcctttacaggacattaggaaacagttgtgtaattacacaaggtggacctttatcttgcctgacatgctgggaatcttcaccccaccagggcaaatttccaaatagctcattttattctaggtctttcaaactttcatgtgacatatttccctttcccattgttgctgatttccaaatcgctgtcagcaattttttcctctctccttgcctattcttcactcatttggtggcaaagttcatagaactaggggacttggaagatgctttgaaaatattgttacaaaggcactgctaaaatgattcacagggagagtggccagttggaagaaggatcctaaggatgtgacactggttttcaacaacatgcttagagaactcatgaagtggattgggtgtcaacccagtgaacatgtttttatttaatttattttttgaagtttatgtggtgatggtgtggctttccgaaatgggcaaatattcagaagatcttttgcattttcttctgtcaggaatggggaaggggagtgggggcacaatctgagaaaggacacctgtgctgttctaggcatcgctggcaagtttgtgggaagggatgggcaagggtgagtgggtttgctccacaccgtcctgtgctgctcgagaggacctgggacgtgcgagggaaacgtgggtgacggtgcctaggctgcggcccttcactgctgtgctgggttcctgcagcctgctacgtttcccttggcaatgtaaatgaagatggaggggtcgtttcgtgatttcctgctgctgagaataaatgtcttgttaaaaacgtggcaacggttactcttaggtgccatggatcgatgtcagggtggtcagctctggactaagccacccacctccaatttgtacaacagtattgatacatagggctacactcattactgttcaagtgttctatgttaagagttgtgtttaatttctaaagattaaaaaaagcaaaaaaattggtgctaaaccttcacccctgagcacgctcagtgagactggtcatgcaagcatttacagtgccatgctcctcaagccgattttttcttgtagaaatgttgccctatttgtcttctccaatgtatggtatgttattttattttattattttattttattttattttattttatcgagggggggtacgatacctgccatttaagaaaatgaatagaaaattttaaaacccgagaaatggggaaaaaaaaatcagtgcacaagaattgggctggttaggcccagcaccacactgaagtgggctcagtggtttttggagtgaagaagccttactccctgcacattccctcatgctcccacacaagtccagcaatggaaatgcttgggttcctcttgctttgtcaggggactcaggagtcgaccaagggaaaccatttggccccgtgaggaatgggcattgtcagtatccgtcctgaacggggcctagtcaggaagcggtctagaagtgtacggtcacggtcgcctcatgaaagtgtgtagcaggtggctctcaggaaaaataccaagtctggatcatccatgtggcagctttgcatagggagaggatagctccgaactggaactgaactgccttctctgcacgcttgaccaaagcagtgatgagggcggccagtacctgcggtgtgcgtggtaggtttaaagaaaagggaatgttttctgctgagtgtttcctttgtccttgggctgctcgagctggacagtaggtaaccactgttttcaaggaccagcccaatttctctggcttggttcggagttcgtttcatccctagctgtgagtgccttttggtctggaaagttggcttgtctcataatacccacagctaggacattctctctgtaattatgaattgtccttgttttacattaaaagagaatgtctttgatcactagagtctgtcggtgttggattatttccactgtgagattcttaaaacttttttgcttcataataataaaacaactcatgttagagaccctttcaacatgaaaggtttgtagttgagacattacatatattttattgtttataataaaaatcatctatacaaaagaagtcctgggtgttaatattttgcacaagatctgttttccatgatgtgttgacatctacaatttcactaactgttgacgttattttctattgagattctggagcctagggagctatgtgttctttttgttcatttcgttcttacttccctgaagcaagagactatatggccttcagtgcaaagacttcagaccaattctttgtattacacttggttgcctcttggctatataacttctgagtgcaaatcattgaacactttaacgaagtattgtagagaataaatcataatggataaaaaaaaaaaaaaaaaaaaaaaaaaaaaaaaaaaaaaaaaaaaaaaaaaaaaaa

SEQ ID NO: 431 - DNA, 8331 bp, Homo sapiens
gacattcgggccgcggcggccgctgggtgcagccgagcggtgtggagcggagagaatactcgaagggctctcctgatactaacagttttacgatttaaaacttcgccagaatttcgacagggtctcactgtattgcccaggttggtctcgaactcctggcttcaagcgattctcccacctcagcctcccaaagtgctgggattacaggcgtgagccaccacgcctggcctcactcaaacagtaaacgaggtatgtgacgcattcccagactcttcagccaactgagcatcagcttcttcacagcaattgggtcctgattaatgtcctcccaagacagacttcattggatccacgatcaagaggactctgccaggtttttctgacccctctacattgctataaagtgccaaggccttaagacttgggtacgtgtgttacaacggcaagagtgccagcgccaacaaaagacccattggacctgtcagctcctctgtttcaccaagcagacacaataaccttaccaacaaagcagagtaagccaagtgcctctgtgtgacaccaccagcagctgatgacgcataagaaaaatataactaatttagactagagccctatctcttcttgagaagctgggatttgaaggagctatcctgagatctgtactgctatcactgtatatatgccttatttcctgggtccatgggaagcatgagtctgttgggacttgggacaagaagaaaacaagacatcttcacaaggaaaaccaagtactaaaaaaagtatcctcccaactctgaagagatagaacacaaacatggccgacagtggacttagggaacctcaagaggactctcaaaaggatttggaaaatgatccatcagtaaattctcaggcgcaggagaccacaatcatagcaagtaatgctgaagaagctgagatcctacactctgcctgtggtcttagcaaagaccaccaagaggtagagacagaaggtccagaaagtgcagatacaggtgataaatcagaaagtccagatgaagcaaatgtggggaaacatccaaaggataaaacagaagatgagaacaagcagagttttctggatggcggaaaagggcatcacctcccttcagaaaatctgggtaaagaacccttggatccagatcccagccattctccaagtgacaaggtaggaagagcagatgcacacttagggagcagctctgtggccctccctaaggaagcgagtgacggaactggagcatctcaggaaccacctactacagactcccaggaggcccagagtcctggtcattccagtgcagggcaagagggtgaggatacactgaggaggcgactgctggccccagaggctggaagtcatccacaacaaacacaaaaattggaagaaattaaagagaatgcacaggacaccatgagacagattaataaaaagggtttttggagctatggccctgtgattcttgtcgtcctggttgtggctgttgtggcaagttctgtgaatagctactattcctctccagcccagcaagtgcccaaaaatccagctttggaggcctttttggcccagtttagccaattggaagataaatttccaggccagagttccttcctgtggcagagaggacggaagtttctccagaagcacctcaatgcttccaaccccactgagccagccaccatcatatttacagcagctcgggagggaagagagaccctgaagtgcctgagccaccatgttgcagatgcctacacctcttcccagaaagtctctcccattcagattgatggggctggaaggacctggcaggacagtgacacggtcaagctgttggttgacctggagctgagctatgggtttgagaatggccagaaggctgctgtggtacaccacttcgaatccttccctgccggctccactttgatcttctataagtattgtgatcatgagaatgctgcctttaaagatgtggccctggtcctgactgttctgctagaggaggaaacattagaagcaagtgtaggcccaagggaaacggaagaaaaagtgagagacttactctgggccaagtttaccaactctgacactcccacctccttcaaccacatggactcagacaaattgagtgggctgtggagccgaatttcacacctggtactgccagtccagccagtgagtagcatagaagaacaggggtgccttttctaaagctaagcacagagttggttacagaaggtatatgtttatgaaaaagtttgtttaaagaccttccatttatatggaaggaggttgataaaatagcttgaggaaatagcctgaaaaacaaagatgagcttattttagaaacaagtttttattttttattccttgtaaaatctttctaatctaagccttgacaaagctaaaaattaacctgactttttttctttggaccaaatcaggtttgaaatatcgatgatatatatgagaattttttttaaattctaaaatatagcaacattgcacaggaagatactcttacttcttagagtaactacagagtgattttttttttttcttgagtgagactctgaagaaccttttcgataatgtttggacttggactaaagcaattagaattatgaagcaatgataacctttagaaaatttttctatcacatgttgaatattttcaaaccttactttaataatctaaagttacgggattatatcttatattaattttgcagttttgagtagtatgataaaagaaataagaattcaaaccattaagtacctacctaaatactacatgtaaggcactgtgcttttatttcattcagctgaggtataagcagctgtactcaaatgttcttaaaaatgagaaccagtggggaaattgtttataatcattggaaatgaagaaattccaattggctatatctttacttcagcttttcttgaacaatttacagcattgattttcaaactgtgtctactggcacccttcccctttgtatcagagcagttctgcttttaactgttttatatgttggggttctctatgagatttcattggaacaaagagtttcactgatattcgagtttgaaaaccattgattaagtgaaaaaacatcttagaagataggaaatatgtttaaaaaatgaatgtattaaatcttatgagtaggaagatgaaatacaggtttattgtatagatacattatttatgaaggataaagatctatacatgaacagcagaatgtataagctagcatttactagcatgtctctgatgcttttgttcatttctgttaatcgtcatttctgtcccctctgcatggaattttatacttgtctagggtaagagtttgtagactctttcagcagaacagattttaataaccaatttatttgttttattttaaaaatttatttttgaataaccaatttaatagtaaattttatatgaacatttggcataactttaccagtttatttctatgcagtgatggaacattatgtaatgcagctcatttcttgaccaactagttatagaagtaccattaggttaaaaattagagaaatctaagagatgttatacttagtgagaggaagcagaaatggtgggtagattctcagaggttttgatgttcagtactgacggaccatgttctgtgattgtaagaaagattgaaaacagtttgtatggagatagagttgattagcatttgagctctgaaagcagaactctagtaaaatgatctcgacctaacaaagggtctgttccattatatagactattaccataatcctggattatttcaactgggttttggcctctccattatatgagatcatatgtatatagctaagaagtctgattaaagtatggaaagattttaggaaacactaagaagatacagggatctttactgatacctaaaaagattacaattgagtaattgctcaattgagtgtaggggcatacctgaaggaagaatttgcatttgggacttcgaaggaagcttccaagagatttgggaagagacctgaacaaaaagttaaagcatggtgaatgtgatatcactgtcaatccagtataaaagcagaggaagttgaaggaaaatctgtatcccatatgcacattttttctgtctttttagatcttagatgctagcgttacatccacaaaaccagtgttgccttgtataactattatattggcctgctgacctgtgctacctcagatctgtcaaggaaccagtatgtcgcatattcttgtttcttcattcagttgaatatggtttttcatcatttctcttcaaaataatttagaaaaataaatttctaaagtcataatttttaatttagcctttttaaaaacattttcccttccatgtatagtgcaatcaattgagggtgttgtcagttttctgtctgctatttcaaaagtcttttttttttttttttttttttgagatggagtctcactctgactcccaggctgcagtgctgtggcttgatcatagctcactgtagctttaaactcctgggctcaagcaatcctcccaccttagcctcctgagtagccgggactacaagtgcagactaccacaccactctaccacactattttgtatagagacagggtcttactgtgttgcctaggctggtcttgaactcctggcctcaagtgatcctcccacctcagcgtcccaaagtgtttggattacagatgtgacccaatgcacccaaccaaacttcttttttttttttttttttttttgagagaaggtcttgctctgtcacccaggctggaatgcagtgcagtggcacaatctcatctcactgtaacctacacctcctgggttcaagtgattcttgtgcctcagcctcccaagtagctgggattacaggcatgcaccacaatgcccagctaattattgtatttttaatagagacgaggttttgctatgttgtccaggttggtctcgaactcctggcctcaattgatccgcctgccttggtctttcaaagtgctaggattataggcacgagccactgcacctggcctcaaaaatcatttttaaaagaagcagtatattagctctgggtcttctcatgactaaaatgactatttttaaacataagaccatattttataaatgtacagataattcaaatctattatctaatgtattaggttaatttctatttgttctatacttttttttttttttttttttttgagatggagtcttgctctgttgcccaggctggagtgcagtggtgcaatcttggctcactgcaagctccgcctcctgggttcatgccattctcctgcctcggccttccaagtagctgggactacaggtgcccgccccgacacctggctaatttttaaaaaaatatttttagtagagacagggtttcaccgtgttagccaggatggtctcgatctcctgacctcgtgatccgcccgctttggcctcccaaagtgctgggattacaggcgtgagccaccgcacccggcctattgacattttttaaggtttcagattttcttttgtgtgtctagtaattcgtcttttattgtcaaagataatttgcttatttgacttagaaaaatgatttgtgggcatacaatattgtatgtggtacctaaacgttgccatttagttactcttacagaacaactttcattacactgtatattaatataaattacttcttgagtaatcccagaattgtagaaccaattggtagaatcagaaactgtctttggacttgaggtttttcttcccttagggtaaattttaggttttctggttagtttccaggagttggcggacaagttcatatcactaaaggtgttcatatcactaaaatagtaatgctaatttgtttcatatttctattttaaaaagcaatcaataaagacatttcaatacatttcatttggaagcccccaagtgtatggtggttaataaggctcagcatgctggtaacccaccattctcttagctagtgactccactaaatagtgctagccgctgagatggttttgaccctttaacagcctttttttttttttgagacagagtttcactcttgttatccaggctggggtgcaatggtgcgatatctcggctcactgcaaccactgcctcccaggttcaagcgattctcctgcctcagcctgccaagtagctggattacaggcacgtgccatcacgcccagctaatttttgtatttttggtagagacggggtttccccacgttgaccaggctggtctcgaactcctcacctcaagtgatccacccgcctcggcctcccaaagtgctgggattacaggcgtgagccaccgcgactggcctacacagcttttaattgcttgatttatactttattaaagagaggaagcacaatgagcagtgatactaaaatataactaatatggcatgtgaaagtgatcattattcagatgatcttcaccaacactgcatttgcatatatctgaccaaactttatgcgacataggcaggtctctggcacttcaaaaatgaatgttaaatagaaaataataaataatagctgattagggtaatcatttatttaatcagaataaagattatatccataaaatttacttgcagagaagtactttctttttgttttaaagacagggtctcactctgtcacccaagctatggtgcagtggcacaatcacagctcactgcagcctggacctcctggcctcaaggggatgatcctcctacttcaggaattatgccaccatgcccggctagttgagaagtactttcaaatagcaacatgaagcctttcctttaccatttgaaaataaaacatagttgtaaacataaaccagtatgtctttgtaaagccaataatatatcattttataggagcattgtcttcttgtgtttttcaagttgactatgtagttcaatgtcagtctccattttaatatcttgtttgtttatcagcctgagcatatttcattttaaaatgtatttgttgagaagtcatggtggttttttgtttttcacaagtcaagtagcttgaacactatcacttgtccaatgggaaagttgatgcttatctttatggcaaatgcttggttgaataatatatttgcaaagatgttaattctacagagagctaaataaagttaagatacctgtaaaacagtttctccagatgactttaaaataagccttatttttgtaaatttatgttaaattttaggtgttaagttgtgaaatacctaatgatgtgggcctaaatttgcctcattcagactgagacagggctgttaaaattcatttctagctaataaactgtgctataacttctttattattattattattattattattatagtttaagttctgggatacatgtggagaacatgcaggtttgttaacataggtatacacgtgccatggtggtttgctgcacccatcaacccgtcatctacattaggtatttctcctaatgctatccctcccccagccccccaccccctgacaggccccagtgtgtgatgttccctgccctgtgtccaagtgttttctttgttcaattcccacctatgagtgagaacatgcgatgtttggtaaactgtgctataacttctgtatctctataggccaatccaaatggcctgagaacataatcagtatcccctaatctgcaaaaaggtaaataccttagtcttcagtacctttccttccagtattatctgcattatctgtgcccgcttgctgtgatgtcttgaaaagcccataaattggttcttattttggcaaatggtctcctgcttttcctcactgaggcttataaactaaatttgcctttggctaagcgcagttacatgaaccaaaaagaacattttagacttgggaagcaacaggctgagtcacattgtatggggcagagttggccaagcccccggcagtcacagccctactctctgtgttccttctaggcctgaggacgcatcaacacaaagctccaggcagttgctcctggttcatcagagagcacaggaaatttaaatctatttgcctttcctgtcataaaagaaacagcacactgactttcaaactcaattgcattttgcttatttgtgcttaacaaaaaatatgtgtgctttgccaatactaacgtcccacttctctgcactccctttctgtataacagggattgcttttgtatttgtttcttatagatgctgatgatgtgccttattcagattagttggccattaccagaataaagaataaatctgaatttttttca

SEQ ID NO: 432 - DNA, 5105 bp, Homo sapiens
gtcgggaagtaggcggggtgacgtgtggttgacgagctcggcggcgggtttgctgagatctgtggccggcggcagctggtgcggggggcagctgagagcgagaggtggatcggggcggtgtgtggccagggccatgacgggcaatgccggggagtggtgcctcatggaaagcgaccccggggtcttcaccgagctcattaaaggattcggttgccgaggagcccaagtagaagaaatatggagtttagagcctgagaattttgaaaaattaaagccagttcatgggttaatttttcttttcaagtggcagccaggagaagaaccagcaggctctgtggttcaggactcccgacttgacacgatattttttgctaagcaggtaattaataatgcttgtgctactcaagccatagtgagtgtgttactgaactgtacccaccaggatgtccatttaggcgagacattatcagagtttaaagaattttcacaaagttttgatgcagctatgaaaggcttggcactgagcaattcagatgtgattcgacaagtacacaacagtttcgccagacagcaaatgtttgaatttgatacgaagacatcagcaaaagaagaagatgcttttcactttgtcagttatgttcctgttaatgggagactgtatgaattagatggattaagagaaggaccgattgatttaggtgcatgcaatcaagatgattggatcagtgcagtaaggcctgtcatagaaaaaaggatacaaaagtacagtgaaggtgaaattcgatttaatttaatggccattgtgtctgacagaaaaatgatatatgagcagaagatagcagagttacaaagacaacttgcagaggaacccatggatacagatcaaggtaatagtatgttaagtgctattcagtcagaagttgccaaaaatcagatgcttattgaagaagaagtacagaaattaaaaagatacaagattgagaatatcagaaggaagcataattatctgcctttcattatggaattgttaaagactttagcagaacaccagcagttaataccactagtagaaaaggcaaaagaaaaacagaacgcaaagaaagctcaggaaaccaaatgaagatgttttcagatatgtacacatttctgcttctgcacatattttcatggaaaccattatgtataaagaacttagagcaacatcctaattggctcagtgcacgtttggcaatagtgccagcctgtcttgtctttaatgcatggattcataaacttcttccctacctgcatcatgtgcatgtagtgcatattaaatgaaagtgatattaagaatgctttcccaaattccattatttgacattgagtctgacaactgttagttttctggttgtctaactaccatatgaagctagaaaatgcacaaacgatattccttatctgtaatttaaatacttaaaatttgcaattgtcagatcttgattaaactggttgtcttatttcttctcatcattaacggaaaaaaaatcagtatttctatctttgatatctaagtgttttgaggattttaaaactgaattttatctgctataccagttatttgagaaagtatgattttaatgtaaatcatttaaaaaggacaaaagtataatttccagtgattttcactgctgtcagtagaaaagtaataaacatctcaattttattttagtaaattttcttcaagtgtttggggttatttgtttatgtattagagaattgtttcaggaaggtctgagtattatgcttcaaagcaaaatttcaggttaagaagaaattgtaaatcttaaagaatgttggtgttactctcaatggaatattgtttcaagcttgtaagctgtgtataaaaaaactggaggtctgacagttcatgttatctgcttttttaaaaagatggtagtggtgatgggggtctttctatgccaatttgaataaatttcgtacagcctgcagttttcaagagccatatgtaatttgctcacaattgatttttaaaaattgatttgggagttgctttgtaataatcttctgcttctaatcttcctttgcaagtcagactttaaagaagactttataaagctttcttttttaaaggaagtaacctacttttttctttatcaagaatatttctgaggttgatacatgactttaacattttattatttattgtaaaatcaatttagcataatttattttattagggagaatgtgtacccatcttccagcttcagcacatttttaaggattgtttttaagcttagtaattgtggtattaaatgacttagaactaatggagaaaaacctgataggaaattgatagaaaaacgaatgaaatatttttcatacataatttcagttggaggtaatggaaaatatgtagtctctcagttatttgtgggtaaatatgttttgctgttgatacagtaataattatggagtgttttcaaagccatgatataatttttaaaaatagatttttaaggaaggctcatcttgatctcattcgtttatttcagcttaatttatatattctttcctattgaggcttaaattttgttaagcaatgtgaggattattgtggtaagttgtatttagtaatcaatacagtgtgatactggcactaggattgacaaataaagcaatggaacagaagagagagcctgaaaacagatcaacgtttatatgatcacttgatttcgacaaaggtggcaaaacaattcaacagagaaggaaagtcttttcaacaaatggagccagaatagaatagctgaatatccatatagaaaaaagtgaacaatgaccccctacctcacaaaaatgactttgagatgaatcatagacctaaatgtaatattttaaaagtatgaagctttttaactgaaaacagatgatatttttgtgacttggggggttagccaaaggtttcttaggtcacagaaagcagtaaccataaaagatccaaaattagagctcatcagaattgtcattgaaagtgttaacaaaagtaatatcaaatgacatttgaaaaatatccttgtaaaatgactatattaataggtataaggatttttcttattaatctaataaaattccttaataggaatttccatagcttaagagtggtttattttatctgcatcttctttggtgattgcaaatcccttgtgatacttcatgattacttctgtctgtgaataaagaagtgtgacttgtctgggtgctatatgttgctggtttgaaattaagtcatgaagctagagggtagagaaaatggaagaataaagagcaacccataaatagataaatgctatttggaaagttttttttaaatgatattttatagaaaatcttgctcatttcatatttagtcttttctaaaattttatttaattattgggtaggtgaagtcgcttccattctattttaagccttcaaaatagccaattctaagggatgtacttctgttattatcaacaaaaaccttgccaacagctgcggcactggctactctcaccttatatgtttagttcccaagatagcttgcccttttccgaacagcagtcagctcgactgtgccactaaaacagacaaatatttgctcgggaatcacaaccacggggacttgctcccccagttaggaccatggtacatatttgtgtgtatattatggtgttacatgcagattaatactttcaattaatcctcctagttgcctgtaacgttaacatttcaagatgcatttagatatttttatcctgtaggaggattttgtttatttgagggaaaaaaagggcttttaatgtattctcctcaaaaaccatttagagaaaacagataagtaaaaataaaatttaaattaccatatttctatttacagggatgagcacattaacattttatgtatttagtgatcctttttcctcatgtgtacacatatgtttttgtgtgttagtcttgcttgccctccccatagtctgaaatagttctatgaagtttatattatttttaaacttgatcatatacaaattttcaggaaacaaaccactctagctatttgaagaggaatgcagatttatattgggagttttgaaactacatagtttcttacaaaatcattggaaggtttggaggagcggtttcaagcttaagtctccagagattactcccatccaaacatacagtattggtgtacctagggaactgctcacttttgcaacagtcagggagttcactgttggaactattaatgttagaacatgttgcagtagttgtgttcaaggaatgaggaacctgctgtaacacttaatgactgtgcactggaatgcagaaaagttaaaccttctatgcctaaatgcctaaaacagacaaactggatagttatatttttagaatgatactgcgttttttagagtagtatgaattcctagatcagtcaaacatgcatgttatttagtttgttctttagtatattgttaactggcctaaatccaatgactgacatggtaaagattcaccacttctagcatactgggcactttttatttttgacttgattacattaactttttgaaaactattcagtgatttattcagccaatcttatgaggtacatctgagttgttctagatgctagaggatagtataacaggaaaaagcccctgctctcatggtgagacagataataagtatgtaatacaacttttcaaatagtagtatgaatggtaaaaaaaatagggaaaaggggtgggaggagctgaggtttgatagaatggtcatggaagatcccattaatgagatgtactttaagtagagacctaaatgaagataattttttctctagtactgaactagcactgtacaagtggattgcatataggcatataggcagaacttctctagtactgaactaacactgtacaagtggattgcatataggcatataggcagaaccaatgtgcaataattaagaatattaatttgcaatcatgtttgatggttaaatggtttattaatgttggagtgtcaatatgaaaatgggttgaataaaagatatatggaaatgcctagga

SEQ ID NO: 433 - DNA, 4206 bp, Homo sapiens
aacaagggaggtgctgcagttggcggtcgggctagagaagagaggcgcctgcgcttgcgagctgggcttgtgagtggggctgccgagagggcaggcgtggggcgaggccaaaggactgaacccgcaggagcgtcacgggcgccggggcggctgccgacggcgggactgggttttctatcagatgttccacgtaataatgctggagttaagaagtttccattattttgctccaaaccagaagactctgttccctgtatatagaataggagtaatatttgaaaacaactggctgatgtttaaaactgaagattgtcatgattgtttatcctaatcccaatgctgaagtaagattgtcttggaaatactaagttggccatggctctaaaaggacaagaagattatatttatcttttcaaggattcaacacatccagtggattttctggatgcattcagaacattttacttggatggattatttactgatattactcttcagtgtccttcaggcataattttccattgtcaccgagccgttttagctgcttgcagcaattattttaaggcaatgttcacagctgacatgaaagaaaaatttaaaaataaaataaaactctctggcatccaccatgatattctggaaggccttgtaaattatgcatacacttcccaaattgaaataactaaaagaaatgttcaaagcctgcttgaggcagcggatctgctacagttcctttcagtaaagaaggcttgtgagcggtttttggtaaggcacttggatattgataattgtattggaatgcactcctttgcagaatttcatgtgtgtccagaactagagaaggaatctcgaagaattctatgttcaaagtttaaggaagtgtggcaacaagaagaatttctggaaatcagccttgaaaagtttctctttatcttgtccagaaagaatctcagtgtttggaaagaagaagctatcatagagccagttattaagtggactgctcatgatgtagaaaatcgaattgaatgcctctataatctactgagctatatcaacattgatatagatccagtgtacttaaaaacagccttaggccttcaaagaagctgcctgctcaccgaaaataagatccgctccctaatatacaatgccttgaatcccatgcataaagagatttcccagaggtccacagccacaatgtatataattggaggctattactggcatcctttatcagaggttcacatatgggatcctttgacaaatgtttggattcagggagcagaaataccagattataccagggagagctatggtgttacatgtttaggacccaacatttatgtaactgggggctacaggacggataacatagaagctcttgacacagtgtggatctataacagtgaaagtgatgaatggacagaaggtttgccaatgctcaatgccaggtattaccactgtgcagtcaccttgggtggctgtgtctatgctttaggtggttacagaaaaggggctccagcagaagaggctgagttctatgatcctttaaaagagaaatggattcctattgcaaacatgattaaaggtgtgggaaatgctactgcctgtgtcttacatgatgttatctacgtcattggtggccactgtggctacagaggaagctgcacctatgacaaagttcagagctacaattccgatatcaacgaatggagcctcatcacctccagtccacatccagaatatggattgtgctcagttccgtttgaaaataagctctatctagtcggcggacaaactacaatcacagaatgctatgaccctgaacaaaatgaatggagagagatagctcccatgatggaaaggaggatggagtgcggtgccgtcatcatgaatggatgtatttatgtcactggaggatactcctactcaaagggaacgtatcttcagagcattgagaaatatgatccagatcttaataagtgggaaatagtgggtaatcttcccagtgccatgcggtctcatgggtgtgtttgtgtgtataatgtctaattgaatctgcagaaatgaccaagcaatcacttttttggagtatagttttataaaaaaagaatgcagggtttgaagttccttacctgataattgtgtctggcacatgataggggatcagtaaattgtaattcctaaccctactgtactcccaaacatggtgattcatggtcaagaaaaatcttatatatatatatatatacacacacacatatatgtgttcatatatatgtatacatatatatgtgtatatatacgtatgtatacatatatgtgtatatatacgtatgtatgtatacatatgtgtatatatagtatgtatgtatacatgtatgtgtatatatacgtatgtatgtatacatatatgtgtatacatatatatgtgtgtatatatatacacatatatacgtatatatgtgtatatatatacacagttgaatcagtgggattaatacctataatctctggttttcaaaggtaatatagaatatttgacacttggtaaaaggtgaactacctttgtagtgaatcttttcctcttggtagcatcaacactggggataaatcagaaccattctgtggaatgaaatgtttctcaagagcctataatatagtagatagtgcatattaagatgtctggctgggcatggtggctcatgcctgtaatcccagcactttgggaggctgaggcgggaggatcacttgagcctagaagttggagactaacctggcgagaccctgtctcaaaaaaaaaaaaaaatcaatttagctagcaggaatttgacatttaaagagggaatcttctctacctctacaaaatcaacccttaacacttttttcaccttcagaattatttagaatgtggatttactttgtctagttttttcctttatagtgtaatttattgttactctctatttactgactaccagagatatacaaaatactgtgcaaaagattgttactgttcaaagagcttacaaactaaatttaaaagaatagcaagtctgaaaaatagaagatagtcaaatatttgtttatgctaagaactgtttttaattttcagctttgatgtaaattgctagcttagttgtctttagttcaagcatgttaggaaatcctctttattcttaaatatagatacatgtctgcatatatgattgaattttagagccagaaagcatgtagagcagttgtgattagtagaaaatacactgacaagaagatatttgcatttatttcccaaagctgccagtaactagattttgtgacttaagtcatttaacctctccttgattagagcttcctgagccatgcacactggcactgcaaatcacagacaggcctagatacagatcccctcaccccttgctacatccaaaggtggcctgggtggctggagcctctgggccagaaccacctttgtccattttcctcagtgtgcctacagcatcgctttccatgtgtgccataacttgggaatagttgggatgtgttgcttaactcctttacaccattagttatctgtgagaccatctattccacactcttcattttttaaaaagagacaataattatttttaactcactgaagtttaaaactacctagcatttctgattaaaaaaaatttagaaggaaaattttaatgcatttatttcagatggcgttttaaatagatacaaccctttggaaacacaatatggtactacatagcaagggctgtaaaaatgaccatatcctttgccccataaattctacttctatacttttaaccttaaaaataattcagaaaaaagataaatgcatgaagacatttatgtctgcattctttataataacaaaaattggggaaaaaaactccatgtcaagaaagtgggataagaaaaatagtgaagtattatactgccattaaaataattatttggaagactgtagaaacgtggacatgtttgatatggtaagtaaaatgagcacaatacaaaatagtatgcatactatgattgtgactttgtaaaatctttatgcatgtggaaggtaatctgcaaaacaaattcattgtgttagtgtagcgggatatggaatgactttatttatttaaatcttttctttaatattactttgtattttcaataaaaataaatcactgtacatagtaa

SEQ ID NO: 434 - DNA, 3162 bp, Homo sapiens
agcgtccccggggagggcggactgaagccacctcaccattcatcgcccctggaccccgcagtccccctcggactcagggccagagccttctgcgaagcaacctagccccagggaaacggtagcggccgcagaagccccgctctctgtaacggccgcggaggagcagcaagcctccctgtgagtcggtgggagacaagacggagcggcgtcgtcgctcccaccttccgctgccgcctggagggaagccggagcgacgggggtcacggcggcggtcagagggtaaaggtcttgctcccagcagcctccgcggtggatacgtcgccatcttggatccgcgggacaagaaaattcatgcgagggagacgtggtgggcggtccttcctgtgacacgacccttgagtgacagttctatttgattgcctccggtactgtgaggaaaggacacgactctatggtgaggactgatggacatacattatctgagaaaagaaactaccaggtgacaaacagcatgtttggtgcttcaagaaagaagtttgtagagggggtcgacagtgactaccatgacgaaaacatgtactacagccagtcttctatgtttccacatcggtcagaaaaagatatgctggcatcaccatctacatcaggtcagctgtctcagtttggggcaagtttatacgggcaacaaagtgcactaggccttccaatgagggggatgagcaacaatacccctcagttaaatcgcagcttatcacaaggcactcagttaccgagccacgtcacgccaacaacaggggtaccaacaatgtcacttcacacgcctccatctccaagcaggggtattttgcctatgaatcctaggaatatgatgaaccactcccaggttggtcagggcattggaattcctagcaggacaaatagcatgagcagttcagggttaggtagccccaacagaagctcgccaagcataatatgtatgccaaagcagcagccttctcgacagccttttactgtgaacagtatgtctggatttggaatgaacaggaatcaggcatttggaatgaataactccttatcaagtaacatttttaatggaacagacggaagtgaaaatgtgacaggattggacctttcagatttcccagcattagcagaccgaaacaggagggaaggaagtggtaacccaactccattaataaaccccttggctggaagagctccttatgttggaatggtaacaaaaccagcaaatgaacaatcccaggacttctcaatacacaatgaagattttccagcattaccaggctccagctataaagatccaacatcaagtaatgatgacagtaaatctaatttgaatacatctggcaagacaacttcaagtacagatggacccaaattccctggagataaaagttcaacaacacaaaataataaccagcagaaaaaagggatccaggtgttacctgatggtcgggttactaacattcctcaagggatggtgacggaccaatttggaatgattggcctgttaacatttatcagggcagcagagacagacccaggaatggtacatcttgcattaggaagtgacttaacaacattaggcctcaatctgaactctcctgaaaatctctaccccaaatttgcgtcaccctgggcatcttcaccttgtcgacctcaagacatagacttccatgttccatctgagtacttaacgaacattcacattagggataagctggctgcaataaaacttggccgatatggtgaagaccttctcttctatctctattacatgaatggaggagacgtattacaacttttagctgcagtggagctttttaaccgtgattggagataccacaaagaagaacgagtatggattaccagggcaccaggcatggagccaacaatgaaaaccaatacctatgagaggggaacatattacttctttgactgtcttaactggaggaaagtagctaaggagttccatctggaatatgacaaattagaagaacggcctcacctgccatccaccttcaactacaaccctgctcagcaagccttctaaaaaaaaaaaaaaaaaaaaaaaaagacttcccttttcttggggtatggctgtctcagcacaatactcaacataactgcagaactgatgtggctcaggcaccctggttttaattccttgaggatctggcaattggcttacgcaaaaggtcaccatttgaggtcctgccttactaattatgtgctgcccaacaactaaatttgtaatttgtttttctctagtttgagcagggtctgaattttttcatttatttccttttttgccagcagacagacttgagtctgtaaagacaagcaaatacactgacagaagtttaccatagtttctaaaatgtaaaaaagaaaacccccaaaagactcaagaaaattagaccacaaattttgcattgttcattgtagcactattggtaataaaataacaaatgtttgtgcatttttatgtgaagatccttctcgtatttcatttggaaagatgagcaagaggtctgcttccttcattttacttccccttctgtttttgaaaggcagtttcgccaagcttaatgcaagaatatctgactgtttagaagaaagatattgccacaatctctggatggttttccagggttgtgttattactgagcttcatctttccagaatgagcaaaacactgtccagtctttgttacgattttgtaataaatgtgtacattttttttaaatttttggacatcacatgaataaaggtatgtatgtacgaatgtgtatatattatatatatgacatctattttggaaaatgtttgccctgctgtacctcatttttaggaggtgtgcatggatgcaatatatgaaaatgggacattctggaactgctggtcaggggactttgtcgccctgtgcactaaaagggccagattttcagcagccaaggacatccatacccaagtgaatgtgatgggacttaaaagaagtgaactgagacaattcactctggctgtttgaacagcagcgtttcataggaagagaaaaaaagatcaatcttgtattttctgaccacataaaggcttcttctctttgtaataaagtagaaaagctctcctcaaaaaaaaaaa

SEQ ID NO: 435 - DNA, 2798 bp, Homo sapiens
aggcgcagcgtggccgcgggtgggcggaactggtcgggatgagtggcggagggacagagacccctgtgggttgtgaggccgccccgggcggtggcagcaagaagagggactccctggggactgcgggctcagcgcacctcattatcaaggatcttggagaaattcattcaaggcttttggatcacagaccagttattcaaggtgaaactcgttattttgtaaaagaatttgaaaatgaagactaaaccatagttaaaggcagacagtgtaatatccagtggctgtgtgttctgacggtgaagatgtagtgtaactatcagaaaatagaaggagatggaaaaacgtggtcttcgagaaatgcgagttcttgaaaatttgaagaacatgatccatgaaacaaatgaacatactcttcccaaatgtagagacacaatgcgggacagcctcagccaggttctccagagattgcaagcagctaatgactcagtctgtagactccaacagagggaacaggaacgaaaaaagattcatagtgaccacttagtagctagtgagaaacagcatatgctccagtgggacaacttcatgaaggagcaacccaacaaaagggctgaagtggatgaagagcacagaaaagccatggaaaggcttaaagaacaatatgctgagatggagaaggacctagcgaaattttcaaccttttaagaacttgaaccacaacaatcacaaactaatgagaagatgttcacctctctcctgaaaactattcccaccagaccgtttagcctctgcttcaagcttagcaatatattcagtggcactcttatatcagaagaaagaagtttctactggcattctgattggatatttaaagaagggtgccacatttttccagctttaagtgcctatatatgattatttgaatgaagaggagtaggaaggaaaatggaatcaatatactctttgttagtcagaattgatcatcttttccattgattagctcagagaactgtaggtatagacttcttagaaagataatttcattcatttctatacagggttaacaatagtttattattgtggcttaatgggaaggtatagaagctacctgtcatagcctccttggctgttggaaggatgtataaagtgttactgcatgagtaatgtagacaaaaaaaaaagccagctgtccttggagcagagatcacatttcagagaggtgagagtgaacacattgtctctgctgtggcaaagatggccacgctggtgtttgagctgcctcttgggaagcgttgcatattttacagtgcagcataatgccatgggcttccgtggatgggaagacacatgttaagttttgtggccttccagcacttactattttcagctttttaaagcatgcttagaaggaaaagcttaccaaaaatatattttgacatttagtttttccaagagctataatcttgcccatagtatttacctcatttttgtgtctgttttgctgtgggtaagctttataagataaataatgtctatacatgtttcgactgtttaatgagtaatcaacaaaatctgccagagagtccctctggaaccatataaagttcctggctttgaatgaaccagaagtgtttgcccacacagcaaatggtccatgttaaatgtaaatcctttttagtgttaatgtctgttctcataagcaggtatattatgatgaaacatgtaccagttctgtcatcactgtgatctttaaaaacctgcatttaacagtctaatttgaggctgggtgcagtggctcacacctgtaatctcaacactttgggaggccgaggcaggcggatcatttgaagtcaggagttcaagcctagcctggccaacatggtgaaaccccgtctctactaaaaatacaaaaattagcccggcatgttggtgcacgcttgtaatcccagctactcaggagtctgaggcacgagaatcacctgaactcaggaggcggaggttgcggtgagctgagatggcaccactgcactccagcttgggtgacagagtgagactccatctcaacaaaaaaaaaatctaactgaagaactaagttgattttttatttgccataaaccaagcaaaagtaaatgcaataatttcgagatttatggtaaacaaatttgaggtatggataaatctttcacatattttttattgctctttagtaaagaaaggcacaagaaagaaaatatccagctctcttgtgttatctcagtgtggcgactgcagaaaattgacaatgcctgcctgtgtaaatgtatggcttactgtcaaagcttcattcttggctgcatgttgaaaatgtgattaaagttaatagaggagatgaaataagtatttgagatttttttcaataacactgaacttctgccaactttctctatccgctactgtaggcttgacaggctcatcaatcatttgctggtacctggactaaaaagcgcacttgctgacaccaaggcatgttggaattttcttaattcagtggatggaaaaagaaatacttccaaaaatatcccacacatgaaaagggaggggagccttaaatgaaaattccctttgtaccgtagacactttttggaatgcgattaattgccaacacatcattgaacgaatgctgtaaccaagaaattaagattgtgtgtgtgaagggaatatattcttaactgtggctacccaacttgtatagcaaagatttctgatagtttgtgttcatctcatgtgaataataaatactttaccctaaaaaaaaaaaa

SEQ ID NO: 436 - DNA, 8422 bp, Homo sapiens
atttgtgcaccttattagcctgggcagaatggctaatggtcacacttctaatacacactttaagtgttattaagcattgcatgaggtttaaaaaattacaaagtagaagaaggaggacctcaagaaattagtataaaacaagagaatgttataaatatttatgaggtttgtgctttctggaaatctgcatggtggctcagtggtagcaagctatccttttgatgattctccagaacataaggccactggaatctatagcaaaacctcagatgatgaagtatttaaatacttggcaaaagcttatgcttcaaaccaccccataatgaaaactggtgagcctcattgtccaggagatgaagacgagactttcaaagatggaatcacaaacggcgcacattggtatgatgtggaaggtggtatgcaagattacaattatgtgtgggccaactgttttgagatcacattagaactgtcttgttgcaagtacccacctgcttcacagcttcgacaggaatgggagaacaatcgtgagtctttgatcacattgattgaaaaggttcacattggagtgaaaggatttgttaaagattccataacaggatctgggttagagaatgcaaccatctcagtggctggtattaatcataatatcacaacaggcagatttggtgatttctaccgattacttgttcctggaacttacaaccttacagtagttttaactgggtatatgccattgactgttactaatgtagtggtgaaagaaggaccagccacagaggtggatttttctcttaggccaactgtaacttcagtaatccctgacacgacagaggctgtatcaactgctagcacagttgctatacctaatattctttctggaacatcatcctcctaccagccaattcagccaaaggactttcaccaccaccatttccctgatatggaaatcttcttgagaaggtttgccaatgaatatcctaacattacccggctttattccttgggaaaatcagtagagtcaagagaactttatgtgatggagatatctgataatccgggtgtccatgaaccaggtgaaccagaatttaagtacattggaaatatgcatggaaatgaagtggttggaagagaactgctgttgaacctcatagaatacctttgtaagaactttggaacagaccctgaagtcacagatttggttcataacactagaattcaccttatgccatccatgaatcctgatgggtatgaaaagtcccaggaaggagattcaataagtgtaattggcagaaacaacagcaacaactttgacctgaaccgaaatttcccagaccagtttgttcagatcacagatcctacgcaaccagaaactattgctgtaatgagctggatgaagtcctatccatttgtactttcagcaaacctgcatggaggttctttggtggttaactacccttttgatgatgatgaacaaggacttgccacatatagtaaatcaccagatgatgctgtgttccaacaaatagcactttcttattccaaggaaaattcccagatgtttcaaggtagaccttgcaagaatatgtatcctaatgaatattttcctcatggaataacaaatggagctagttggtataatgtgccaggaggaatgcaggactggaactatttacaaacaaattgctttgaagtgactattgaactaggttgtgtgaaatatccacttgagaaagagctgccaaacttttgggaacagaatcgaagatcactaatccagtttatgaaacaggttcatcagggcgtcagaggatttgttctagatgccacagatggcaggggtatattaaatgccaccattagtgttgctgagattaatcacccagtgactacttacaaaactggagattactggcgtctcttggttccaggaacttataaaatcacagcatctgctcgagggtataatccagttaccaagaatgtgactgtcaagagtgaaggcgctattcaggtcaacttcacacttgttcgatcctcaacagattcaaacaatgaatcaaagaaaggaaaaggggctagcagcagcaccaatgatgccagtgatccaactactaaagagtttgaaactttaattaaagacctttcagcggagaatggtttggaaagcctcatgttacgctcctcctcaaatctggctctggctctttatcgataccattcctacaaagacttatcagagtttctgagaggacttgtaatgaactatccacatattacaaatcttaccaatttgggacagagcactgaatatcgtcacatttggtcccttgaaatctccaataagcccaatgtatctgagcctgaagaaccaaagattcgttttgttgctggtatccatggaaatgcgccagttggaactgaactgcttttggctctggcagaatttctctgcctgaactacaaaaagaacccagctgttacccaattggttgacaggactaggattgtgattgtcccttctctaaatccagatgggcgagagagagctcaagagaaagactgtacttcaaaaataggacaaacaaatgctcgtggcaaagatttggatacagacttcacaaataatgcctcccaacctgagaccaaagccatcattgaaaatttgattcaaaaacaggactttagtctttctgttgccttagatggtggttccatgctggtcacatatccttatgacaagccagtacagacagtggaaaataaagagactctgaagcatttggcatctctttatgcaaataatcatccatccatgcacatgggtcagcccagttgcccaaataaatcagatgagaatattccaggaggagtaatgcgtggagcagaatggcatagtcacctgggcagcatgaaggattatagtgtcacctatggccattgtccggaaatcacagtatacacaagctgctgttactttcctagtgctgcacgactcccttccttgtgggcagacaataagagatctcttcttagtatgttagtggaggttcacaagggagttcatggatttgttaaagataagactggaaagccaatctctaaagcagtcattgtacttaatgaaggaataaaggtacaaacaaaagagggaggttatttccatgtactcttagcgccaggtgtccataacattattgccatcgctgatgggtaccagcaacaacattcacaggtctttgtgcatcatgatgcagctagttctgtggtgatagtctttgacacagataaccggatatttggtttgccaagggagcttgtggtaactgtatcaggtgctactatgtcggcattgatcctaacagcttgcattatttggtgcatctgctcaatcaagtctaatagacacaaggatggctttcatcggctcaggcagcatcatgatgagtatgaagatgaaattcgcatgatgtctaccggctccaagaagtccctcctaagccatgagttccaggatgaaacagacactgaagaggaaacattatattctagcaaacattgaaaaacacattttgcatatctcccagcataagtaccaagcaaaattacagttcctcttgggagaacactgcattaagaagagagactctcttgcttcttcaaagagctttgggaaattaaattgctaaatttgtattctctgtgaatttcactggcagttttgaacttcccttccttaaagtactctaaacctttaaaaaaaaatctgatttatgcagcagagatgggacagccactttttctttttaatttaagatgagctatttggagcttatgtaataatggcataaagccaactagaggatgttgtattttgcacatcagatgtttactagtggctttagtatttttctttgttttaaatggccaaaagaatccagaaacattaaggcagggacagcagtcagaatcgacataaagctttaaaaactcaaggttttttcaacctactgaggagtacttttctctagttgttaaatagctggagtttttcttattcaggtttaatggaggttgaattgatttttaaacacatataacagtaggaaatgaataaatgggcttctgcatttggctttctacctgttccaaggctagatcggaactggtagactacgctgtaagcaggatttcactacctctcttaaggtttagcaaacttctaaatagcccattttaagggagaacttactaactttattgtgaaaggtctaaatgcccacttgaatgaagctgagagagagatctagcaaaagctaaaactcatgttgtctatctttgaacttggtaaaaacccacaggtgctgctgcttatatctgtgaagcactagcttattctaggaatgcctgattctttaatattgcctaaatcggaacctttttctatgttgcacacatggttttcagatgacccagccatctacaagatctgaattctactgaaaatatctagaaatgtggaagagacctacttgcacattcttaacctgtatttgaacacaaaatatctatacttcatgctccagcccaagcctataccctgtaatagcatactattattgaaatcgcttgaccggtcttgttcacataggcctctgggagtgatttggttctttgccctaatgtttcatttgacggtctctttttgatcaaccaatttttctaaaagttcagtcgaaagcttttaagtatagcttcctcccttgaaaaaaaatgtaaactatgactgctgagtgataaaacactgtggtgtgaaagtgtcatcttcactgccaatcaggcaaagaccggaaagatttgcattttattatgtctgtcttatcatgcaatggaaatgatgctttttgtaagtatgcatcttaccaatgatgtaacggtttaatacctttgaatgttttaataaccaagttgctgctgaacttatactaaatcaggggaccaaaaaacttgctcttatcttctcaaattgtattctatatccattaatgtatcagttatcccaaagccttcaggtggaggggtttaccaccttcctaggtcgttcaaccaggttttgtgaggaatgcattcaaagtggctttataaaagaagattttctttagcaagaataatgaggtcatgtcatttgttaataagtatctgtgataaatccgtggttcaaggttaagccattctggtattctggtattagcaactgtaaattctgccacctcatacatggaacagagcttgtgggatgctaatagttagtgaagtatacatgatttaatttctaataatctttatgttttctttaaggatggtggtgtattgctctttttcagctttatttttaagagtacagtcaggaaaccaacaaggggcctaagagtggctgcccctgcttgggacattacagcaagtgaaacaaagttaatgtgacaagctttgctttgttatcattggtcttcactagaggataccttttacatgtacttctctcttggatcaaatatgtctttaactgtacatctcagtggctggaggccatgccttttaagcatgtgtaaaatttttaaagaaatgaacatacacatagttattttagtaatatttcctgaaagaaaaaccaaattctgctataagtcttgatcttcaatgaacttttaaataatgcatttagctggaaaacaagactttcccagcttgtattacctagaagcgtgaatgtataggatacctgactactaagactatattctcagccctgccctgtcttttatttgcgggtctaatctaatattagaatatattaaccgcttaaggcattgaagccatatgggatggggaatgcatttcttcagtgtttctccgagagactttccatttccttggagttatggcggcaagtaagtatcatagtattaagaaatttgcctaaatctgagttgtgcctttctttactcacaaggcatgggctttgtcctggtgatcagtttgtaagccttcttccttcccagctccttaataaaagcaaagtgattgagtaggtaatgttcaaagtgtctgcctgtgtacatgtacttgtattgattatgtagttcagtaagatgtgcccaagtcatttcagaaagaaagacccttcagttttgatgcattttgctgaacacttgggtagtgagtgggatcctatccagttgaggaatgcttgcaatgctcattgaagggatttgctttgggactttgtcatcttccagaaaggaaacatattgtatatttggcccagtgtgattgattgctttatctttggtaacttttacttgaatgggatttgctgaattaatgactattgaatttaaaactaattatgagttgacaaataaataaaaggtagtgtttatgtctgagcttattgtgtttgagctaacaccaggttactcagtaaccatgacctgctcctccatttccatttattctcaacattaaatagttttatcttgttgttgccagaaatgcacttgtgccaggtattgtccctgctgtatgaaaagcttcttggcaatgaattctgtaatagtgccctacattatggttttctggtggaattgttttaacagtgacaacccaggatttccaatatatttttgttttattgttattaccaaaaattccactatgattgatgttcagtgattttctatagcaacttttttggtaactctttgggtttctgatttgttttagctaaaattttggggatatgatttgggtctttgattaatgtcagctgaacttggatttctagttcatgaagaaatctctcccaatacccatttatcctatttttagcaataattcgttaatgattccacttgattttcagaatattgtcctggttgattttgatttgacagcatacattatgaaatttgaaagtaggttaccattttgaggcagttggatataaattatgtaaatatgtatgattatgatttttataaatggcataacatgagtgtactaactaccttctatgctggccatgctacagattttctggaggtatgacaatagtatttttttatgctcagattaaaaatcagcttttcacctctccagtttttccaagtgatactcccagttctagagcaatctacagctgtttatgtgaggtgcccaacacccattcatctcaagtgcttcagtctttggtttatttcatgcactgtgccttcaaaatgaaatttttaaaagggactttaaatgaagttgaatagtagtttttaaaagtcaatttgtaatttatgtgaaatctaactgtaatgaggtcctttctgttttttatatgtaaacagatctactaatcctgtataaaagttattttacgatgtttgtctttctttgtgttttgtctcataatcttttttcagatgcaatatgccggaaaaagttataggtccagtttgaaaattatttagtttttctgcctatgctagtggaaaaatagtaccaggatcagaatacagggtatcacctatggaatgtttctgtatttatgaattgactcaaaagaaagctttgtttctgaaatcgcattatgtagtagccacagttttctgtttgtagctcagctagattgttatatatgttcaatcatttcacaataacaacacaaaactggtcattgaaaggtttttatgtacgcattttaaacttgttcgttaaaaatttggtcctttttccaggtgaggcccagttagaataatgtgtcccggcacttttaggcacagcaaggatgaattcaatatccccttttcacttagcaacaatgtgttacttctaccctaataggaattgggaaagcaaagttgtatgagaaacagactctgctgataaagtactcatagtccagaccagagaaatataaatggaaataggttatatttcaatagtgattggttcatctaaaagtctctgctgtaaaggaaataaagcatagaggtttgagcatggactttggagttggaccaatctgtgactgattcttcgttctgctacttgcttccaatgtgaccttgtacaagtttcttgacattctctgagcctcagtttctctactggttgaataatccttgataggattgcagtggaaaattaaatgaaataatgttagcaaaggtcccaacataatatttgacttggaattgaatgcccatggtaaccagcatcattttccttcatgtgatgtcttcttatgcctttgaaagaaagttactttatcaaatgtataaataaagatctgtttataggtgatctttttaatttagaagaaattctgagacacaaataaaaaaagaaattttttaaaaaaaaaaaaaaaaaa

SEQ ID NO: 437 - DNA, 5507 bp, Homo sapiens
atcgatcacaggctcacaacgcccttccattcatcgctcttattccagtcctggttactaccccacttcctgacatcaaaccagggagaacgcgagtgttagttaacatggcttggtgtgtggccacagctgacccggcgcatacctcccgtcctctctttacagggctggcggtgtctcggggctcggctggccatgcctggagcgcggggtttgactgggccgccgttgttgtagtgaccgggaggcgctgccgctctgggcagacggttccgggagccgcacggtcccctctccttccccatcctctcccctcccctctccgggttcccccacccacaggagccttgggccgaccactcccccgatggcctcagccacggaggaccccgttctggagcgttatttcaaaggccacaaagctgcgatcacctccttggacctcagccccaacggcaagcaacttggagccggccgtgccagggagctggggtcaagaaggctctcagacctccagaaaaatacggaggatttgtctcgaccgctttataagaagccccctgcagattcccgtgcacttggggagtgggggaaagccagcaaactccagctcaacgaggatgaactgaagcagcaagaagaactcattgagagatacgccatcaatatttacctcagtgacaggatttccctgcatcgacacatagaggataaaagaatgtatgagtgtaagtcccagaagttcaactataggacacttcctaccacctctgttatcattgctttctataacgaagcctggtcgactttgctccgtaccattcacagtgttttagaaacttctcctgcagttcttttgaaagagatcatcttggtggatgacttgagtgacagagtttatttgaagacacaacttgaaacttacatcagcaatcttgatagagtacgcttgattaggaccaataagcgagaggggctggttagggcccgtctgattggggccactttcgccactggggacgtcctcactttcctggattgtcactgtgagtgtaattccggttggctggaaccgcttttggaaaggattgggagagatgaaacagcagttgtgtgtcctgttatagacacaattgattggaatacttttgaattctatatgcagataggggagcccatgattggtgggtttgactggcgtttaacatttcagtggcattctgtccccaaacaggaaagggacaggcggatatcaagaattgaccccatcagatcacctaccatggctggaggactgtttgctgtcagcaagaaatattttcagtaccttggaacgtatgacacaggaatggaagtgtggggaggtgaaaaccttgagctgtcttttagggtgtggcagtgtggtggcaaattggagatccacccgtgttcccacgtgggccatgtgttccccaagcgggcaccatatgctcgccccaatttcctacagaatactgctcgggcagcagaagtttggatggatgaatacaaagagcacttctacaatagaaaccctccagcaagaaaagaagcttatggtgatatttctgaaagaaaattactacgagagcggttgagatgcaagagctttgactggtatttgaaaaacgtttttcctaatttacatgttccagaggatagaccaggctggcatggggctattcgcagtagagggatctcgtctgaatgtttagattataattctcctgacaacaaccccacaggtgctaacctttcactgtttggatgccatggtcaaggaggcaatcaattctttgaatatacttcaaacaaagaaataaggtttaattctgtgacagagttatgtgcagaggtacctgagcaaaaaaattatgtgggaatgcaaaattgtcccaaagatgggttccctgtaccagcaaacattatttggcattttaaagaagatggaactatttttcacccacactcaggactgtgtcttagtgcttatcggacaccggagggccgacctgatgtacaaatgagaacttgtgatgctctagataaaaatcaaatttggagttttgagaaatagagcacaacagcactttcgtcatgagctgacagtagtgtcaagaaagtcaaagagccttaagagcctcagtgaagattgtattttattttatcaaaagccacctagcagtcatctgtggagcactggaaagctggggttcattttggtatatcacactgaaactgggtacccagagtgctgctgtttaatatttcacaatgccttacttattggttgttttatataagagttttgtcaatatggtctcttcttaaaagaagttgactatgaattgaaacacacaaaacatttaagtgccagacttaatattaaagaatgtaaaggtccaagtaaaatgaggtatgatttatgttgatgtgtaagttcaccgcacatcccactttttaacaaaactcatgaatgtgcagtttgagccattgctattttgattacatagaatttgtatttcttttttagccagcacattaaattttagattttattttttaatctaatttttttctaatcaaaaagaaaattgagcttaaggcaaaaggcctggttttagagatatgtgtaattggaagagggcatttgtttgagtgtgagtttggaggcctttttaacatgcagacatacccatatttaaatgaaatggggagatatttacattccgtactttgtaaacttgagctattggacttcactgatgtatatattaatacctcagattcctctgattttgtaagctgtcttctctgtgaacgtgtttgtgtgtgtagggcattttctgattgcacttccttaagttatgaatgtactagaaagggactcatccagaatactatgcctccctttgttaatgcttaatcatttaaagtaaacacaattgaagcctctctgaagttaaacccaactatgtttattaaaatgtgtgaaactgaaagtgggctaggttctaccaaggctgtggaactctcctacgagttctgctgatcaggaaatttaagaatttatcttaaaaatgcaaggaaaaaagactgccttggcaattgtgaatggtgctttcaatctcctagcaccgagcctggcacttaggcagctttcagtaagtgggtgaatgaatgactgaatgaatgaatgaatggctcagctgaggaatgtaactttggtcaagttattatgatgtgtttgggcttagttttctcattggtaaaatgtgggtgctggattggatcttaaagatcccttccagctctgaaatgctgattgtacagtatattcttcccagattgactcactgtgcaatctttacaatactttttatcttttcacttttgacataggtaatgttgttgagcagttgagcaatgttcagtccagttgtgaagctggagaagagaaatgggttttaaaaattaagtgaggggaggccgggtgcggtggctcacgcatgtaatcccagcactttgggaggccaaggcaggtggatcacgaggtcaggagatccagaccatcctggctaacatggtgaaacctcgtctctactaaaaatacaaaaaattagccagctgtggtggcgggcgcctgtagtcccagctactcaggaggctgaggcaggagaatggcgtgaacctgtgaggcagagcttacagtgagccgagatcgtgccactgcactccagcctgggcgacagagcaagactctgtctcaaaaaaaaaaaataataataaaataagtgagctgaactcacctgaagtggtttacttctgtgggttaagaagttctagtcagtgttcatagtcgtttcgttttgataattgttgaaccaattttgtttttaaaacctttagactctgaaagtaatattttgactaagaatgtaaatatttccaaactaaattactcgggaagtaaacgctttttttaaaagtatttttactggttttataccaatattatatgcagaaatcacaggatgaatttagaattaaatctcaattagttcactttggcctagatttatgaaaaatgcatgcctcgtaaagagtccactgtattcacgagtaaagttgcttttagtgttcacttgatgacttggagagtaggaattttgcaaaatctgaatttaaggaaattctttaggataaccatttcaaaaaataaaattgctatgcaatcttgaatattttctcttttgcctcgtaaaatgaaaatgcattcacagtttctgtaaattatttagcagccttaaagtttatcaaaaaattgtccagattccacgtgcagcatgcttggccctgcatttaatttaagaaggattaataataatgctctgaatttttcgaaagggattctcctaaacccacccacttctcttgcccaggctgctttttaaaaatatttttttattttttacttatttttaaattttctctttttatttatttttggttttcttgttagccacctgttatatgggagaacgaaaattgttatattttgaaagtacttattacattatttttattttagtatcttgatgctcctgtcaaaagggaaatgaggcttttaaaaataaagtaccttaattctttattgactttttgccctaaattgctaggtgtgacccagcaatcttttaggaagagattttacagtggtgctttatttatatcaataatccagtatagttaggctgttcattcctcataatagagtacataacagaaaagtgggactttcacattttcatatttaggcacgttccaatttaattccaaaaatactctgtaattctacatctaaaaaaaccgattccctaattcgaatttattggtaccaaagctctctttggctatagacaattaagagttgaccttttaagttaatgtatatgcttaaaaacagttttaggaaaatatttggtagacaaagagtttcaactttaaatgttcactatgtcatttagtgtccaactttacggataggttgactatctaaataggcatttttagtcattaaaaaaaatctagtcaccaggaggatccctataactcaaaataacttgtttgtaaaagaaaatttgtttacttacccattagtaagttcctgcatattcattataagatggcaaatcaaacttttctaggatgaagacagcttatttttaagttgtatagtcttagttggtttagggtctcaattttaattaataaaatacttggtttttatttgcttgtccttttgaattcctgttttaataattttaaaatgagcacaaagaacgttgaagttcagattaatctcttctgaatgatgtttttttcctctgtgatgagttgtttctgacttttttccttttgtatttgtaatgttgattaagatgtaaaataaaaagtgtgcctgattatttttgcaaaaaaaaaaaaaa

SEQ ID NO: 438 - DNA, 3918 bp, Homo sapiens
tttttcacccgcgctctccccccttactccctcagcctcccacccgggatggagccatgtgcggcgtggagtccccgcggtgggagagagaatgtaatggacatcggtctgaccaacgagaagcccaacccggaactctcttactccggctccttccagccagcccccggcaacaagaccgtgacctacttgggaaagttcgccttcgactccccttccaactggtgccaggacaacatcattagcctcatgagcgccggcatcttgggggtgcccccggcttcaggggcgctcagcacgcagacgtccacggccagcatggtgcagccaccgcagggtgacgtggaggccatgtatcccgcgctacccccctactccaactgcggcgacctctactcagagcccgtgtctttccacgacccccagggcaatcccgggctcgcctattccccccaggattaccaatcggccaagccggcgttggacagcaatctcttccccatgattcctgactacaacctctaccaccaccccaacgacatgggctccattccggagcacaagcccttccagggcatggaccccatccgggtcaacccgccccctattacccctctggagaccatcaaggcattcaaagacaagcagatccacccgggctttggcagcctgccccagccgccgctcaccctcaagcccatccggccccgcaagtaccccaaccggcctagcaagacaccgctccacgaacggccccacgcgtgcccggccgagggctgcgaccgccgtttcagccgttcggacgagctgacccggcacctgcgcatccacacgggccacaagcccttccagtgccggatctgcatgcggagcttcagccgcagcgaccacctcaccactcacatccgcactcatacgggcgagaagccctttgcctgcgagttctgcgggcgcaagtttgcgcgcagcgacgagcgcaagcgccacgccaagatccacctcaagcaaaaggagaagaaggcggagaagggcggtgcaccctctgcatcctcggcgccccccgtgtcgctggcccccgtggtcaccacctgcgcctgaggatcgggcccccagatccccacttttcccctccagtgcctcccggctgctagcctgaaagcagcgggaaagccagccacggaggcgtaggggccgcgccctggcctctccatggacgtgcggccccttgcttccccttcgatgcccccggttcccaacctttcacgccggccagcggtcaggggccagggctggaggcgccttcccctcgcggtcccccacttagccaaggcgtgggggcggaaaggtggcgtctagcccgctttgttcagttcggatcgccttgatccaggggccgccgggccgcgccaaggacctgcaagggactgaaggcggagcccatccaaccctcgcccgacccaaacacctcattgtttcccccacgtctccctctataccccctcgaagactcgagagggggagggggtaaggagcgcaccaaagcgcagagcttgctgcccgccgcacgcacgcgcgcctgcgtgcggggatgcgcgcgagtgtgtgcgtgctcgcgtgtgtgtgtatgtgtgtgtgtgagtgtgtgtgtgtgcgcgcgcgcaagcgtgtgtgtttaagactcttgagctgaactgggctgtgtttaccccaaactcttccccacctcgggtccccaagccgctgggagatgtcccatgctgggggtccgcacgtggctggaggaggtggtcttccatccgctctgaaatcatgtttcttagagaaatgcctcggatgccgccgacgcggtgctgctgccgccgcttcgggtttggcccctcagaacccctccttttctgagcgcttccctcttaggcctcagggcagtttgatctgtggggagaaagagcagccatcgctgagcctgccttttaaaatatatgtgtatttccttagccccactctaagaaatctatgttcctgagtttgccccctgccctcccactccttccccttctcccctctaaaccttctcccatctctttcaaaatcttttcccagaaaggcaggcttcaaccagccactccagctttgtgtcttctctcaattacatagcaatttctccttcccaccatcatggggaagctggctctgcttttgccctttgtcatcaccaacacaacagatagaatttaaatataagtatatggtgtgcgtgtgtatgtatgtgtatgtatatgcatgcatgtgtataaagatgcacatgcgtacatatacataacatacacacaatatgtattcctagcaaaataaaatctctaaggtacttggttatccagtgcagtgcaccggaataaagagaatttgtaggcgtatacagctttaaatgatttattttttatgaaaatgttaactgatgagattatatctacatacgtgtgttatgtgtgtggatatagatgcacacatatctgtacatatacatgtgagtgtacatatatacacatatacacatctatgtatggatatgtgtgtatacacatatacacatctctgtccaaaatttcctcaaagatatggggattttttcatgaatccatgtggatgaatgaggtgtctcctttccatacccagtctcaccttctccccaccctacctcacctcttctcaggcacccctcttccccagctgtcctgccagcccttctcgtacagggtggctcctttgaagtggagtaatagggaaggttgctctctgccacagcttgcagcatggtcttgactgaatgtactgttcctgttagcgttacttctcctgtggtcagtaagttgcccagagagaaggaacaaaggtctggagtttacagaatgtctgtttttaaagtcactttatgcgttttccacttttttcttttttaagaaaaagaagtaccatttttgttttgttttgttttgatttttggtggtggataaataatactaaaaggactctagtggaaaggggggatatcgaagagcagggggttgtgaatttccaggtacttggactttttgtagaaggagagagaagaagatgaagtttgccaggagggcccatattttttcagctgaagggtaaaatctttctttgcagagacagtattttgctgaatactttttataatgtgatgattattaaaaaagcaaaaattttggtcacttccaagctagaaggaggaatcagataccctttaatattttttcctcgctccttctggtatatgcatgtcactgcatgataattgagttttcctttgttttaataaaactgttctcagacattaagctaaactaagagaaaaataactttgttgccaaaaggttgtgctatccagattttttatatgtctgcatgtttaaaaaaaaaaagcaacaaaagaaaatgcactctaacttatgtgaactgagagaaaaaaatcaggttttaaacaggaaaacctatggggaatgatattttttgaaagacttttgtataaagttgagtacttagaaaaaagacaaaccagatgtaatatattttgtggatgtttttatttcttggatttatagtaccttatactaaggttaaaaaaatatgcttgatattgtgaaaaggtgaaattcttcaccaacatttcatttgctcctttgtcatattgtaatgccaatataatatagttaatgaaaacagcatttttaaaaaccgaaatattgaaatggtgtaatgttgtaccatttgcactgtgagcaaatgctaatacagtaaatatattgtgtttgctgacaatcagccggcctataaatctccttattttatttcttgtttttatagcataaagctttagtttggcctgaaaaaaaa

SEQ ID NO: 439 - DNA, 8584 bp, Homo sapiens
gcggccgccacgcagtcccacaatgccccgctcgcaccaccctgagggcggagagaaaggaccgctgccggggatagggcttccgccgagagcgccgagaagtgcgcacgcgcactgaccccgcgggccctagcaaccagagcagtgacagtagcaaccgccggaatgctgggccttgattggttgagtcaagtgagctgattggttgattcaggcgaaagcaacaacaatcaaagaagccttagcgagatgggaagagaaaactggccagaggccatctgaagccaaagagataaaactttatgcccagattccccctatagagaagatggatgcatccttgtccatgcttgctaattgcgagaagctttcactgtctacaaactgcattgaaaaaattgccaacctgaatggcttaaaaaacttgaggatattatctttaggaagaaacaacataaagaacttaaatggactggaggcagtaggggacacattagaagaactgtggatctcctacaattttattgagaagttgaaagggatccacataatgaagaaattgaagattctctacatgtctaataacctggtaaaagactgggctgagtttgtgaagctggcagaactgccatgcctcgaagacctggtgtttgtaggcaatcccttggaagagaaacattctgctgagaataactggattgaagaagcaaccaagagagtgcccaaactgaaaaagctggatggtactccagtaattaaaggggatgaggaagaagacaactaatgccacgctttccactgtgtgttaacttatttaaatgtcataagaacaatagataaattttatataattgtctattttaaagattctgtatgggacaaaagtttcttaagataaaacagatcactcattctcatctttttttttcctttaacttattcagtgtttctccccaaaactggtaatgccaaccttatatatcctatttctctttttagaaaccacaaattttcgatttttgtcttcagtctcagttacgtactgtgtagccccatctactaaaacaaaacctttgtagaccagtcatttttaataacaaaggaacaaatgtttttttcagtttgttcattttttttaggttagacattttaaaagatgtacatttgaaaattcagaacatttttcctgaaggtctgtctctgtacaattcagaagcacatgcctttagctcagaaggcagcatggtgatgggaagagttcctcttagaaatacagcaggtccggaaccaagactccaaagttccattggaaaagatatggtgaaaaaaggaaaaagtagtatctcagagaccttctagtctatattatacttatttgtttttccaaaaatgtgcacattgtcaactggaatttaggttgtttttatatgcatggccacttgagtcattgtgtacagtcattctgtgatctcagttagtggttaaaatgactgtcatgatcatttctttgactgataatgtggcaatgttactcatgtggacctcgccttaagcacacattttggttttatagttccttatgtgtttaaagcattagttatatttgaattcctagactaaatgctggccattgatgtatgtcaaaatttaccctaattatttggtctggtgaccctcattgttgggaaaagtgactaccatggttataagtaagggtataatgaaacttagtatttcaaaatatattttttgagaagttctaagttaaacagctcttaaaatgtattatgtacgtggttgtggagggaagggagatgtttcattatgagatcccaggcaaatggcaatatgtttgaggattgtctcctacataaagcagtgtaggtgatttaacctcaaaattgcaaagcaatagttagatgcagaggttagaatttatcatgtaaacaaaaaatccttcaggaaaatgtaagacattgtagtcagtaagcagatgaggtcataggaggccatggctggatcactattagattgcagaaaagaagtcaggggccctctgccaaattgtgcctaaagtccctcagagactgttgattctggtttccccatctacttgtgtgattttacttgcataaaatcacagtgaaagagggaagaatcatctttaaaaagtgattgcataagtagtcctgggtttcagaagatttcagctatcatttacataggaattacttgatttttctaagttactctgatcaaaagggaccactgctttgacaatcaactctaaatacaaacaagaggccaggcgtggtggctcatgcctgtcatcccagcactttgggaggccgaggcgggcggatcatctgagatcaggagttcaagaccagcctgaccaacatggtgaaaccccgtctctactaaaaatacaaaaattagccagtcctggtggtgggcgcctgtagtcccaactactcgggaggctgaggcaggagaatcatttgaacccgggaggcggaggttgcagtgagccgagattgcgccattgcactccagcctgggcaatagagcgagactccatatttaaaaaaaaaaaaaaaaaaaaaagaggaaaacttggtctaacacccttttagttttcttttctctcttcttttcaatctgataggaagaaaccttattctactctagctggtttatgcattcaaagcctttggacatttcttttatgaaccataggcaatgagccttcattctccttggtgatgttttaagttccataaactgagagggaagatgatcttcttaaagtttgcacttccttcagtaggcaagcttgaagccatgttgatatggatatgttttctaaaagtaaccctggaagtgaatataataggaagtaagtgatttcatattgaatttatttgtaaaatggcttagagttttggtgtttgttttttctgaattctgtaatatagaaactggttctctttctccttgtttctcaatgacttttaattacaggtagttctcagacaaatgtaagatacttttctctgtccatttcatgcaaaattcatattcagtatcattcaacaaatctttgaatgacttctatgcatccctgttcatggaacccatgccattagaaaatggcagttgggatgtatgaagaaatgtaggatattctctcaaatcattccctaaattatcctttactgctgcaaatttagctgataaaactgcctttggtttatgcctcttggatcagatatttgacctatgtggaatagattatctctgtgcttccggtttaagacattacgccattttagtggatcatttaaattttttctattctgtttttttttgtttgtttgtttgtttgttttaaacagagtctcactcccgagtagctgggaccacaggcacgtgccatcatgcctggcctatttttgtatttttagtagagatggggtttcaccatgttggccaggcttgtcttgaactcctaacttcagatgacctgcccacatcggcctcccaaagtgctgggattacaggcatgagccaccgtgcctggccaaatttcttctattcttgtaagtgatggtaaaactctggaatcagtccagtattttagtttttcacagcaaatttgattttagtctaccaaggagtttaacttttctatgttccctaactctaagattagggctgtattacctagacaggccttaaaaggtttttgtgttgttctctgttaataagaatttgttcctttaaaccagaggatcaaccttggaactattaacattttgggattgataattcattgttgttgggggctgtcctgtgtgcttaggatgttcagctgcagccctggcctctacccactagattccagtagaccccctcctcagccatgacaacaaagatatctccagacattgccatctgtcccttgggtaggagggtgggaacaaattctcccttagttgtactttttataccaacatcacttgtgtccagggtccatttattttcagtctgtagccatgtgccacttgaattgttatatgagagaaggtgatgtattcagtaatcatggatggaaagaaatggtcactggtattttttgtaatgctcatttttttttttttttgagacagagtctcgctctgttacctaggctggagtgcagtggcgcaatctcagctcactgcaacctccgtctcccgggttcaagcaattcttctgcctccgcctcccaagtagctgggactacaggcacgcgccaccatgcctggctaatttttgtatttttagtacagacggcgtttcaccatattggccaggctggtctcaaactcctgacctcgtgatccgcctgcctcagcctcccaaagtgctgggattacagacgtgagccactgcgactggcttaatgctcattttcataattttcatgtaatattagaaactcagggctggaaggttcaacttctcttttttgaagcagggtctcaacttttatttctaagcattcttgcttatcttaggacagtgattattaacctacctctctgtttctatcaacagaagccaactttatgatagattttgctttgtctctaaagtttaatattttgagtgtactttagaaaataggtcatcattctttaagcgtcattcattgtctaatcacataattttgcagaccatggcagtcattaaatacagaaaaatactgtgtaaaatttgataatcttgtaggaaagttagctgatgtagacatcaattttggatgtgatcagaagaatgtctgcttaagataactggtcaataacttggtatggctactggattcattccacatatggtagtataaggcacttaaatgtgtttcctgattgggcactgtggctcatgcctgtaatcccagcactttgggaggccgtggtgggcagatcacttgaggtcaggagttcgaggccagcctggccaacgtggtgaaaccccatgtctaccaaaaatataaaaagatagccgggcgtggtggcgcatgcctgtaatcccagctactcgggaggctgaggcaggagaattgcttgaacccgggaggcagaggcttcagtgagccgaaatagtgtgactgtactccagcctgggtgacagagtaagtctccgtctcaaaaagaaaaaaaaaaatgtggttcttttgtggaaagaggaatttgaacttgaataaacacttcttttgacaccttttaccagtggtctgaagcagaataaggaagaataagaaatgaatcttgactgttgacttattctgagaattggtgatgtgtaaagagagttggaatcttctacctgggtttttctcagggctaaatggaaaagcacagggcccagaaaggttggagttaatcattcacttaaaagcattaggaggaagtgtcaaagcatcagtcatgaatagattatgtctctctgactacagtcagaccatcaattcactaagaccttatactctgtaagtgttggtaaaggaagaaaactgctaaattgcatgttaccctttactagaaattcattcctttggcacagattttatttatttggggctgtttaatgtgtctgtaaatcatgaaatataaaagcaagattcagtgtagcagagttggtgcttcttctgacaagctaacttgaccatatttctttatctgtgctctaacatgtgtcatattgttttctttttgtaaaccataaaatgggtgaacttccaaaaatcaagggtcatgttttaaaatcatggaacttttagaaataccatatctgtatctctattcctgcattttataaatctgtaaaggaagaaaactgaaaggaagaactagactgagtcttacctttctctgacctaagataaactgataaaactttttacttgatatttggagaagtcattaactggattctagttaatttcccatattgggcagtttagaggagacccagccaaccaaattatgatctagcaaatttaacataggggaagagggatagtaaactatttttcagtagatttgcactttaaacttaggaactggatgttggtggaaaggacttccatagggcagatgggtaaatatctagcctgcacttggatgttagagaatcaaacctcacccttgctcgttctaaacccacatgagtagttaactgtcttttgacataatcagagtcaggatttccctttttccctacttgagtcgtcttccatgtctgttacatccaagatcatccctctgggggatgtgtcaagtagttctcctactcagaatagaagctttgcgaattatcattcccacctctagattttaaatgaatgtagagttgtctaacattatatgggtgggaggctctttgcctctgtgatcagtagggtacctgcctctgaggtgctactgcctggagggatcactcccatcaaaagactggtgagttggaagctaagagcacatgcgcatagccagctcctctcccaggctggcagtcatgattacgagcatcattccagaatctttggcttctagaaccaactccattctgaagaacattttaacatctatgaataccttggtaataatcttttatacacaggagttttgtagcatgactttatgactaaacttattgtgaattaagttatttagaaatgttgagtttctgaatgttattttgtgatttgtttcaaaatggtaataaattgtgttattttgtaaaaaaaaaaaaaagtatatttttggtacatgattattagttttagctaatatagagcaattatataaacttctagtgatattcagtccaaagaaattcagcctttggataacatgtaccatgcagtttgtgtggtgtgtgtgtgtgtgtgtgtgtgtgtgcacgtgcatgagagagagtgaaagagagaggtgttttttgttttgttttttttgagacggagtctcactctgttgcccaggctggagtgcactggcacaatctcggcttactgcaacctccacctcccgtgttcaagcgagtctcctgcctcagcctcccgagtactgggactacaggcgcacaccaccatgcttggctaatttttgtatttttagtagagacgaagtttcaccatgctggccaggttggtctcgaactcttgacctcgtgatctgcccgccacagcctcccaaagagctaggattacaggcacgagccaccgcgcacggccagaggcattcatttctttagctaagtttttttttcttagtaggtttttttctcccaggcttgtaactcttccccagttctttgggcactatttcaaattattaggcttctggaaagagtgcttccagggacagcaagttactactgcacttgaccattcctagtcctcacctgattaccagaaggtacgcaaggtaaaagttagctgataggccctgaattgagaaaaaggaatcaccaagcaatatccgtaacattacacattttgccagcacattttctatgctatcagctaaaacgtaattttggtcacaaaatagggctgtagtgtagtttctacttcttattccagttgtttgattatgaggatacatttcttgctgctgtcctccactaaacagcagacaaattgccaggtgtgctggctcatgcctgtaatcccagtgctttgggaggccaaggcaggagtttgagaccagcctaggcaacatcgtgagaccccatctctacaaaaaaaaaaaaagaaaaaaaaaattagttgggcatggcaatgccgcctgtggtcctagctactggggaggctgaggcaggattgcttgaacccagaagtttgaggttacagtgagctatgatcatgtcactgcaagaccctgtccctaaaaaaaggaaaaacaaatagaagacaaatttcaatttctgagtttatacaaagaaagccttaattcagatcataaatatcccattgttatttttagttcattgtttcctagaacaaaggatggacatttaggatcctcacattgatttatgtcatatatatgtattgcattgaatatatatatacgcatgtagatacatacaattgttatatataattaaaagtcagaatcttaggtgataactgtcagacctctgagcccaagctaagccatcgcatcccctgtgacttgcacgtatacatccagatggcctgaagtaactgaagatccacaaaagaagtaaaaatagccttaactgatgacattccaccattgtgatttgttcctgccccaccctaactgatcaatgtactttgtaatctcccccacccttaagaaggttctttttaattctccccacccttgagaatgtactttgtgagctccacccactgtctgcaaaacattgctcttaacttcagcgcctatcccaaaacctataagaactgatgataatccaccaccctttgctgactctcttttcggactcagcccgcctgcacccaggtgaaataaacagccatgttactcacaaaaaaaaaaaaaaa

SEQ ID NO: 440 - DNA, 1962 bp, Homo sapiens
gccggggtctaggcaccacggtggctggcggcctgcgggcggcgctgtggcccgtcgggcggctccacagagccgccctagccttccgccttccccaagccaacgtctccgccgtcggctccgcggcgccgccatggccgacgtggaagacggagaggaaacctgcgccctggcctctcactccgggagctcaggctccaagtcgggaggcgacaagatgttctccctcaagaagtggaacgcggtggccatgtggagctgggacgtggagtgcgatacgtgcgccatctgcagggtccaggtgatggtggtctggggagaatgtaatcattccttccacaactgctgcatgtccctgtgggtgaaacagaacaatcgctgccctctctgccagcaggactgggtggtccaaagaatcggcaaatgagagtggttagaaggcttcttagcgcagttgttcagagccctggtggatcttgtaatccagtgccctacaaaggctagaacactacaggggatgaattcttcaaataggagccgatggatctgtggtcctttgggactcatcaaagccttggtttagcattttgtcagttttatcttcagaaattctctgcgattaagaagataatttattaaaggtggtccttcctacctctgtggtgtgtgtcgcgcacacagcttagaagtgctataaaaaaggaaagagctccaaattgaatcacctttataatttacccatttctatacaacaggcagtggaagcagtttcagagaactttttgcatgcttatggttgatcagttaaaaaagaatgttacagtaacaaataaagtgcagtttaaaacccaactcttactcttaatttgttcctaatacgtatttttggcagggagagggaacggtccatgaaatctttatgtgatataaggattttaagtttgggccagtgaacagggtaaataaaatttaacttttgagcatatggaattttgattgcctttaaagttactattctgtatcattgattcatcaagaaaacctagatctgcactcacctcactgttcaatcattgagtggtaaaggacagaagtattttctagttctggtcagatgatataattttttttttttttttttgtgggggtgaagtcttgctctgccacccaggctggagtgcagtggcatgatgtcaactcactgcaacctccgcctcccgggttcaagtgattctcctgcctcagcctcccgagtagctgggattacaggtgtgtgccaccacacccggctaatttttgtatttttagtagagacgggatttccccatgttggccaggctggtctcaaactcctgacctcaggtgattcgcccacctcagcctcccaaagtgctgggattacaggtgtgggccactgcacctggcccagatgatataatttaactgtgttttaggtaacatgttaatgagggaaaatgtttaccagtgtagcattggatcaaaaagtttatcacacagtgttttaataaatggtttattctgcttaccttatttgaattgtcattataattttatatgcaaccttaatttgtcaagtaaatactttcatttaatttgaaagaattcatattcatttgctctttcatttgacaataataaaatttaaggtttattacctggaaagagtgcaagaaaatactaaacaactttatcaaactgattcacactgaggggaggttattttgtaacaaataatggaccacaagttcattttgtattcttctgtagtagaggctactgatatgaatttaagaaaaaaccttagaatcttaacttttcacatctgcagatgcagtgtgccattctgaatttttcaatctaagggatgtggatacatagaatgtttaaaaagataacaattagaatgaaaaattaaaattatgtatgcttttaaaaaaaaaa

SEQ ID NO: 441 - DNA, 4029 bp, Homo sapiens
agactgcgcagtgtatcctgggtgctgtagtctttgttcggtttggtggttggccggtgggccggagacgcaccgtagaaaccgaaccctcttacccaattggacgccgtccccaagagacacatctcaattcaaaggcagcttgctgatctagagaatttagcttttgtaactgatggaaattttgactctgccagctcattgaactcagataatcttgatgcaggcaacagacaggcttgtccattgtgccctaaggaaaaattcagagcttgtaatagccataagcttcgtcgtcacctccagaatttacactggaaagtctcagttgaatttgaaggttacaggatgtgcatctgtcacttaccttgtcgaccagtgaaaccaaacattattggagaacagataaccagtaaaatgggagcccattatcattgtatcatttgttcagcaacaatcaccagaagaactgatatgctaggacatgttaggcgccacatgaataaaggagagactaaatctagttatattgcagcttccactgctaaaccacctaaggaaattttgaaagaggcagacacggatgtacaagtttgtcccaactattctatacctcagaaaacagattcctattttaaccccaaaatgaaactaaatcggcagctaatattctgtacattggctgctttggctgaggaacgaaaacctttggaatgtctagatgcttttggagccactgggataatgggattacagtgggcaaaacatcttggaaatgcagtcaaagttacaatcaatgacttgaatgaaaattctgtgacactgattcaggaaaactgccatttaaacaaattgaaagtggtggtggacagtaaggaaaaggaaaagagtgatgatattcttgaagaaggagagaaaaatcttggtaatattaaggtgaccaaaatggatgccaatgtactgatgcatttgagatcttttgatttcatacatctagacccttttggaacatcagtgaattatctagattctgcattcagaaatataagaaaccttggcatagtgtcagtgacttctacagatatcagttctttatatgccaaggcacagcatgttgcccggcgtcactacggatgtaacattgtccgaactgaatattacaaggaactagcagccagaattgttgtagctgcagtggcaagagctgcagcccgatgcaacaaaggcatagaagtactgtttgcagtggctctggaacattttgtgttggtagttgtgagagttttgaggggacctacttcagcagatgaaacagccaagaagattcaatacctgatccattgtcagtggtgtgaagagagaatttttcagaaggatggtaatatggtagaagaaaacccatatagacagctgccttgtaactgtcatggaagcatgcctggaaagacagcaatagaacttggacctctgtggtcaagttcccttttcaatactggattcctcaaaagaatgctatttgaatctcttcaccatggtttggatgacattcagaccctaataaagacattaatctttgaatcagagtgtacgcctcaaagtcagttttcaattcatgcatcttcaaatgtcaacaagcaagaagaaaatggtgtatttattaaaactacagatgacaccacaacagataattacattgcacaaggaaagagaaaaagtaatgaaatgatcacaaatttaggcaagaagcaaaagactgatgtcagtactgaacatcctcccttttattacaacattcacagacacagcattaaaggaatgaatatgccaaagttaaaaaagtttttgtgctatttatctcaagcaggctttcgagtaagccgaactcattttgacccaatgggtgtacgcacagatgcacctctgatgcagtttaaatctatccttttaaagtacagcacccccacctacactggaggacagtcagaaagccatgtccagtcagcatctgaagatacagtaactgaaagagttgaaatgtcagtgaatgacaaagcagaagcaagtggctgcagaagatggtaaacgtagagaagaattggttctcaggtgtctgtatagatggcctaatagttctctataccaactgtagttctttttctgttctttcaattcagtagagtaaaaataaaaaacagtgtcattttcattcagaaactgagcagtttctaacttagctggtttgggagctttgctttccaagtttttttttgttttaaggcaaacttaaaattttaatggaaacatttcatatgaagccaagtctcactgagatcaccctactgcttaataattcagaaaattttcacatgcaaagtgtttggaattttatgtatgttatgaaagccatcttttacaattcttaatcacatctctgcctaaactgattcatgatgtttatgttttcctgtttgtagtgtacaaaatgaagctgaaggctcacatgttaaaatgaccctgaatagaataggaagaacaatgttcttacaggtcataatgtatttcacaattaaaaaactaaaatatgtacccatttttaagaaatcatacttctctccacattgatcttttcatttcttactagcttttaagaaattaaatacttgcctgagatagaaatactttatttttgtaactttaaggtctaaatgactaaacttcaaagtaagattttgtcagaataaattgagaccattaatctaatataatacttgttcatgagcactgaaatcctgaagaggagagatttggttataaattaaaaaggttgggtgatcttaagtgcctcagttaatgcacgtacagtattcatttggttggttgtactacctctcagaagtaaaatttgtcaccttatggaatgagagtttttgggtttgggggttgtttttttgttgttgcttggtttggtatttttggttttgtgtgtatttgtataaattttctgtataattagcccaggctgatgtaactataaaaattagttgaaaaaaaaaatattgtttccttaatggaattctcacttcatttgaatataagattttggatgaaaggatttggtataaagtttgggtttttgtctcaaggatttgatccatatttatccctaaatatttcttaagggatgtaactttttataaccattaagtggggggaagggggtggagggggtggtaataattataactgaaaggtttaaatatactacctaagaaaaaagtacttctgtgacatatacaaaaaaatctagtggataggcattagatgaatagagaatattaattttgcagaaatgaaggaaaatctcttcgtgctagtacagcgtattcccaagagagtttattttcctttctccaattaatgtggtcataaatttcggtaaaatcaagaaataggtgaagtgcaagctagtttctataatgaccattaaaaaaattctgctgtgtaattcttgccagttaaaattataacttgcaaatgagcagaataaatgaggtttttttcaattaaaaattactataaatccaggaggcaaactattttagcactcagattatctgatttaatacatattattgaatatcagtctcaaattttgctaaatgcttatcagcatgaaatatgttgatcagtgatgagttgggcttaatgcaaagatcctaatttaataaagaaacctgtaaattactgttacctaaaatatatgtgtatattaatttcacatataaaggtagatttttcaaagaaaaatttggtaggcggtagtttagaactctgatcaggtactacatcaaccaaaagaggaaatactttaaaaattccttttagcaacctgagcaatcttattctcgtaacaatagtagtaatttgggacattgcaaatgtttatcatgttgtaaagtagcatcagttgtatcctttcattaaaacttgataaacaaaagaacgagttaaggaaaaaaaaaaaaaaaa

SEQ ID NO: 442 - DNA, 4279 bp, Homo sapiens
acccgcgcagggtgtgctagcgcgctcagccctctccggccggcttagtctagttcccgggcctcgctcggttccagaactttccagaaaatgccgcgctccctacggctcaagggtcaaatcgcgtcatttccgggaggggacgaaggggtagttctttcacctcggctgggcgcctagaaaagcctagaaacagctccttttttcttccgcctccgagtcttcgcgtcagcgtcctgcgcagggcccttggggcgaatcgcggtgcgcgtcggggcgaccgccctccctccctgggaggggcgagggggctagcggcgaccgctggggcgagcgcgcctgcgcgctgggtgattttttcacgtgtcgccagggccggactgcgagtctctttgcggcgctacactagagcagagtacgagtctgaggcggagggagtaatggcaggacaagcgtttagaaagtttcttccactctttgaccgagtattggttgaaaggagtgctgctgaaactgtaaccaaaggaggcattatgcttccagaaaaatctcaaggaaaagtattgcaagcaacagtagtcgctgttggatcgggttctaaaggaaaggatttctataattggcctgatgaatcctttgatgaaatggacagtacactagctgttcaacagtatattcaacagaacataagagcagattgctccaatattgacaaaattcttgaaccacctgaaggccaagatgaaggtgtgtggaagtatgaacatttaaggcagttctgccttgagctaaatggacttgctgtcaaacttcagagtgaatgccatccagatacttgcactcaaatgacagcaactgaacaatggatttttctttgtgcagctcataaaactccaaaagagtgtcctgctatagactatactagacacacacttgatggtgctgcatgtcttctgaatagcaataaatattttcccagcagggttagcataaaggaatcatctgtagcgaaactaggatcagtatgccgtaggatttacagaatattttcacatgcttattttcatcatcggcagatatttgatgaatatgaaaatgaaacatttttgtgtcatcggtttactaagtttgtgatgaaatacaatttgatgtccaaggataacctgattgtaccaattttagaagaggaagtacagaattcagtttctggggaaagtgaagcatgaagggaatcataggaaaaatgtactgatcatataattaacattatgtactgtatatatcattttagacacatcaatcatgtatccatattatagcttctttgtttagtataggtttttgtatgctgggtttgccttttaaaatgggaaatactttttaagttattcataagctgtatattcaccagtgtggcactcatggtttttaaataagattagtattatctgtttataatgcctgttaataaaagaatttacagtttggtaaaattgctgctaaacaatcattggatcacaatcctcatcagacaaacccatctgtaaaaaaaatgagggagagcttgaggtttcacacaagccatttactaaagaggtagaaatgttttctattggttttaccttgagtttagatatcctaaaaaattctgtagtacgtagttttgtcttacctgttaactttccccaattgagataaaagtgttttaaaattctgtttatagtttttgatatgcatatataattatgtgtatatctaaatacaaatgcaaatgaagcattagtaatacttaaataattttactgtgctacataaagtataacatacttggaaaggatttaccgttctgcaacaacggactggtacatacaggatgatcacaatggtaaggcacataaattattttcccactggaaacctgccctgtccaccccttctcatttcccttaaccttatcttcaaactactttagctgagaagcttttcaccagactgagttagtggtggcttatacctatttatatttgtattaattgcttacagattatacctcatattagcaattacattacactacaagaaaatgtatttgcataggctcttgcttatctttgttttgcaaaattgttctacttagaaaacagtccttaaaatagtttgactcttcctgttagtaatatattaatctttcatttaaccagctaggcagcattaaatagaattgaagaaataccatagtatttattttacaccccctctcccacgaagtttatgtttggattacatgcacgtgtgagattatttgcaataattcataggttccaagggtgttgatgaatagtcatacatttttttggactttgttataattcattgtggtaagaatgattgaaatgcagatttaacaatcttataatctattgaatgccatttttgataaagcactggaggtcttattgccaaactgattgtaatgaggcagtaagggtgaaaacattgtacatgttgtgaagaaagtatttaaatccaacttttgaacagatttaacaaacatgaggaacttttttatttagaaggataattttgaagatgaaaatgtattcatcttaattgttttttcaaatttaagggaataatttataccatcttttcagacaagaatgtacagcaaaaataaggggaacagtagtatactgagagtgtgtgtatgtatagtgtatgcctttccaagcttgccagtctttttggctttgaacactgcccatcagctacagtcattactgttccccaacccacaactatcttttaagaagtcttagttcacagtgaaaggaatgatgactttgaaattatggatttatattaatggcactataaaccaatggtaatggtaatttttaaacttgctaaatattgagaaactaaactactaagttaataaattatatatagcagtgtagctgttctctctagatggtgtctcacaatggatttctgttgcttgactattttcttagtgaatatttatactaaggtagtgactgagatttggtgatctggctgagtattttgaaacacattttgaataatatggcttagtgttaacggggacttaaatatgatttttttttcttactcatttcaccttccctgtactgtatgtttggaattgatcataaaacatctccaaaagaaaataatcagtttgtagtcttgcttttgtattcatgttgataatcttactaattgtgaagttgattcactactatactaggtaagacctaagtgaaacagttcctgtttttccttaatactgttttcagaattttgaaaatgtacttatatatacataaatactactaaaaaattaatgagcctggcaaaccattgatttataaaagtaagtgttctaagaggggaacaagacagttctgtgtgataaggaagttaggctccactttttgtttgaattaccctatgtatatccgaaggtaaacttaggcttttctttccaaaagatcgtatagtcaattcattctttttctcctatcacatctgggaaagtagctaacttttaactatttatgttcccataagtaacccttcttttgtgtgtatacatttccttttctctgacttgagatgtcaaatttggatttctagaacagtttctcagttaaattcttgatgacttaacaacttttactatcagaatacaattagaaatccttggtcaggcacaggggctcacgcctgtaatcccagcactttgggaagccaaggcagacagatcacctgaggtcaggagttcgagaccagcctgaccaacatggagaaaccctgtctctactaaaaatacaaaaattagccgggcgtggtgctactcgtgaggctgaggcaggagaatcgcttgaacccgggaggtggaggttgcggtgagctgagatcgtgccattgcactccagcctgggtaacgagcaaaactccgtctcaaaaactccgtctcaaaaaaaaaaaatccttgattacattgttagtaaggactgtgttacgattataaacacatttattggttgatgtcaaattcactgtaatagtagaactaagttttttatgtgagtactttgccctactgtctatatgatgacatcttttttgagcagctaaattttaaattgtatatactttattttgtgaatccttgttgaatgtgctaaaggtttctttgtgtagttcttccatgctatgcgaatattttagtaaaagtagttgattttta

SEQ ID NO: 443 - DNA, 3318 bp, Homo sapiens
acggtggcccggaagcagtccccggtgtcggggcaggaggcacgcgcgcggctgaggcgaggtcgctcggcgcagctgttgcggggccatggcggggaccgcgctcaagaggctgatggccgagtacaaacgggcccagaagacacctgctttgagtttggtgtttttcctgccatcctgagtttcccacttgattacccgttaagtcccccaaagatgagatttacctgtgagatgtttcatcccaacatctaccctgatgggagagtctgcatttccatcctccacgcgccaggcgatgaccccatgggctacgagagcagcgcggagcggtggagtcctgtgcagagtgtggagaagatcctgctgtcggtggtgagcatgctggcagagcccaatgacgaaagtggagctaacgtggatgcgtccaaaatgtggcgcgatgaccgggagcagttctataagattgccaagcagatcgtccagaagtctctgggactgtgagacctggcctcgcacaggcgcgcacacaccgccaagcagctcagcattctcccccggcacacttagtgacagtgatgctctgtgctggtaccaaacaaggcagacttgcaagaaccatggcatcttttttttttttcaaacctttcctacttcaaacaggcttctcttctgaaatgatgacttaatgtcgaatattgacagcttactgcagttttacagtattcctcacaaagggcttcaggtagattatcagagctgtcagcactacctctccccgctgaaaccagcagttcatggcttcctgtggattccctccctccctggagtgttgagggggttgtacctgccagacttccaggggacgatggaatacccagaacgctccttctgaagaaatggggccctgtagctgcagcacaggggaagggcccggcaccctttctgggtccttcctggttccctgtgggccccatgaggagtccattacttcctttcttccttcatattttacaggcagatgcttttcttataatctaattacatcttttcatttgttatatattacaaaccatcacacttagaaatacttccaggaaatgcttttttgaagtgtgaattaataagaaatggggtaaatagaaaagaaatttattgctgattggccaggtgcggtggttcgtgcctgtaatcccagctctttgggaggccaaggcaggtagatcacaaggtcaggaaattgagaccatcctggctaatacagtgaaaccccatgtctgctaaaattacaaaaaattagctgggcgtggtggtgcacgcctgtagtctcagctactcaggaggctgaggcaggagaatcgcttgaacccgggaggcagaggtagcagtgagctgaagtcccgccactgcactccagcctgggcaacagagcgagactcagtctcaaaaagaaaaaagaaatttattgctgatcacaaggacagacagttttttcccgaccatactcatcaaagatttacgtttgtatattagtaactagtgcattactagagcaggtgcaggtgaggtctttaaagtttcaatgaaagtttcttctggatctacagaaaaaatttttttttttcaatctaaaaactggaaattctagggtttttgtacattttggatgcactgggaatttattagcacaaaatcattctttgcaactcaaaattcagaagggactctaccatatcttagctcagagcacagaggagtgccttatccccacacttgactgggctgtggaggtgggcatgtgggcccctgggcccaggctggggacagagcccttgttttgtgacttaggattttgatgtggttcccatgttctctaacagggccagctgagcagcacaggccaggaggccacagtgtaagcaataacagatctgccacatgcagaagcaaatatcaggcctgtcgcacacgggcggcatttaaataggaatttctatttttgaaataagggatggtctatgaggcatacagtagatttgatgtgatccttttctccctcccttccataatggatcgtggtctgtgtgactgaacccacacagagtgtcatgggtgacagtttctggttgaagtagctccacgcctggcttctgtggacagcagattcttttccttctcacaaggggctcatttaaaatttggaggctgggtgctgtggctcacgcctgcaatcccagcactttgggagactgaggcgggcggatcatgaggtcaggagatcgcgaccatcctggctaacagtgaaaccctgtctccactaaaaatacaaaaaattagccgggcgtggtggcgggcgcctgtagtcccagctactctgaagactgaggcaggagaatggcgtgaacccaggaggcggagcttgcagtgagctgagatcacgccactgcactccagcctgggcaacagagtgagactctgtctcaaaaaaaaaaaaaaaaaaaatggaacgcagggcaagaactcgtatttggaaggagatgggggaaaggagcggtattatacctatgttgtatttgcaggcaaatgagatggagccctctctgtaaagaagagtcatttgtgcaagtagacggggtctgtgggtgcaggccctggaggggcacacaattgcctggaggcttctgtgagatcgggagagggaggagaggcagtctcttgacaaaataaagtatttttattcatttgtatttattaaatgaaaaaacaatcccatggtgtccctgttgtgtggtggaacctaatgactgttgaaataaagttctgtgttttccctgccctgcagtgtgtgtccctttgtcgtattgtcagaggagcctgtggccactgcccccagggagcacaccagatcatcccagctgggattcctcacggtgggggcttttctgcagacttgggttagctctggcatgttttcttctgtttctgatctcccttctgtcattctgtggtcttcctctggaattctcaggttagttggggtctgtgagacggatgtgttcactaacctataaatgacattttgcagctttttcagcagatgccattgtgtgagtggcacatttgaccactagaagccagcaggctgttccgactgcgcttccctcctgcagttgcttagaagcacagctccctgtcatcactcctctgtggtcctctgtggtcacggttggttgcgatgagacctgcctctgcgtcttgttacttagcatgtcaataaagaggcagattcctgtgtcagtgaaaaaaaaaaaaaaaaaa

SEQ ID NO: 444 - DNA, 5627 bp, Homo sapiens
aagagaaggggctgggggcggggagatggtgagtcggggataaacactccgcggcggtggcggctgctgctctgctccgggttctgtcactgtgtcggcggtgcccagctcactggccccctccctctcttgtcgagcgtggttgccagagaggctccctcagccctgctccgcggggtccacagcgggctccacagcgggctccatagcgggctccacagcggtccggcggcggcagcgagcccgtgggcagtgggggttggtcccgtggctccggcccccggtgcagaatggcggcggcggttcggatgaacatccagatgctgctggaggcggccgactatctggagcggcgggagagagaagctgaacatggttatgcctccatgttaccatacaataacaaggacagagatgccttaaaacggaggaacaaatccaaaaagaataacagcagtagcagatcaactcacaatgaaatggagaagaatagacgggctcatcttcgcttgtgcctggagaagttgaaggggctggtgccacttggacccgaatcaagtcgacacactacgttgagtttattaacaaaagccaaattgcacataaagaaacttgaagattgtgacagaaaagccgttcaccaaatcgaccagcttcagcgagagcagcgacacctgaagaggcagctggagaagctgggcattgagaggatccggatggacagcatcggctccaccgtctcctcggagcgctccgactccgacagggaaatcgacgttgacgtggagagcacggactatctcacaggtgatctggactggagcagcagcagtgtgagcgactctgacgagcggggcagcatgcagagcctcggcagtgatgagggctattccagcaccagcatcaagagaataaagctgcaggacagtcacaaggcgtgtcttggtctctaagagagtgggcactgcggctgtctccttgaaggttctccctgttggttctgattaggtaacgtattggacctgcccacaactcccttgcacgtaaacttcagtgtcccaccttgaccaaaatcagctttgtaactgttttcaaggaggtgcttaggattgtgggtttctgattgcatccactagcttctctttttctcgccataaaaatttgtctctgagagactatacattccaatcaatttgaagcatccaagaattcttagaccgaataagcaatgtccacatctcagcaatccccctctttgctctcctcgtgtcctctcccagacctttcttccagttttctggcttactgtgttacttgcctaggaggaatgtccaagtgtgtcttgtacttaggaaactgaaggaaacaaacttttgaaattgagatcctgatctcagaactccaaagtaagctttgaaagcagcatttaagagcacttaaccatggacctcaccaccagtgaggaagtcaggaatacctctagaaaacacgcccttcacaccgcgcatgctcattcccccgacgcgccgcgtgtggatgggagcagtatttctcactttaaaatggacaccttgatagtgtgtctctggggttgcacagctcatcaaagttccaaattgtttgttctcacaaacaaaacggtacaatctatttttgtgcgatgttcttgggacctcgctgtgttctgctatctcgaggcacattctcccctccaactttgttaatgctacttgtctctggaacatttttttttcctacctcagagataaatgagatctccatttcccacttaacacagtgattatccttttttccccccccaaaatagtgacatttggtccaattataatctattttcctattgaactttcagcaataactgagctgtggcactagcagagctagtagccattatcagtgaaagaaaaagtccacatttctactctctgttgcaggtgaacaggagaggatggtacactgttactagaactcctctccttattgattatttttggacacacccagaaacttctttatggaggcttttgggttgatagtttaaaaggctgatttttctttttggttatgatttctcccttaagtggtctccgactttgtagcatttttatttaagctaaaacagagcacatgtatatgtacataagacacattaaatctataaatactatttattcattttatataaactaatgtaatggaaaacaaattcttatgactttgtggttttatagatgttctagaaactttgtatgtaggtatctacaaaattagttcattcccctgaatatttttgcattcatatttttgaggtcttgatgttttcagcctctggcgaatctttttcattgaatttgaaccatttgtaaaatctgtgatgctgaagcagagtgtgtcacaaagtgatgagaacattactaaaatccacggacgcactgcgacctaagggctcaacggctgactcggcagcgggcagccaccccacgctcccctgcggtcactcgcacaccacagcctgaagctcccccagcgcctgcacctcgcacacagctaaggtcaaagttcaaacgcactccacacggaagctcattctatacccgaagagcagtctcagaaagcaagattacttttgtgttttttaaaaaatgattctttaatgtatttttctaaacattctgattggaagtagtggattcctaaatgattccaaagtcacctgtaattcttctgtttttgttttgttctgtcttttcttcattttggctttgggtggggggaggggcaggtgacacaaaggattttttttttttttttttaatttttggaatcttttccaataaccagctaaagatttgcactgaaatacaacttgtatgccttttgcatttttaaagcctgcttcctggatttaagcagagtgatagtgttcaaagagccagttcagcctgtaacatatttgaaaaagatatgtctgcactttgaggtcccttttgaatgccattcactagacctctcaagcattttgtttcattgctacatccaagcgcctcacaagtccacaatgcgggacagcatcaaaagctcaagactttggaaaaagcttgtgggcttgcactgggggagggaagggaacaaaatttgtgtacttctttgtttaatttagaaataaggcatccaagagatgccattattttctgtgtttcaattgttgtgcctttgagttaaactgcatttttgtcttttggttgaaatctgaaatgtactgtcccaatataaaacagtaattatttgacctttgcactgtttgtctggtccttttcagtttgattgcatataaatgtggaacttgatagatctctatatttttaatgcacttgtgataaactggcagcagggttagacattactttcaaagcttgaggtagaccgagtcagcatgctagacaggcttctctctctaaccaaaactgtaatcttcaggaccagcaaactcagcccaaggcagctaatccccccaaccccatcctccgcgccccgtgcggctgatcggcagccctgattcgccaatttgtcctctctcattcactgatccaccagcctgactgctaagagctatagtctttttagttgttttgtctttttaagcaagatgaaaacctttctattagggattttggggttgggaggggatgggcagagatataaaccccagcctttaagactttgacaattgtacgtaaatacagatgtgtataaatataggcacatgcatatttttatgtgaaagttgattttaaaaaactaaaaaaatctaaactgcactcttattgataccatcataacgcaagtgggaaaaataagagtacgcagtctaatttaatttcatgcagtgggaaaatatatatgtgtgcttctgtaacatcctgaaaacatagctttccatcccctgttggctttgaatggtgggccgagcacccaggtcgtctgtattttggttttcttttgctaagcagagatcttgaattcttcaaggtgctgatagcaactgctggctcctttctgtagtcacacacctaatgctagtttagtgattcaaaatgcatcacatttttaggcaggacctagattttccctgtcaacctaagatgaaaataatttcagtgttgattcagaactgaacattaagtaggccctcgtcctgcagttggccacttgagtgttttgttttgtttttattttttaaggtgggcattttcctttaacctctactttttcaaaagcaacaaaggggcctcaacctgagtttcctatgggcctctcttctgcatccccaaagcggccaagagcaaatcctgggggataagaaaaaagtgtaaactaggtaggattgtgatgctcaaaataaccatctagcaatatcttggagcttgagaatagattttgtgggcttatttcttcttgcctcttccccatcctttcaagagagaacttatttttgaaaagtatctatatatacacacacacacacacacacacatattattatttaggtttttataccatactgtattggcgagaataccactatcattgtcctttacagtctatttcttcccccaagtcttggtctttttttattttctattttttcatgaaccacacaggagactttaacatcctggtcttttctgtttcttctttgtttccccaagtttgtctgtccccctttgccttccctgagtgttgaacatcaggtagtaaaaggctaaacgcaatttcttgcatgtcaatctattctttttctatgtttgactctgatgcagtgtgtttagcgtgtctagtagctggctactcctatttaaaaactcttcctggtagaagacaacccaaagacccttttcgatgaggtggtttctcattctacatcctctgatctctatagactgtaggatgctttgctttcaaagataactgggttagagggtggggtgtgcaataggtgatttatcatggtttttttcattatcaatattacatggatgattttctcagattcttctgaaagaagaaattgacaggcactgctagattcagctattgaatggctgaagagattgagtatttgaccttctctcaaaatcataaagtgagaattcataaggcacccaatgttaagatttatccagatttttacattttgatttcttctctctgtggggtggcaagttgagggagcattcttcattttagcttttacctgacaaccaaacttgcctttaccccatccctagaattggtgctcttggaatattgctgttaccatcatttttggggggccatcttcctaatgctacacacagcctgacaggggagcagcagatgaaagggtatgctattctgtttccagatgtttctttatgtaaatatgacgccaatgtaaatcctgtgtcaagatcatagagaatggtgctttttactacagttagcacatgcatttttagaaactactacatgttttagagaatctttgctgtgtatatgtaaactgtattgttcaactgttaacaaataataaattatttcattattaaagaaaaaaaaaaaaaaaa

SEQ ID NO: 445 - DNA, 13882 bp, Homo sapiens
ctcggtggcggcggcggcggccggctccaggccgggttttggcgccgcccgcctgctgcctcctggcggctcctgaactccagccccctctctatcagccgctcactccgtctcaatatgtctcaagatggcggccaatgtgggatcgatgtttcaatattggaagcgctttgatttacagcagctgcagagagaactcgatgccaccgcaacggtattggcgaaccggcaggatgaaagtgagcagtccagaaagcggcttatcgaacagagccgggagttcaagaagaacactccagaggatttgcgcaagcaggtagcgccgctgctgaagagtttccaaggagagattgatgcactgagtaaaagaagcaaggaagctgaagcagctttcttgaatgtctacaaaagattgattgacgtcccagatcccgtaccagctttggatctcggacagcaactccagctcaaagtgcagcgcctgcacgatattgaaacagagaaccagaaacttagggaaactctggaagaatacaacaaggaatttgctgaagtgaaaaatcaagaggttacgataaaagcacttaaagagaaaatccgagaatatgaacagacactgaagaaccaagccgaaaccatagctcttgagaaggaacagaagttacagaatgactttgcagaaaaggagagaaagctgcaggagacacagatgtccaccacctcaaagctggaggaagctgagcataaggttcagagcctacaaacagccctggaaaaaactcgaacagaattatttgacctgaaaaccaaatacgatgaagaaactactgcaaaggccgacgagattgaaatgatcatgacggaccttgaaagggcaaaccagagggcagaggtggctcagagagaggcggagaccttaagggaacagctctcatcggccaatcactccctccagctggcctcacagatccagaaggcaccagacgtggagcaggccatagaggtgctgacccgctccagcctagaagttgagttggccgccaaggagcgggagatcgcacagctggtggaggacgtgcagagactccaggccagcctcaccaagctgcgggagaattcggccagccagatctcacagcttgagcagcagctgagcgccaaaaacagcacactcaaacaactggaagaaaaactcaaaggccaggctgactatgaagaggtgaagaaagagctgaacattctgaagtccatggagtttgcaccgtccgagggcgctgggacacaggatgcggccaagcccctggaggtgctgttgctggagaagaaccgctcgctgcagtccgagaacgccgcgctgcgcatctccaacagcgacctgagcgggtcagccaggaggaaagggaaagaccagcctgaaagtcggcgcccgggatctttgccggccccccctccttctcagttgccccgcaacccgggggagcaggcttccaatactaatggtacacaccagttctcaccagcggggttaagtcaagactttttcagctcatccctggcaagccccagcctacccctggcttctacaggaaaatttgcactaaactctcttctccagcggcagctaatgcagtccttctactccaaggctatgcaggaagccggaagcacaagcatgattttttcaacaggtccatacagcacaaactccatatcttcccaaagtccattacaacaaagcccagatgtcaatggcatggccccatcccccagccagtcagaaagtgctgggagcgtctccgagggcgaggagatggacactgcagaaatcgcccggcaggtcaaagagcagctgattaagcacaatatcggacaacgtattttcggacattatgtgttgggactgtctcaagggtccgtgagcgagattctggcccggcccaagccatggaataaactgactgttcgtggcaaggagccatttcacaagatgaaacagttcctctccgatgagcagaacatcctggccctccgtagcatccaaggcagacaaagagagaatccaggccagagcctgaacagactatttcaggaagtaccgaaacgaagaaatgggtctgaaggtaacatcaccacccggatccgagcctcggagactggctctgatgaagccatcaagtccatcctagagcaagccaagagggagctccaagtgcagaaaactgcagagccggcccagccttcctccgcatccggcagcgggaactctgatgacgccatccgctccatcctgcagcaagcccgccgggagatggaggcccagcaggctgccctcgaccctgccttaaagcaggcaccactgtcccagagtgacatcaccatcctcacccccaagcttctgtccacctcgcccatgcccaccgtgtccagctacccacctctcgccatctccctgaagaagccctccgcagctcctgaggccggtgcctctgctctgccgaaccccccggccctcaaaaaggaggcccaggacgcccccgggctggacccccagggagcagccgattgtgcacaaggggtcctgagacaggtgaaaaatgaggtgggccgcagcggtgcctggaaggaccactggtggagcgcggtgcagccggagagaagaaatgccgcctcctccgaggaggccaaggccgaagaaacgggcggcgggaaagagaagggcagcggtggcagcggaggtggcagccagcctcgggccgagcgcagtcagctccagggaccctcgtcgtcagagtactggaaggagtggcccagcgctgagtccccatactcccagagctcagagctgagtctgaccggggccagccgcagcgagacaccacagaacagccccctgccatcctccccgatcgtgcccatgtccaagcccaccaagccctcggtccccccgctgacccccgagcagtacgaggtctacatgtaccaggaggtggacaccatcgagctcacccggcaggttaaggaaaagctggccaagaacggcatctgccagagaatcttcggggagaaggtgctgggcctgtcccagggcagcgtcagcgacatgctgtcccgaccgaagccatggagcaagctgacgcagaaaggccgagaacccttcatccggatgcagctctggctgaacggcgagctaggccagggtgttctacccgtccagggccagcagcaagggccagtcctccactccgtgacatcgctccaggacccgctgcagcagggctgtgtgagctcagaaagcactccaaagacctccgccagctgcagccctgcccctgagtccccgatgagttccagtgagtcggtgaagagcctgaccgagctggtccagcagccctgtccccccatcgaggcgagcaaggacagcaagccaccagagcccagtgacccgccagcatccgactcccagcccacaaccccgctgcctctctccggacactcggccctcagcatccaagaattagtagccatgtccccggagctggacacctacggcataaccaagcgggtgaaggaggtgctgacggacaacaacctcggccagcgcttatttggggagaccatcttagggctcacccaaggctctgtctctgacctccttgcccgccccaaaccctggcataagctcagtctgaaaggacgagagcccttcgtccggatgcagctgtggctgaacgaccccaacaatgtggagaagctgatggacatgaaacggatggagaagaaagcctacatgaagcggcggcacagctcagtcagtgacagccagccctgcgaaccgccctctgtcggcaccgagtacagccagggcgccagcccccagccccagcaccagctgaagaaaccccgggtggtgctggctccggaggagaaggaggcgctgaaacgagcgtatcagcaaaagccatacccgtcaccaaaaaccatcgaagacctcgccacccagctcaacctgaaaaccagcaccgtcatcaactggttccacaactacaggtctcggatccgcagagaactgttcattgaggaaattcaggccgggagtcagggccaggcgggcgccagcgactcaccctcggcccgcagcggccgggcggcgcccagctcggagggcgacagctgcgacggcgtggaggccactgagggcccaggcagcgccgacaccgaggagcccaagtctcagggagaggccgagcgggaggaggtgccgcggccggcggagcagacggagccgccgccctcggggaccccgggcccggacgacgcccgcgacgacgaccacgagggaggccccgtggaaggcccggggcccctgcccagccccgcctccgcgaccgccaccgccgcgcccgcggcccccgaggacgccgctacctcagccgccgccgcgccgggggagggccccgcggccccgagctccgcgccgccgcccagcaacagcagcagcagcagcgccccccgcaggcccagctcgctgcagagccttttcggcctccccgaggccgcgggcgcccgggactcgcgcgacaaccccctgcgcaagaagaaggccgcgaacttgaacagcatcatccaccgcctggagaaggccgccagccgggaggaacctatcgaatgggagttctgaggggccgcggccctggggcgggcagccaggctgggccgcaagggcctggacggggtcggacggggcaggcgctgcggacaccgtggcctgggcttggcccgcggcctgcaccgaccccgggccggacctgagcccgcagcccagaccccctccacggtccgcggcctgcaccgacccgaggcccagatccaaggccgcggcccagacccactctgcggcccgggccgaccctgcggcctccaccaaccccgcggcccagacccagcccgcggcctggacccctggaccgctttgcgcacttaccgccctgcgggccacagggcaaaatcgccataggccaaggtgcatatagaaaacaaaggagcattaagcccaatctatgtcgtgttttcaaggaagaaaacggaaatgtgtggtcgagcttttttgtaccctgaagtgttttttttattgccctaagtgatttccacaggttctggaataactcttacagctttgccttgtgtcctcctgttccgtgtgggctttaaaagaaaaaaaatcaaacccacatattaaaagggggctttttatctgccatctaatggcttcagagcgataatacactattatcttcttaaaccaggaaaaaataaaagggggggtgggatttttcagaaaaattaaaaaagaaagtttttgtagctgttcagttgccactaagagattgcacagtcaaaacgactctaaacacactagtttggattcctaaatattttcaagaaaagaatcttctcgtttgaaactttgaattaaaataaaacacatttactccacatattttttaacaaaaagaaaacgtcacatcaggaaactctgattttgtggtagctgacatagtgttttcttgtacgtgaatagaatcctgacatgtagtgcacattgatgtatagctttaactgaccctgggttttgcagaccagggtttgtttaatacactccattctaggccaaatcaggacaaaaaaaagaaaaaaaaagaaaaaaaaaaaagaaaagatccgaatctaggtattttataatctgctttttaacctctaaccgcagagcacgctgatcagacctcatatcttggaggtttaggagacaagttagaactgtagcatgtacctgttaattttgtttaatttatggtgtctcaatctgtctgtgcgtctgcacgtgtgcaagcattgaaagaaaggagagagtagtccgggcgagcacagcaggcagttccagggccagacgggcccatccccaagtagatagcagtctacggatctctctctggcacagaaggcacctcacctcacaccactctcctggatacctgatgaactgagccctcccaggggaagacactccccaggcctgggcagggcttacacgcgcactctctctcttctttccctttttcttcccaccgcaagcactgatgaccctgttgaactcgtgggaaacttcctttctctgcaggagagagaacgtggcattctgggctccccactcccatccctgtagaaatggcccaaactcacaccaaaacgtggatgctcttcaacttccaaacctaccatttgcccttctttcatttcgcctcttagttctttttatgcacagttttagggcagtctaagtacaaactgaaagtctaacttgtctctgattcctcccttgtctatgtgtatatgcgtgagaatagaggcgggtgagagtgtgcgtgcgtgtgcgtgtgtgcaattttatacgtctgtgtattttcttaagtacctgtgcacacgtagagtgcattactgccacctttttcaataagctgttttatcagttacggcttctacaagtttgctaatttagacttctttattgccatatctttaaactaacaatagatgatttcggtatatatatatatttttttttgcttatttataggtgctgtattttattatctgattgttaggaagggatgaaaggggcaaatattctttagagggatagactgccggcagtattgggtataatttacaagatgtagttgtcatactgtatattactgattgaaaactttttgaccgtattgtgtatcattgaaacctttgtcttaggtcaacatctttggatgacattttaatggtgcattcattatttcttaagtttaattaatattacttttttttttatttggggggtgggagggagttataattttaaaggtatgctctggctgttccacctccgtgtgcttgttaattaacttgtaggactttgactgtaagatgtgaaaccacgtttcttgcatgatgttttagagattatttcatttacagtcttttaacctgcagctgcagcacttagttcacgttttcacaaatttcaagagtcactacactaaagacaatgccttttcatgaataagaagttttcagaaggctctagggggctgggaggcaggctgttcgtttgtcttttgttgggggtatcatttctgaacttgaaatccagttcagggagaagagaattcaaaattagaggagcttaaggggacacgggtcaacatctagctcgattcaggtgcattgagaagagtgagttcacatcggtgacccttaggacagtgagtggcagagccctgacgactgtggtgtcctctccacaaaaccctcaagggacttttgtcatcatgtgtgatgaatctttaaatatcgtctaattttcataagaatgaaaagaagttaacaggaaatagtaggctagggtttagttttaaaggcatgactgttatttacaaaggtgttaaatctgaggaaattgacaaatacagatttgtccattctagtggccaaacagtaacagtctaaaatgcagtcattttgaccctcccaagcaatttagtcatatgtgttgttttctcttttctgtttttacttcttagatttttaactaggttactgttggttcccattctgtcttttttgccagacttacatctggtgccagatacaatcagttggttaaattttgcttgcagttctgtgtattttttttcctctattatttatttttttaaaaaaaatagagatcctaaccttagatctttgatgtgaagctagcactgtctgtaatacttctaagagctgccactaaaataatacagcaatccgtggccaggggagcaccccctcctggttgggcccctcagttggagtctaagggttaatctctcatcttgctaagcagtattcaagtgccttgaacagtgtcccctcggcatggctccccttcagcaggctggcattccaagcagtggcccccgcaggcagccgacccccttcctcttcacgctctatgagtttaaaaagctgatttgtacctctcccctgggggaaacggttccatataaaacactaacacttaattacaagctccattatgccattttaaatggcttctttttgttaattggaggcattgttcataacttaaggcttttgccattaacttagctggctaagcagaggctcggggtaaaatcagtgtttgcatttagcctcttgacccggagttccggcccaagctcccttgtgatagccgagatggcaggtgtgtgagttctgtcctagacctgtgcccaactcacttccaccccagaggagtcttctgtcctcctccccaacccccgagctccctggtaacctcctcttgaacttctgtatcagtgaagacatctgtggtttctgctcaccagacctctctttagaaagggttatcagagccatggagcttagctcaattggattcttctagacgatcttaggaggcatcttggcatgaggcagcttctaagcgtctcctgggacaggattggggtgacagcccagggatgcatgcatgggagaactctctgagaaatgccaggatcgtggctcacagggacccaccatcaaaacctgctactttgtgcaagtaattgaggcaaaagataccagtcgacagcctccctggggtagatcccttgtacctccaaagtacaaatacctccctgctcagtttccttcctgtcgccatctttgttttcttcccattgaaaaaccatcctgtctgatgtggacgttcaggtctgctggttggcggtccgggcccagagtgcagcagagctctgggttaaatattcctttctggccaccgcccaagcccaggtggccagctctcataccccatctccctccttggccagggccagcatcaggcgtgcagctcatgaccagtttacacaggctgcaaagagatcgctgtgggcctcggctgactactttaagattatgccacagccaggccctaaaaagagaggggaacaggagtccccaggtgagctctctgacgggcaggtgccttcccgactaaggttggactggatgactttgttcctcctgcatgcatgtcctttgatgcaagggtgatcaatgaactctgttgacattctatgcaatgtttttcattcctctgattttagcaaagcaaatcttactgaaaaatagcagagccaggggaacagacgcatgtccttctgggagtcacacaaaagcagagagattttgaactgaggggcgacagcctttgccttaaatgcagtatgacaggcgcttcttggcagaccagtaaaaacaaaagcccatagaccttactcatcccaaggccgacaagccagctgtacagggcgagatgtagcaacacggggcatgagcggtgggcgtgctgggctatttgctgtggtactttaggctggaggtttggctcctgtgctgccggtggggggccctgtccctccccagatgtcctccctcttcttcacactcctcattgtcccttctacctcactaacctgtcttctccatctgatgtcacccagaaccacaccccacagaactgtgaggcacgtgggctggagagagcagaaaagctgccagcgcagcagacacgaacatccctctgcctggtgggccggctttgtgtgtctctccttttgtgagcgcaacacggacaaacagctgtgctctgcaaggcacacggatgtttcccttccacctgttcccaaagctccagcagctgtttcttttgcaggcagggcgtggtctcggggctccgagggtcttgtctttggtccgccttcctttctgtccagtcctgctcagctgttaagatccatcatggccattatccttgtcccggactgccccaaagttcccagctggctttggggaacactgtagctcttgggtgtctcttgtctctggcatggttttagcgtcactgcgaacactcctttgcaaacatcaaacatctcaaagacggaaaaggatagatggcttcctccagcctacacgccccgtccacagtggcatcaccctcttatcccaaaagaatatgccagttcccatccagcaccgaagaaaatcagctcctggggctggtggttggaggtgggtctgtccactgtgggggccaaagtgttcccctgctggagacagtttgcaagtaagaacctaaggatggggacagcatcctgtgcttgggcattgaccagccaaagctcacatttagaaagccctcagtgcttctgtggtttcacctgggcatcgacgacattagggaagcctttgtgaccacaagggcagggcttgtgccctgagtggcgaggtggtgacctgaggccagtgtgatgtggttggatctcagcgtgtactgaatgccagtctggccggcacactcgaacgctaagagaatggtccaatttgatgatcttatttctatttcgatcaggttttgactttttgtagatgaaaactaccagggaaaaggggaagcaggtacccaataaagtttagaaagatccagtctgtgaaacccttagagatgggctgaaagttaagtccaccaacccttgggcttaatcaggacggaagaggagggggtgtggggggcagagcgtaaaacaagccccagccctactcccggccccccagcccagtcttcccaatcccagaggccccggcggcctgtgctcctcaccaccctggtcaggggaatagaaggaaatgcaatttccgcctgtctgcccgacttccaaaaactgcctcctcctgcccaggcctctcccaccaccaccttccctccaaagataaccgtgtccatgccatccgtggcatcatctcgagttttcatttttggatgaagtgacatttagctttaacaagacatttccaaagcgcctagtctcctccaaaatgctaactttaaaagttgggcattgtaggcgaaaaatcccaaaaaaaaaaaaagacaaaaaaaaaaggctggcgagagaaagacatttggctatgcataaatgtgcacttcccccatgcccccgttcttaaactcttaagatgcctttgagttgcttttcatgaatccttttagtttacccgataatgttaagaaagcattagtctacgttactgtaatttctgtagtgtttacgctttaatttctaccacaaaatatgctatatgctatgtatcaagctttctgtaatcagaaagaaaaggtgccttatatcccaatgtcacggctacatccctatggaaattaatcagaagcacagtgtgtacggaagcattgggacttctgctggtgaaacaagagaccattcagcaagacacattgaagtggcacggagctgcttttgttttataattcttttttccccccttttccttcttcttttttattattttattattttttttgtactttgctttaaacggaaagcacttaaatagatgactatgtgtaaaagctctgtgcaattgaaatcatttttcttcattttaaaaaaataacgtattgcacaccaaatgaactcaaagtaagctttagaccaggacgattcaggttatgaatgagtttgttcactgtagttccgtttgttcatgaaccgaagggaaaacaggcctccccgactccctccagtctcccagcctgcctcttggtgaccactgtgctgggcgtgcagggcccgcgggctctggccggagccgctggcctgacgaggcaggatagggagtatccgtgattcagaagctgagacccttccccagtgtctgaggccacagccatcccttccagcacttaatcttgtcttgttgaaatggactgactgctactgacctgccggcgtgcgtgagggtgattataaaaggatgtttccttgagaaaaaaaaaattatttctatcctcttctatttattattaggttaatcatttaagtacttatcaggagtgtattgttattttgtgttttgttgtcataaatgctttttgctgtcactctagtggttactatcctctgccttcctctcctcccctactcccccagagaaccaaggcgtctgggggattgactggggggcagagggggtttccccagcaaaatcaaacacctgtctccagagtagccactcaaaaactggtggtctctatgtgtctaactttttaaatgagagtgtttatgaacaaaaaaatttaccaacgtgtgagggagttgctgagttgaagaatgctcgcttgaggagcttcagaggaatcttagcaaagccaagttcagttccccaaagcctcctagagcctctggtaagacttctgggttcatgaagtttcggcgagccgtggtcagagagggcgcggtggcctggccaagactttacctccaagcgagagagtgatttcttgcaaggcccgcatgggttgatacgttttggttggttttttgttgttgtttttcttgcgtacaaagttggtcaaaaccatctttcaaagcaacagtgttttgtagtaccaggctgtggcttgagggctcacctaggagatcataggcagagggcccctttcccctataggtggttcaacgtggaggaaggttgggtgtggagattgcttgctgtggccccaagctcagccagcaggacacccagttgttgccaatcaggtgtgaaggtgaggcgccctgccttgatcccatgggcccagcagaaggaaacttaccccaggccaaggcaagggccctgctcaccccaaggtaggctgggaagagcatctctttccatatcatcacctccccttctccaagattgccgggggccctgattttgttctctctttgaaagaaaccctccaccgaaacaatggtccccatctccccagaagcctttttttttttcatttttctctaattagtctatgcatttctctctctcaaaccatcttctgcctcttcccttgagaaaacgggcatctcacgtacccccatctgagacctcttggaaaaaaaaaatcccgtgtattctggagatgtgagaattcacccaaaattcttaaaacattggagaatagcttgttataaaataaaagtgggggtaaaaagaaggtggttttccccacatccctttgcattgaataagagacctagttctttgcgtttgtgcaataactctttgctgcttgccttgagagcgggtagcaccacgctcctgtccagactactaacagcacaagacgcactcacagggtggcggaatcttccggaaaactctctataagctcagctccccccaccccacccccactctagcgttttgtcacgtcttacattttagcagtattttatattttctgtaacgcaccaagtcttagatctttctagagcttgtttgttcatcctcacaatcacagatttttttctccaatcctcacagagacccaattgaccaaaaaagaaaaaaggaaaaaaaaaaagtcgtcttttttttttttttttgtacaaatcgctttgagatgcctctggtgtgttgctgtgtgacatctctctggtaacattttatttcttgctatttgtttttctacattaagagtcaaagttgacctggctggcgtgggggtgggggaggcacccgtcggccccttggtgttgtccctctgtctttggttagccatacgatgtttgttctcagcactgtacaacggtccctatataatacggagaagcaatatcactgtatgagactcacaccatgtattattattcactagcaccctaggtgtgataattgaagtaaatatcttttatacaaacacaaaaaaaaaaaaaaa

SEQ ID NO: 446 - DNA, 3230 bp, Homo sapiens
aaaacggacctcagaaaaccaggactagctctactgtcgggggcagggtgaccccatcagtaacctacaacccctctagaacttcacaactccctctcaccatggagtttgcatttgatgcagaaaggcatgtgatccctccctccttctgacctcttagctggggattccatggccacacaaccctgtgactccatgtccccccgattccaggaccccccatggccccatgattccttgactcctatgaccttatgacccctgaccttccaagtgacttccttggactttgacccctgtgactgtgcttcccattccccgcccccacaacctgtgactctggctccctttgggggtcttgttagtctgggcctccccaggaagatgtgggggaggctctggcccctcctcctcagcatcctcacagcaactgcagtcccaggaccctcactgcggagaccgtctagagaactagatgccacccctcggatgaccataccctatgaagagctctctgggacccggcacttcaagggccaagcccagaactactcaacactgctgctggaggaggcctcagcaaggctgctggtgggagcccgaggtgccctgttctctctcagtgccaacgacataggagatggggctcacaaagagatccactgggaagcctccccagagatgcaaagcaaatgtcatcaaaaagggaaaaacaaccagacggagtgctttaaccatgtgcggttcctgcagcggctcaattctacccacctctatgcatgtgggactcacgccttccagcccctctgtgcagccattgatgctgaggccttcaccttgccaaccagcttcgaggaggggaaggagaagtgtccttatgacccagcccgtggcttcacaggcctcatcattgatggaggcctctacacagccactaggtatgaattccggagcattcctgacatccgccggagccgccacccacactccctgagaactgaggagacaccaatgcattggctcaatgatgcggagtttgtgttctccgtcctcgtgcgggagagcaaggccagtgcagtgggtgatgatgacaaggtgtactacttcttcacggagcgtgccactgaggagggctctggcagcttcactcagagccgcagcagtcaccgtgtggcccgtgtggctcgtgtctgcaagggagacctgggagggaagaagatcctgcagaagaagtggacttccttcctgaaagcccgtctcatctgccacattccactgtatgagacactgcgtggggtctgcagcctggatgctgaaacctcaagccgtacacacttctatgcagccttcacgctgagcacacagtggaagaccctggaggcctcagccatctgccgctatgacctggcagagatccaggctgtctttgcaggaccctatatggaataccaggatggttcccggcgctggggtcgctatgagggtggggtgcctgagccccggcctggctcgtgtatcacagattcattgcgcagccaaggctacaattcatcccaagacttgccatccctggtcctggactttgtaaagttgcacccactgatggctcggcccgttgtgcccacacgtggacggcccctgctgctcaagcgcaacatacgctacacacaccttacagggacacctgtcaccacgcctgctggacctacctatgacctgctctttctgggcacagctgatggctggatccacaaggccgtagtcctgggctctgggatgcacattattgaagagacacaagtgttcagggagtcccagtctgtggaaaatctagtcatctctctattgcagcacagcctctatgtgggggctcctagcggagtcatccagctaccactctccagctgctcccgctaccgatcctgctatgactgcatcttggcccgagacccctactgtggctgggaccctggcacccatgcctgcgcagcagccaccaccatagccaacaggtcccagggaagcaggacagcactgatacaggacatagagagaggaaatcgaggctgtgagagcagcagggatacaggcagggctctgcaggtccatatgggctcaatgtcaccaccctctgcatggccctgtgtgctggatggtcctgaaaccagacaagacctctgccagccacctaagccctgcgtacattcacatgcacacatggaagaatgtttatcggctgggctgcagtgcccccaccctcaccttctcctggtgcattcttgtttcatccctgcttctggacttggggtaccctcccaattgccacatcctatctggtcctcttccccagccccatgtggtgacctctttgtcaagagcttgggaacgggccagcctggggaggtaagactgcatcactcccctcctctcccttcctgtgtggcccttgtgaatcagcctccccactctccttggtcattctcaagagtatgagagacagagctccaggcatgtcccatccccatgcacatgtggtaacacacacctgtatcacacatgtgcttacatttccactcacatgcacctctgagcctcccttgctgtcttggacctgtctgttgggtttagtccgtggacatttcagagggagatccccctcccatttaactgtcctcacaggcccttgcctaggatggatgaccaacactgcactcaatgagccagcctctcttttgggggaatcaagcatttgcttcctctagactacagcagggaaagggaggagaaatctgatgtctcaactggcacatgaagcccattcttggaactatgcaaagggcagaggctgggagtttggacgcttagctcctacccctgtcctacctcaccggggcactttcaggggccaggggcctctgaagtctctaggcctatatgggacaatcaattctgactgagctcccccattcccctcgggtgaggatgactgttatttttgtagctgagaacgtggaatcccacgggtttttactgcccttcacccaacctctcccacctccaccccacaatgaatgtatttattgtgagaatggctacacttctttaggaatgcccccacttacaaccaggtgggtggaacaggcatgtgacagagtggggagcctgggctcagctcctccccctgccgttggttaataaacaccctttttccccacaaaaaaaaaaaaaaa

SEQ ID NO: 447 - DNA, 2708 bp, Homo sapiens
ggcggcgcttgattgggctgggggggccaaataaaagcgatggcgattgggctgccgcgtttggcgctcggtccggtcgcgtccgacacccggtgggactcagaaggcagtggagccccggcggcggcggcggcggcgcgcgggggcgacgcgcgggaacaacgcgagtcggcgcgcgggacgaagaataatcatgggccagactgggaagaaatctgagaagggaccagtttgttggcggaagcgtgtaaaatcagagtacatgcgactgagacagctcaagaggttcagacgagctgatgaagtaaagagtatgtttagttccaatcgtcagaaaattttggaaagaacggaaatcttaaaccaagaatggaaacagcgaaggatacagcctgtgcacatcctgacttctgtgagctcattgcgcgggactagggagtgttcggtgaccagtgacttggattttccaacacaagtcatcccattaaagactctgaatgcagttgcttcagtacccataatgtattcttggtctcccctacagcagaattttatggtggaagatgaaactgttttacataacattccttatatgggagatgaagttttagatcaggatggtactttcattgaagaactaataaaaaattatgatgggaaagtacacggggatagagaatgtgggtttataaatgatgaaatttttgtggagttggtgaatgcccttggtcaatataatgatgatgacgatgatgatgatggagacgatcctgaagaaagagaagaaaagcagaaagatctggaggatcaccgagatgataaagaaagccgcccacctcggaaatttccttctgataaaatttttgaagccatttcctcaatgtttccagataagggcacagcagaagaactaaaggaaaaatataaagaactcaccgaacagcagctcccaggcgcacttcctcctgaatgtacccccaacatagatggaccaaatgctaaatctgttcagagagagcaaagcttacactcctttcatacgcttttctgtaggcgatgttttaaatatgactgcttcctacatccttttcatgcaacacccaacacttataagcggaagaacacagaaacagctctagacaacaaaccttgtggaccacagtgttaccagcatttggagggagcaaaggagtttgctgctgctctcaccgctgagcggataaagaccccaccaaaacgtccaggaggccgcagaagaggacggcttcccaataacagtagcaggcccagcacccccaccattaatgtgctggaatcaaaggatacagacagtgatagggaagcagggactgaaacggggggagagaacaatgataaagaagaagaagagaagaaagatgaaacttcgagctcctctgaagcaaattctcggtgtcaaacaccaataaagatgaagccaaatattgaacctcctgagaatgtggagtggagtggtgctgaagcctcaatgtttagagtcctcattggcacttactatgacaatttctgtgccattgctaggttaattgggaccaaaacatgtagacaggtgtatgagtttagagtcaaagaatctagcatcatagctccagctcccgctgaggatgtggatactcctccaaggaaaaagaagaggaaacaccggttgtgggctgcacactgcagaaagatacagctgaaaaaggacggctcctctaaccatgtttacaactatcaaccctgtgatcatccacggcagccttgtgacagttcgtgcccttgtgtgatagcacaaaatttttgtgaaaagttttgtcaatgtagttcagagtgtcaaaaccgctttccgggatgccgctgcaaagcacagtgcaacaccaagcagtgcccgtgctacctggctgtccgagagtgtgaccctgacctctgtcttacttgtggagccgctgaccattgggacagtaaaaatgtgtcctgcaagaactgcagtattcagcggggctccaaaaagcatctattgctggcaccatctgacgtggcaggctgggggatttttatcaaagatcctgtgcagaaaaatgaattcatctcagaatactgtggagagattatttctcaagatgaagctgacagaagagggaaagtgtatgataaatacatgtgcagctttctgttcaacttgaacaatgattttgtggtggatgcaacccgcaagggtaacaaaattcgttttgcaaatcattcggtaaatccaaactgctatgcaaaagttatgatggttaacggtgatcacaggataggtatttttgccaagagagccatccagactggcgaagagctgttttttgattacagatacagccaggctgatgccctgaagtatgtcggcatcgaaagagaaatggaaatcccttgacatctgctacctcctcccccctcctctgaaacagctgccttagcttcaggaacctcgagtactgtgggcaatttagaaaaagaacatgcagtttgaaattctgaatttgcaaagtactgtaagaataatttatagtaatgagtttaaaaatcaactttttattgccttctcaccagctgcaaagtgttttgtaccagtgaatttttgcaataatgcagtatggtacatttttcaactttgaataaagaatacttgaacttgtccttgttgaatc

SEQ ID NO: 448 - DNA, 2053 bp, Homo sapiens
cacctagggcgcaatggaatattccattgcccctcctgtcctgggtctgtgttgcggggaacgctcgcgcggttgccagagaaagccccggacgtgacggatttgcgcgaccccaagcagcccgcccttccccctcccatccgtcattcccctgcgctctctttcctcacccttccccccgccaccgtgggttccagacttgggataagtaaacagcgggtggagcgaggcctacggacccaggccaggtgggagtctgcactcttcaaggggcctgggctgctgctcacgggtattaaagaactccgcgttgttcatggctgaggcgatgcattaggaagatcctggacctagagaacaagtcccccgaacgctgagttggaggcgggacttcgggcgggagcatgctggggctctgcgggcagcggctccccgcggcgtgggtcctgcttctgttgcctttcctgccgctgctgctgcttgcagcccccgcgccccaccgcgcgtcctacaagccggtcatcgtggtgcatgggctcttcgacagctcgtacagcttccgccacctgctggaatacatcaatgagacacaccccgggactgtggtgacagtgctcgatctcttcgatgggagagagagcttgcgacccctgtgggaacaggtgcaagggttccgagaggctgtggtccccatcatggcaaaggcccctcaaggggtgcatctcatctgctactcgcaggggggccttgtgtgccgggctctgctttctgtcatggatgatcacaacgtggattctttcatctccctctcctctccacagatgggacagtatggagacacggactacttgaagtggctgttccccacctccatgcggtctaacctctatcggatctgctatagcccctggggccaggaattctccatctgcaactactggcatgatccccaccacgatgacttgtacctcaatgccagcagcttcctggccctgatcaatggggaaagagaccatcccaatgccacagtatggcggaagaactttctgcgtgtgggccacctggtgctgattgggggccctgatgatggtgttattactccctggcagtccagcttctttggtttctatgatgcaaatgagaccgtcctggagatggaggagcaactggtttatctgcgggattcttttgggttgaagactctattggcccggggggccatagtgaggtgtccaatggccggtatctcccacacagcctggcactccaaccgtaccctttatgagacctgcattgaaccttggctctcctgaggatatattcaggggtccccaggaactcctcggtccagagaccaagtggtggccttggaaagcagatgtcaggctttggtgtgcctgtgaccacctcattgctcccatattatcccccatttttagtagagacggggttttagtagagacttggcctcccagaacccccttcctctgctcctccatgaatgacaattccaggcctcccctacctcatgtcctctcatttgggggattgctccgtgctgtccctttctctcaaggccgaagttgggaagtgagaaaccatgtttttaacttgtggctgcttttgctgctgctgctcctccgtatctggctgtatgggtggagaacccaccccctgcccaccacaggggtctccttccaggccactcaggacatttttagcttctctcctccccatgttcccttttttctctaaagtcccctgacatcagccctcccaactcctaagagggactacccatgagagtggggttctgaggctcccctatggggacagttccgttcttgaagtgtcagtgttggggaatatctgtggcctatgaggcccatctcaggtttggggatcccccagtccctatgatcagtgttggagtacccccctgggagagcctagtttctttgaggccccaggccctcttttaactacctttgaataggtgttatccctgtatttatggaaataaagttccatttcctcagtgtgaaaaaaaaaa

SEQ ID NO: 449 - DNA, 9940 bp, Homo sapiens
gtgtgggaggccggaagttgcggcttcattactcgccatttcaaaatgctgccgaggccctaggatctgtgactgccacccctccccccacccgggctcggcgggggagcgactcatggagctgccgtaagttttaccaacagactgcagtttcttcactaccaaaatgacatcattttccacctctgctcagtgttcaacatctgacagtgcttgcaggatctctcctggacaaatcaatcaggtacgaccaaaactgccgcttttgaagattttgcatgcagcaggtgcgcaaggtgaaatgttcactgttaaagaggtcatgcactatttaggtcagtacataatggtgaagcaactttatgatcagcaggagcagcatatggtatattgtggtggagatcttttgggagaactactgggacgtcagagcttctccgtgaaagacccaagccctctctatgatatgctaagaaagaatcttgtcactttagccactgctactacagatgctgctcagactctcgctctcgcacaggatcacagtatggatattccaagtcaagaccaactgaagcaaagtgcagaggaaagttccacttccagaaaaagaactacagaagacgatatccccacactgcctacctcagagcataaatgcatacattctagagaagatgaagacttaattgaaaatttagcccaagatgaaacatctaggctggaccttggatttgaggagtgggatgtagctggcctgccttggtggtttttaggaaacttgagaagcaactatacacctagaagtaatggctcaactgatttacagacaaatcaggtgattgaagtgggaaaaaatgatgacctggaggactctaagtccttaagtgatgataccgatgtagaggttacctctgaggatgagtggcagtgtactgaatgcaagaaatttaactctccaagcaagaggtactgttttcgttgttgggccttgaggaaggattggtattcagattgttcaaagttaacccattctctctccacgtctgatatcactgccatacctgaaaaggaaaatgaaggaaatgatgtccctgattgtcgaagaaccatttcggctcctgtcgttagacctaaagatgcgtatataaagaaagaaaactccaaactttttgatccctgcaactcagtggaattcttggatttggctcacagttctgaaagccaagagaccatctcaagcatgggagaacagttagataacctttctgaacagagaacagatacagaaaacatggaggattgccagaatctcttgaagccatgtagcttatgtgagaaaagaccacgagacgggaacattattcatggaaggacgggccatcttgtcacttgttttcactgtgccagaagactaaagaaggctggggcttcatgccctatttgcaagaaagagattcagctggttattaaggtttttatagcataatggtagtacgaacataaaaatgcatttattccgttcacttaccacattatttgaaaatcaatcctttatttaattttatttccaacctgtcagagaatgttcttaggcatcaaaatccaaggtagctgtaagaaaaatactggagctaacaatgaagaacagaagtaatctgattagtcaaattattaagtgccatggattactttatgcagcagtcaggtacatagttaggtgaacccaaaagaaaaactcttgaaaacaagagatttcttccatgcacatttacaatattgaggtataattaacatgataaagtgtttccttctaacgagttgtagaaatctgagtaaccacccaaaaaagcaatagaatgtttctgtcaccccaaaacactcccttctgcccctcttcagacagtccttcagctatttcatggctctcaccctagttttttttttttttgcacttttttttttccgggggtataggggaggtgtggggcgacagggtctgtcttgttctgtctcccaggctgaagtgcagtgcagtggtatgatcatggctcactgcagccttggtttcctgggcataagtggtcttcccacttcagcctcctgagtagctgagactatagactagcataaccacactggctaattttttgtggagatgaagtctcactatgttgcccaggctggtctcgaactcctgggctcaaacaatcctcccgcctcagccttccaaattgctgggattatagtcatgaggcacctagtctggcccttttgcaagactttaatctgaaatctaaatttttaaaatttaagtacttacaaaggatatactatccaacatattgcatattatatatgtgctttaaagtttttttttttttttgagagacggtctcactttgtcatccaagctggagtgcagtggtgcaaacacggcccacctcctgggctcaagtgatcctccagcctcagcttccctcacaggcattcactatcactcccagctaattaaaataatttgtagacggtgtctcgttatgttgcccaggctggtctcgaactcctgggtttaagtgattcccccgcctcagcctcccaaagtgttgggcttacagccttgagccactatgcttggctcaaagatatttttatgaaagccctgggactatagatttagctgattaaatttatagaaaaagtcctgtcatataaactggcaaagtctgttcttaatttaattagccaaatcagacttaacttccgtcagaacatgtcttggttttaattcagataaacacacaaacatacttctctggcacagccttcagaagcatcagtttttgttttgttttgttttgttttttgagacagggtcttgctctgtcgcccaggctggagtgcactggcacaatcacagttcactgcagcctcgacctcccagatccaagcaatcctcccacctaagcctcccaagtagctgggtctataggcgcgtgccaccaccatgcccagctgaattttgtattttttgtacagacagcattttgccatgttgcccaggctggtcccaaacttctagcctcaagcaaccctcctgcctcagcctctcaaagtgctaggattgcagtcctgagctactgccccctaccctctttgcgtcttaggagtcatttagattttttttgatccttttgtttagtgcctctggagctgcttacaccaaggcaatacgccttgatatactggatggttgagaggcagcctctttttttttttttttttttttttttttttggaggatagggagtatggctgttgtgaaaagggaggtaaagagaaatggtagatctgaagaggcctcatcagagcacatattttaggacaacacatatggaaattggacatctttaagttggtttccatagagctatgcatgtatccttacccccatgggaaaatgttggtgtgttctcaagggtatgcatgtgtcattttgaagaccaaggccctagaattgtcaaacttaaggatcataaaaatcatgagggttgcttgttaaaaatgtccaaacgtgcagagactgatctttgagatctggaccaggaatttgcatttgaacaagtgttcctggaatctctatgcaagttttatacagaacatacttttggaatccttgccctagacaggggtgtccaatcttttggcttccctggtccacaatggaagaagaattgtcttggaccacacataaaatacactaacactaacaatagctgatgagctaaaaaaaaaaaaaaaaaaaatcgtggaccgggcgtagtggctcacgcctgtaatcccaacactttgggagatcacctaggtcgggagtttgagaccagcctgaccgacatggagaaaccccatttttactaaaaatacaaaaaattagctgggcatggtggtgcatgcctgtagtcccagctactcaggaggctgaggcaggagaatcgcttgaacctgagagggggagattgcggtgagctgagattgcgccattgcaccccagcctgggcaacaatagcgaaactgtctcagaaaaaagaaaaaaaaaatcgcaaaaagaaaaatctcataatgtcgttgttggtttttttttttttttttgagacagtctcactctgttgcccaggctggagtgcaatggcatgatctctgctcaccgcaacctctgcctcccgggttcaggtgattctcctgcctcagcctcccagatagctgggactacaggcacataccaccatgcctggctaatttttgtatttttagtagagatgggggtttcactgtgttggccaggctggtctcgaactcctgacctcatgatccacacacctcggcctcccaaagtcctgcgattacaggcgtgagctaccgcacccagccaagttgtaatttttaataaaacttaagaagtaaacattttacttatgtttataggtatttgatcctaaatttgacacatcattgcccatgaaagaatcctcttaggctgctcagcttcactcttcctgcttgcccaccggggtttttcactgcttctgttagcactaagtacttagacgatcctaagatatgtgcttgagccgaatttcatctttacttgtaggaaactttaaactatttcttttcttttcttttttttttttttttacttgagatggagttttgctcttgtcgcccaggctggagtgcagtggagtgatctcggctcactgcaacctctgcctcccgggttcaaatgattctcctgcctcagcctcccaagtagctgggattacaggtgtgcaccaccatgtctggctaattttgtatttttagtagagatggtttcaccatgttggtcaggctggtctcgaactcctgacctcaggtcatccacccacctcagcctcgcaaagtgctgagattacaggcatgagccacagcgcccagcttaaactattttcttggtctgtttttgattttcttttttccttgccactgcggtacagattttttttactcactgccactaaactaaagcaaggcatagtttatatgtgaagtgttcagagtttactgctataaggaaacttccaaatactgacatttaccttttagctgtagttattgggaccatgtgctctggttttctggagactgccaaattgctcccatttttctgcatcccacctggtttctttctgcatgtcccctttcactttcaaacctcttcatttggatgttaaattatatggtcacctagttataggtaagccttgttcgagttgatatcttgattgtgaggaaggatctgtgtcattggagcttgtttctgctgcaacgtgctgtagactatgaataatgaaatcacaccacattaccatcagatttcttgttttagttgtcaaattaatatttatgattgttatcttgggcgaaaagttcagagcagagatgacaaatcattagaacaacgatgaatttcagtattacggctaaaaagttcttctgtctgaatattaactcactctccttccagtgtacttcacagtaattggtatgcttttttatttaatgcttaaatcaaactttataaaaatcttagaccagatctttaatatggtatgccatttccccagtctaccaatggaatagtatgggtttctaatcctaggcttgtacaatggattggagttgagccatgccagcctccacactgccactaacttctgtaatgtaagattgagtcactgccaagcatttgaaatatgcagttgtgttttaattataatttatgtatagttagatgtatgtagtgcattgtgtggtattatttggtttgtaagaatttatttttaagggtcaaggtcatttgtaacattttgtgtgtgtcaattcaatgcaatgttggctgccttttgaagtctttgatatattggtgaatattcttctgatctataatacaaagctatgtaatgttacctcttgactcgcttttgaaaggaagacaattgttaactagatatttgagttttttcccctcagaattatgtgaatttctgatatatggctttagatactgtgaatctgttttccatttagtcagttatctgcttaaattgttcagaactatatcctaacgagcaattagttctgatggttctcccagtcatgagtgtgcatgtgtgcaagcatgttttgatcctgatgctacctttgctaaaaatggccatagattaggaactagctatgtttttagaatcaaagatgaaccggtaagctgtctcatgtaccaaacgtgaaatttacagtgtttacaaatgtctggaattttgcactgccatagggaatgttaaggttacttggctggaatttatcagacttgtgagtaaacaagttgaagtttagcagatgagggggaatattgaggcccctaaggctaaacaaaataatcagtatctgagatagtggctaatgtggctccccaggcctaatttgggaacagtttttcctgattgctttgagaagtactttcttttgacagaaattttcattctgcttgccattgctatattctccctttataggagccattggatttctttccttttgtgggaaatgtcccattagcattttcagatcttttgatgtgcactaatgccattattggtaatgccgttattggtgaatacagcatagttaaataaactgttacagtaaatctacacttggatttgctgcacctctaccaatagccttttgaatgactgaaagtgttaacagagaaagaggcatgtctgcagaaagagatagctaatattttttggtactttatctgaaatccaagatgctgcttcccctgcaggttgttttccttcttacgatcctcattgaatcccctctgggagcacaggacagttagtagaactctccatttctttttttttttttttagacggagtctctctctgtcgccccggctggagtgcagtggcgcgatctcggctcactgcaacctccgcctcccgggttcaccccattctcctgcctcagcctccctagtagctgggactataggcgcccgccaccacgcctggctaatttttgtatttttattggagacggggtttcaccgtcttagccaggatggtcttgatctcctgacctcgtgatctgcccacctcagcctcccaaagtactgggattacaggcgtgagccaccgcgcccggccggaactctccatttcttaaggtaaagagggtcaaggatacctaaaaagggtcaaataatgctagaagagcaattcctctttcagagcagttgctgtaatttggcaaatgctttatcgaagattgatattaggctaggggcggtggcttacgcctgtaatcccagcactttgggaggccgaggtgggtggattgcctgagctcaggagttcgagaccagtctgaccagtatggtgaaaccctgtctctactaaaaatacaaaaattagccggtcgtggtggcgtgcacctgtagtcccagctacttggcaggttgagacaggagaatcgcttgaacctgggaggtggaggttgcagtgagccgagactgcaccactgcgctcccacctgggtgacagagactctgtctcaaaaaaaaggacatttatcattataacatcttattagagcccctaatttcttatctgaaggcactgtttttttttttaaacagttaagtactgatgtcaacagacaaatatttctgatcagatagtcccctgtcaacagtagcaaatgtggtttcataaagtgggaagaaaacagcattttaaagtaactttttgggagactgatttgagtaataataaaactctggtctcccttaagaaaaaaaaacccttccacctttactgtgtcatttatatccccttagttccaaagttaattatcttatttctggatattgcttttataccaaagacccttatcagcccttgtaactacagtatctttagataagattcctctttccagtcagtcctgggaaatgtttctgttgcagagttaggcggtagatgggaagctgtgatggcagagctactatctaataaagtaacaactcgtagttgaggcttcctttctgtgtgtgatgggggatagggagttagctcccctgttgtctcagcactaagaaattgaggtcaggccaggcgcggtggttcactcctgttattccagcactggggtggccaaagtgggcagattgcttgcgctctggagctcgagaccagcctgggcaacatggtgaaaccctgtctctaccaaaaatacaaaaaaaaagctgggcatggtgggtgcatgcttgtcccagctactgaggaggctgaggtgggaggatcgcttgagcctgggaggtggaggttgcagtgagctgagatggcaccactgcaatccaaggtgggtgacagagacgctgtctcaaagaaattgaggtcaggcttccttcttacagaattatttttttctctgtagtttgcctcattttttcactttcttttcaatgagaatcgaagtgtttcttttgggtttttttttcccccttttaaaatcaacaggaaatgtttcaaaggagggatgaaatgcttcttggcttcctcagcacttggcaaggtagacctcatagcaaccttgaatatgactttctttagtctctagctatgcactattaagtgcctcttgggtagaggtagagttaagtattgagtgccagtcttgacgtccgtatgcctcagtttttctcatatataaaaagcagtatacatacctacccttttctacctcatcatttgttgtagggattaaatccgggagagcaattctgaagcctataaatttccttgaagagatctaagaacctattatgctcttggtgtaccaagctctggggtatatattcagaatacctcatgttctggaagctgagcactagctcccctttattgcctgcctggcagagcctgtttgattactgcaggcccttttacccatgcttctagtttaggtattctttctttgatatgaggctcttgaccagaaaagagttctttctctaggtgttctgagagaagtttgtaaatttggatagtacattctatcctgataaaaccaccttgctgtggtcttgatgtacaaaaaaaaattttttttttgagacagagtcttactctgtcacccaggctggaatgcagtggcgcaatcttggttcactgcaacccccgcctcctgggttcaagcgatcctcctgcctcaacctctcaagtagctgggactacaggcgtgcaccaccacacctggctaattttgtatttttagtagagacagggtttcaccatgttggccaggctggtcttgaactcctgacctcaggcgatctgcccgccttggcctcccaaagtactgggattacaggcgtgagcaactgctcctggcccaaaacatctctttctacatacacttgagtaggtggcataaaatgcactgtcaatatatagaaaacatgaaattttccaaatatttccgatcagagaatcacaagagcagcaaatgtggtttcatcaagtgggaagaaagcagcaatttaaaataactttttgggagactgaattgagtaataataaaacttcagtctttcgctaataataataataataataataataacaacaacttattgaatgtggccagctcactagatgaggaaagaggaaggcattttctgcattcttgcctagttttccttataagcaccactaagttaatagctctgtctttttggtgtttgcactatgtaatgcttttaatactttttaattgtgcttttttatgtattaaatgtttttccttttgccaaaaaaaaaaaaaa

SEQ ID NO: 450 - DNA, 5804 bp, Homo sapiens
atttcagatgcgtgacaggtgcccgtgtgtgtgtgtctgcagtttgggactgtggaagcacgagcttacataagtggttaggcaagctggcgtgtggacttgtgtgggatgggtgcaggtctgcatataaatcatgttcctgggtttctgggtgtgaagcgcacaccgacggggacgagagcgcagaggatggcgcttttagatacttccagtcttccgatgttgtgatcgcagtgtgagtgaagacactcaggatggctcaaggatccggggatcaaagagcagtgggggttgctgacccagaggagagttctccaaacatgatcgtttactgcaaaattgaagacatcattacaaagatgcaagatgacaagacagggggtgtgcccatcagaacagtcaagagctttctctccaaaatccccagtgtcgtcacaggtactgacattgtgcagtggcttatgaagaacctttccattgaggacccagttgaagcaatacacttggggagccttatcgctgcccagggctacatctttccaatctcagaccatgttctcaccatgaaggatgatggcaccttttatcgtttccaggctccgtacttctggccttcgaactgctgggaacctgaaaacactgactatgccatctatctctgtaagaggacaatgcaaaataaagcaaggctggaactggcagattatgaagcagaaaacttagcaagactccagagggcctttgcgaggaagtgggaattcatctttatgcaagcagaagcacaagtaaagattgaccggaaaaaagacaagacagaaaggaaaattttggatagtcaagaacgagccttttgggatgtccacaggcctgtgccaggctgtgtgaacacaacagaaatggatatccgaaaatgtcgacgtttgaagaatccacaaaaggttaaaaagtccgtgtatggcgtgactgaagagtcccaggcacagagcccggtgcatgtactcagccaaccaatcaggaaaacaacaaaagaggacatccggaaacagataacatttttgaacgcacagatcgacagacattgtttgaaaatgtccaaagtggctgaaagtttaattgcctacacggaacaatatgtggaatatgaccctttgataacaccagctgagccatccaacccttggatcagcgatgacgttgctttgtgggacatagagatgagcaaagagcccagccaacagcgagtaaaaagatggggcttctctttcgatgagatattgaaggaccaggtggggcgggaccagtttctacgattcctggagtccgaattcagttcagaaaacctcaggttctggctggctgtccaagatcttaagaaacaacccctacaggatgtggccaagagggtagaagaaatctggcaagagtttctggctccaggggctccaagtgcaatcaacctggattctcacagctatgagataaccagtcaaaatgtcaaagatggagggagatatacatttgaagacgcccaggagcacatctacaagctgatgaagagtgacagctatgcccgcttcctccggtcaaatgcttaccaggatttgctgctggccaagaagaagccagaaagtgagcaaggtcgtagaacttccctagaaaagttcactcgcagtgtgggaaagtcgctggcgggcaagcgcctcacgggcctgatgcagtcctcctgaccgttcctaccgcaggtccagggcctgggcccgcggaccccacaggcaggcggcggcgctccacatctgcggacagagtttccttacgaggagacttggtcactgtgaaggagaaagagtgagggcaatgaagggcgatggtggggagactcggtgggtgaatggggagaccagaaagaaagagtccacagagcctgggctgggcccggtggaggctcctgtttacagccctctcttctttgtacagttgtattccaacactccactcgctaagaggccctgatcccagctcattcaggggagaacacgtcgtggggttcctgtcacgactatcacttgagattatattattatcctcactccctcgctgtctggagacggtcacaccttctggcaaattcaagaggcatgagtggaccgagagcacatccagcatttgcatcacctccctggcacctcccatagttacagccactacatccccaccgccgcctgtcatccctcacgtctctgtggccacccgggtgtcactgccagcaccaggcactgctttcacgtaaaatgtccaaatcacatcttcagcaagaaagcaacctcacggattgccccgcctcaaggtctttccaccctctttgagatcagcgttcggagaggtccccgccagcccggtggctgccctcaggtcccgtcacatgtctcaagggtccagcgttcgaggaagcactgttgtagatgacagagctttttgtttcacagctgcggggattctgctgaccatcttttagaaaattatttcataatttattctggctttgcccccttgctccttggtttattccctcatgttttactcaaaataaacatggccatgaactcaggggccattgggattctcccctctggcagccccaggtgggagctgggagggtccccagcccaggaggtggctggattgcagggctggcagcccccacgtggtggcatcctgacaggcacagtgagacccttgctgggtcaggtctcctttgtgtgtgaagctggggcagagtatgctacgaagggaccaggccaggccacagggctctcctcccagtctttatctgaaggcccagccaaagcacccctctaaaccggtcacctaggggaaatgcaaaaacctgcaaaagatccacctgtattccctgtgtgtgtgtgtcaaaatgaccatttgccaacctggctgtgaggtaatgtatgtaaagcaccgagtcaggtgcctgatacgcagtaggtgcttagcaaacggtagctaatactatcatcattgtcattgttattgtgacacccatgagcccacagacagagctgtattaagtaacctgttttgaatccagacattcactcccccacttgctatgactaccctcctttgatctatttttggtcataggtaaaaaaaaaaatctctcttgggagcatataaacaaaaaacatagaagcaataaagcgatcgctggtatttcttttctcatgcagccaaattcgccagctggtgaccaaaggctcagatgcttgcttatttgcagacccggcctcctgggtgctccccagtgacccatctttccaccccaccacctccaagtcctgtctatgtctgcttccacacagccctgtccccagggcaccagccttctgtccctcacagcagtgccatcgcgggcattaggagtcttcgttatgttgtatccttgtgagttcttgactaccatgcccaagtttcccccactggcaatggttcctctcttggaggtacagtggaaaccagagagatgacagatgttgagtcctcagtgtctcagaggcagcaattcttgctggacacctgcacatgctcagcacagaggctggtactttggaggcactaaccacttgatgagtaaatcaatggcataaagccccattccaagttatggggtcttttgacaggcccctttcatcctctttctctttgtataaacctcatgtttcagaacaaaattacagtctaagttcatttgcccccagccttgcccaaggatccccgggctgtgctgacccctaggcatagggcaaagggtgttcccaagcagcaggcacctcagtgccctcagttatccagggcaaggggcctggctgccccctgctcctccccatgatgcaggggctttctaagccaggctgcagacagggcagggttggcttcttggccattccctctgtgcccccttctccttctgactggtctcaccctggagatccccagaggatctgaccagagccaggtggactgtggccctgagatggagctggctgcaggcttacaagcacctctggggacatccagaggggagggtcagtaagcacaacggagctagggagacttcagatggactcaaacccagagcaataatactctcacaccaccccacagctaaggcactcatgttccccagtagatcaagccagaagctttgcaagaagggagtggaacgaggctgcctatccaaggtccatctaccacgcagaacttggtcatgcaagtacatttggaaaatctggtcttggcccgtcccccattggcctggtctacacagccaaaaattcagactagattagatgtttgcaggcaattctgtagcaaagcaaattcccctaccccgtcccttccccctagaagctgccttagcctccctgactgggtgtggtctctgggcctaggactcctccctatgaggaaaagtgctctccagccacatcttggcagccccacaaccacagcatcagggcagctgcagcaagtgaccacccacccgtcgggttagacacacaaggcaccaggcactggcatctgactaaaataacctttccctacatgggaagaggaaagcttgtaggctggcacatataaacgtccagccgcagccagatggcctgaactaagcagcaggaactctctgggctggggaggagcctcctgcccttctagaaagtgatgcgtcagctttgttctcctgggaaggtgttgctataccccaggaacaaagcagggcccaactgccagtgcagtcagctgggcctgcgctccaggctcaccaccgctaagtggtcaggtaccgggccagcatcctgggagggacctcttgcgactctgagttgcagcttggactagctgaacacatggggacatgctccaggggcttcttccctggcaggattcctgggatttcaaactacctcaccaacaggacgctgaaccaggagcctgccacccaactggcccccttggtgattgtggaaggtgatgtttttcctaaaatgcatccctcctgttctgctccatatacatgtgcttcaaaaaccaccaccaggaaagccttcccagaagagggaaaggattaagggctctcttcctttgggccctgcagaatgtattggagggaggtgttgctgcaaggtccaggagctgggaaactctgggctcggggggagataatgcaccaccagcctcaaaaaggagctgcccaagttgaatatgtagcaaagaccatgggataagttgaatagtggccagacgaatcactaataactcaccatgggaccctctgaagagaggcctgtgctcgtgtaaccatagcaacagcagatgccagcaacctactcattagtaccacccagtgataaggcatcccctgggctagacccaggggccataaagtagcaaagtagcaaatgtagcaataaagggcccgggtctatacggggacagggtccaaatgaccaggacttggccctctccccagccccgatgagggctcagagccagctgctgtcagctgtctggggagggaaggccctgctccataccaggggtccctgttctatactctaagcccactcaccgcatgatcacggactcatcggaatggcctcctcttagtgcatgtggttctctttagtttatttttctggaatttggggattggaccccagaaccaaacatgctggtacagtctaaaaataaatgacttgaacccacttcaatccaaaaaaaaaaaaaaa

SEQ ID NO: 451 - DNA, 2160 bp, Homo sapiens
cttccttgcttccacttcaggcctgcctgaggcacttccactggtctccagttacttgcaaggtcaagtacaacctgcaaggctggttatgaagaagaaactcaaaataacaggagtggcttatggaactacatggaggtaacagaggagggtaccaaccaaaggcccttgagcaatcaggatgttggctctggcaggctgccctgagcacgctcaaccccaaccccacggacagctgtcccctctacctgaactacgccaccgtggctgccctgccctgcagggtgagccggcacaacagcccctcggccgcccacttcatcacgcggctggtgcggacctgcctgccgcccggagcgcatcgctgcattgtgatggtctgcgagcagccggaggtctttgcttccgcctgtgccctggcccgggccttcccgctgttcacccaccgctcaggtgcctctcggcgcttggagaagaagacggtcaccgtggagtttttcctggtgggacaagacaacgggccggtggaggtgtccacattgcagtgcttagcgaatgccacagacggcgtgcggctagcagcccgcatcgtggacacaccctgcaatgagatgaacaccgacaccttcctcgaggagattaacaaagttggaaaggagctggggatcatcccaaccatcatccgggatgaggaactgaagacgagaggatttggaggaatctatggggttggcaaagccgccctgcatcccccagccctggccgtcctcagccacaccccagatggagccacgcagaccatcgcctgggtgggcaaaggcatcgtctatgacactggaggcctcagcatcaaagggaagactaccatgccggggatgaagcgagactgcgggggtgctgcggccgtcctgggggccttcagagccgcaatcaagcagggtttcaaagacaacctccacgctgtgttctgcttggctgagaactcggtggggcccaatgcgacaaggccagatgacatccacctgctgtactcagggaagacggtggaaatcaacaacacggatgccgagggcaggctggtgctggcagatggcgtgtcctatgcttgcaaggacctgggggccgacatcatcctggacatggccaccctgaccggggctcagggcattgccacagggaagtaccacgccgcggtgctcaccaacagcgctgagtgggaggccgcctgtgtgaaggcgggcaggaagtgtggggacctggtgcacccgctggtctactgccccgagctgcacttcagcgagttcacctcagctgtggcggacatgaagaactcagtggcggaccgagacaacagccccagctcctgtgctggcctcttcatcgcctcacacatcggcttcgactggcccggagtctgggtccacctggacattgctgcaccggtgcatgctggtgagcgagccacaggcttcggtgtggccctcctgctggcgctcttcggccgtgcctctgaggaccctctgctgaacctggtgtccccactgggctgtgaggtggatgtcgaggagggggacctggggagggactccaagagacgcaggcttgtgtgagcctcctgcctcggccctgacaaacggggatcttttacctcactttgcactgattaattttaagcaattgaaagattgcccttcatatgggttttggtttgtctttctggtcgtcagcgtggtggtggaaacagctgaagttttaggagacagcttagggtttggtgcgggccacggggaggggaccgggaagcgctggggcttgtttctgtttgttacttacaggactgagacatcttctgtaaactgctacccctggggccttctgcaccccggggtgaggcctcctgcctgcctggtgccctgtcccagccccaggtcctgtgcagggcacctgcgtggctgacagccaggctcttactccagccggggctgccagcgcatccagccagcccagccctgtgaaagatggagctgacttgctgcaggggacctgatttatagggcaagagaagtcacactccggcctctcagaattcacttgaggttcaattaaatacagtcacaccgccccctcaaaaaaaaaaaaaaaaaaaaaaaaaaaaaaaaa

SEQ ID NO: 452 - DNA, 6805 bp, Homo sapiens
aaagtttgcattgcaatccccctgccttcctctcctttctcccgatcaatgcatatttgcaaaaggattaagccacagatttaagcgccgggagcccatttctgccttgcaaaggagaccggactgaaaaacctaaagccagctctgatttcttttcgccaagtgggaaggtggtttatttttcttgctttttggagtcaacacccttccccaccagcccttatccccaccctcaccccgcaaccccttcacgccccctccccctccccctcctcatcctcccaccatcctctaaagaggcaaagggattttttttttcttttggtcttcttttttcccccttccctgtttatcctgaaaaggatttgaagacaagcttgaaggataaaaagccttggtgcttcccaggagccgagccgaggagcagaagaggaagagccgggggctgccgtagcctttggagatggacgagcagcccaggctgatgcattcccatgctggggtcgggatggccggacaccccggcctgtcccagcacttgcaggatggggccggagggaccgagggggagggcgggaggaagcaggacattggagacattttacagcaaattatgaccatcacagaccagagtttggatgaggcgcaggccagaaaacatgctttaaactgccacagaatgaagcctgccttgtttaatgtgttgtgtgaaatcaaagaaaaaacagttttgagtatccgaggagcccaggaggaggaacccacagacccccagctgatgcggctggacaacatgctgttagcggaaggcgtggcggggcctgagaagggcggagggtcggcggcagcggcggcagcggcggcggcttctggaggggcaggttcagacaactcagtggagcattcagattacagagccaaactctcacagatcagacaaatctaccatacggagctggagaaatacgagcaggcctgcaacgagttcaccacccacgtgatgaatctcctgcgagagcaaagccggaccaggcccatctccccaaaggagattgagcggatggtcagcatcatccaccgcaagttcagctccatccagatgcagctcaagcagagcacgtgcgaggcggtgatgatcctgcgttcccgatttctggatgcgcggcggaagagacggaatttcaacaagcaagcgacagaaatcctgaatgaatatttctattcccatctcagcaacccttaccccagtgaggaagccaaagaggagttagccaagaagtgtggcatcacagtctcccaggtatcaaactggtttggaaataagcgaatccggtacaagaagaacataggtaaatttcaagaggaagccaatatttatgctgccaaaacagctgtcactgctaccaatgtgtcagcccatggaagccaagctaactcgccctcaactcccaactcggctggtggatacccttcgccatgttatcagccagacaggaggatacagtgatggactcgcagccagtcagatgtacagtccgcagggcatcagtgctaatggaggttggcaggatgctactaccccttcatcagtgacctcccctacagaaggccctggcagtgttcactctgatacctccaactgatctcccagcaatcgcatcccggctgaccctgtgccccagttggggcaggggcaggagggagggtttctctcccaacgctgaagcggtcagactggaggtcgaagcaatcagcaaacacaataagagtctccttctcttctcttctttgggatgctatttcagccaatctggacacttctttatactctcttcccttttttttctgggtagaagccacccttccctgcctccagctgtcagcctggttttcgtcatcttccctgcccctgtgcctctgtcctagactcccggggtccccgccctctctcatatcactgaaggatattttcaacaattagaggaatttaaagaggaaaaaaattacaaagaaaataataaaagtgtttgtacgttttcatgctggtggtttgaggagccaaatttacctcactcgaatccctcactccctatgttaacaggcaatccttctctgtttctcttattactctcactacctcttagcaggaatactccacattgccctattcattccaggcctccctgcttcctcttgctcttcctccctggggacagtactgattggaacactttcctcctcttccttcctagccccagctattcactggggactgtcatagctgggattctaaaggtgccacatttttcagtttcatctccactaggttggttcccgggcaggaagtcaggcagcagggaaggacacgggaacagcaggtggagaattcctacagtctttcttaccctgctagcaatagctctcagtttcagaggcacagtctttggagaccattcagcactgagaaagcaatatttagaacctattgcaaaactgggcctgagttaggcatggtgatgaatgcatcagcaaggaatagaaagttcttatcgtgaaacccttcaacctcaactatgccttcatagacacacacgttcatgcacatgtaggcacatgtaccatctcacatcttcactttcccgagatgccatatacaattacctacattaataactgtagcactatgccttttgagcccgagagagggaattagtgactctaagtgaaggtcactgacacagagaagcagtatgtgtctggggcttccaggacctgcaggcccactagcgtgcacttaccagaatggcatacacaggacctgatcatgaggaagaccaggtttccagtgtaaactactcttgttcccaccacctctggagcactcagggagccccatacagtacttacaatgtctttaatggacttgattctgtttaattttttgttttatattaggcacactgtattaattttccaaaatgttataccacactatgttcttggtcctgacctattgctctggaggaaagagttgtataagaacgtggctcatgtgaacttttgctagcttcatttgaggacctgagaatcatggggaaagggaaggtaatgttttcattgaaatcatcacagtgatttttattccctgggaacacagcgtgtactaaaaatacatgagaaaatagcatgtatatgaaagctattctcaaaagtcacctgagctcaccatcttcatagccaaccctaccagttataaagatggcagctctatcacttgattaagtgggaggtggtcaaatattttggtgcctcattttcttcatctgtgagatgggaactgttatgcctggcttactaagagtcttgtgagagactgagaagttgattttgttcatatccaatctgtaaatgcgaagtcaggggaagtaatgtccctgaaataaacgggttcatgccatctagggacaataaatggttttcttgttgtaacttctggttaatatcagtaccttgatgtcatcaccgtgatgacaaagagaagagttattgttgatcttcttggttttggtctgtctcttttcttaggataaagaaaaacttccaaactagaaaaacaggccctggttcccttagtttgcacttgaacccaatatgttgccttgtacatacttggtccctgtcacattgactgcttgggaggcttccagggagaagtatgagaccctgaggggtgagaatgggcagctagcaagaacatggaaattctgcttggcactacagtcataaatagaaaacactgtgtgtgctcaggggagcaggggatgccactgaagaaactcaagggaatgtgtatttgaaggaaatgcaaaaactaagtatttagcaaaatgaaattatgccttgatgactaaaaggcactagaaaggttgtgtctactaacttcagccctaatcagaacagatgcctagaaggagcatttttgtgacaacttcatagtgattagaatcagtggagaactccatcttagtggcaggaatataatgaaactacccacgcaagaacatggttgaatcacatttgcttgacttagggcaaagtacgaaagagagacaaaagggttctcttggaaacaagaagagtgactccagatgtggcctgaataattgccatgttaagttaatgcaaaagatcagaacagggctacatttgcacaggcagtttctctccgggccgtagttttcactgatgatcacctttcacagcattttccccaaccagcatttcacttagtcttctctatacccagcacctcccccggcacccccggcaagcccactatcacttccgacttccaacgtggcatccgtgagatctgtccacattaggcgaagcaggagaacactgagagcagcaggatgggtttggaaagagcatgcctctggaaacacagcttcctgggaattcacatgaggccagtcctacagagagcaagatgcaccccaggatttcttcattttctaatagatgtgggagtgctccattttccccgacagcgaatttcccctgagaaacgatactagaccctgggtttgcccaccttgtaactcttccttatctcctccttttcatccctaatccatcctccctctggcatggaattgacgcccgtgcagtacatttgccaagtggcaccttctttcaatttatgttttattttgctatggtggtgattctttatttgctggttgtcttttctcacacatctttctctctgtctctctctttcctgctctttgtttttctgcccagaaaaacctgacttcgataccaaaaaagatgaaactacagaaactcaaatttaaaaaaaactttaaaagaaacaaaaaaatactcaacgattctttcagctttattaacattttccattgtttcttgcgacttgtgtctcgttctttgtagtattgatgatgaacatttgataatgaatgttcttgtatattcagataaagaaaaaaaaaaccaaaaaagcggtctgaatttaatagtgtttataataaaaattttaaaaatgaccctcatagcacgcaaaacaggatggggaatttcccctcttctttctgtgacaatgcgcatcattcctgcattagtttttaacaccagactacctacattcatcatttccctcatttttcttttattttcttgcatttgtgaattagttcaagaatgctagaaaagtgtcgagttgtgcacatccatttcttgtttcacaatgtttaaaagtgacagtaattcattttgtaaactaaaaaaaaaaaaaaaaaggttggaatagtgagcataataggtacaacctaacacattattatgtttattaactttgagacccagaaataaattcttttcttttcttgattcttgctcttaaaaatacaaaaaaaaaaatgttttgttttgtgttatttttggtttgtttattggggggctttttttaattgtcaggattatgatcttgctgtttttcttcaatatgtatacaaggtgatgtgaaaagatgacttgggcagaggagtaagaacaagtaggcttgttcttctactttgcttcagaattcagttaatgccaaaagcgaagatcaagcccatgttgatgtctcgttgctcacctgcatttccagagagtgtgacactcatgcagtccctgagaaaaataaaatcagggacatacttctccttttagccttttaaaaattcaaaaacgtttagtccaagggaactttttatgctatcaggaaaggtttttgctgtttttgattctgattatcacagccaagtactttgttttatttctccctaattaataactacattccatgaggcctcttccaaccaaagaggccttttcttccaggagagtcccgcaggagatgctggtatgatgggcaccattggttaagtaaactacatgcaggaagaagtccttggggccagtctgccagctgagtcctggttttggatgaagagttaatgagatattgggccaggctcaatgctgtagttttaatgctaagaggttacgtttacttcacagagtacacctcttagtaacctctgacttaggcagctgcttaaagcaaattgcaaaactggcttgatttggaatgtttttattagaggaaaaaagaaagccatattatctggaaaaaaattcattttaaataccatcattcaacaaattatgttcagaaagtggtcagaacttaagcaagaaaagtaaagaaagaatgcagaattgtggagcaatgctttaggaaatatttctacctgaacacttgtactcttgaagtcacaacaaaataatgatgagcttttcacatcacctttatggtttcaatccctagctcaaagcttcctggaatcttttattttttgtaaacttttttttcttttgttaaaataaataaaacattcaatgtttttctccttttctctcttattacttctttcctttggcattttcaatttgaaatgctttcctttggttgttggttttattctccccctacccctccccttttcttattattcagaatataaacctgcaaagctctgctctgttttggttttgaaagtttaagcttttctgcttctgtgagagcacaggcttctgtcccttttgattccaactgaacttttgtgttctctaatgatactaacacggtgtaggttttacagtctcctaatttgtactggtaatgcatattccaaataaatagtttcttttgttgcaaaaaaaaaaaaaaaaa

SEQ ID NO: 453 - DNA, 5208 bp, Homo sapiens
cttactcatttgtgtttattcttggacttatcctgacataatggggtttttttaattatagattcacactgcatttattcatcacccctgtcctctcatccataactcaaatttactaccagcaacacaaaatacaaagatgtgtccagtttcactacagctcttcgcgtttacaagtgtcgagcgcttgctttcggaacgcccttgtgattggccgagccaatgccagtgacatcaaccaacttacttttgattggaaggctggttgctgggactgtagcgtttgcaggaagtcacttaactgtttgggagctggaaaaccgaagctgaagttctcttttgccataggaacgagcgcaactgactaggaaagatgtgtcccaaagctccgcaagctggaacgtgagccaggaggcccggaccggccacgggaccgcgaggcactccgaaagtgtgcggctgccccttccctgcctcccagctgttacccttttaaatgtcagtgttcgaggctgtaggggtagcacgaggcagcgaaacggaacagtcggattggccgcacgcctcagttctagacgcacctctccaccgaaggccgttctgactggcagggggagaaagtaaacagagttgaatcaccctccccactggccaattggagggggtttggtttgtgacgtgatgggattctgcgaaattgttactgagcaagagaatgccggaacggtgcggaccggccggagcaggggttcagaagccgtcagtggactcgggaaaaagtgtctcttagacctggcgctcggcgggaccctcgccacccgcgtcggggtgatcgggtgaatgtcctggggctttggctcgacggcgaggcggccgagggcgtgcacctctcttgcagtttcctctcccagcgcctcgggggcgttttcagtcgaataaacttgcgaccgccacgtgtggcatctttccaagggagccggctcagaggggccggcgcgcccgtcgggggatcgcggccggcgcggggcaggggcggcggctagaggcggcggcgcggcggagcccggggccgtggatgctgcgtgcggaggcgctgccggttacgtaaagatgaggggctgaggtcgcctcggcgctcctgcgagtcggaagcgccccgcgcccccgcccccttggccgccgcgccgtgccgcgccgcgccgcgctcgtcgtccgaggccagggcagggcgagccgaacctccgcagccaccgccaagtttgtccgcgccgcctgggctgccgtcgcccgcaccatgtccgcggccgcctacatggacttcgtggctgcccagtgtctggtttccatttcgaaccgcgctgcggtgccggagcatggggtcgctccggacgccgagcggctgcgactacctgagcgcgaggtgaccaaggagcacggtgacccgggggacacctggaaggattactgcacactggtcaccatcgccaagagcttgttggacctgaacaagtaccgacccatccagaccccctccgtgtgcagcgacagtctggaaagtccagatgaggatatgggatccgacagcgacgtgaccaccgaatctgggtcgagtccttcccacagcccggaggagagacaggatcctggcagcgcgcccagcccgctctccctcctccatcctggagtggctgcgaaggggaaacacgcctccgaaaagaggcacaagtgcccctacagtggctgtgggaaagtctatggaaaatcctcccatctcaaagcccattacagagtgcatacaggtgaacggccctttccctgcacgtggccagactgccttaaaaagttctcccgctcagacgagctgacccgccactaccggacccacactggggaaaagcagttccgctgtccgctgtgtgagaagcgcttcatgaggagtgaccacctcacaaagcacgcccggcggcacaccgagttccaccccagcatgatcaagcgatcgaaaaaggcgctggccaacgctttgtgaggtgctgcccgtggaagccagggagggatggaccccgaaaggacaaaagtactcccaggaaacagacgcgtgaaaactgagccccagaagaggcacacttgacggcacaggaagtcactgctctttggtcaatattctgattttcctctccctgcattgtttttaaaaagcacattgtagcctaagatcaaagtcaacaacactcggtccccttgaagaggcaactctctgaacccgtctctgactgttggagggaaggcaaatgcttttgggttttttggtttttgtttttgtttttttttctccttttatttttttgcgggggagggtagggagtgggtgggggggaggggggtaaggccaagactggggtagaattttaaagattcaacactggtgtacatatgtccgctgggtgagttgacctgtggcctcgcacagtgattctgggccctttatgcttgctgtctctcagaattgttttcttaccttttaatgtaatgacgagtgtgcttcagtttgtttagcaaaaccactctcttgaatcacgttaacttttgagattaaaaaaaaaaacgccatagcacagctgtctttatgcaagcaagagcacatctactccagcatgatctgtcatctaaagacttgaaaacaaaaaacagttacttatagtcaatgggtaagcagagtctgaatttatactaatcaagacaaacctttgaaaggttacactaagtacagaacttttaaaccttgctttgtatgagttgtactttttgaacataagctgcacttttattttctaatgcagaggatgaataagttaaatacatgctttgaggatagaagcagatgttctgtttggcaccacgttataatctgcttattttacaatatacacgtttccctaagaaatcatggcagagatgtgagggcagaatatacacaacagatgctgaaggagaaggagggtagtgttttgcaaaagaaaaagaaaagaaccaacagaattttaactctattaacttttccaaattttcctatgcttttagttaacatcattattgtatcctaatgccactaggggagagagcttttgactctgttgggttttatttgaatgtgtgcataacagtaatgagatctggaaacacctattttttggggaaaaaggtttgttggtctccttcctgtgttcctacaaaactcccactctcaggtgcaagagttatgtagaaggaaagggagctgaaataggaacagaaaaatcaacccctataactagtgaacaccaagggaaaataccacaatgatttcagaggagactctgcaaaatcgtcccttgtggagaatgcaggcaacatggaatactaggaatgaaatcacatcactgtatcttttacatcaatagcctcaccactaatatatcttgtatctaggtgtctataatggctgaaaccactacatccatctatgccatttacctgaaaacttaactgtggcctttatgaggccagaaaagtgaactgagttttcgtagttaagacctcaaatgaggggagtcagcagtgatcatgggggaaatgtttacattttttttttcttcagaagtaacgctttctgatgattttatctgatatttaaaacagggagctatggtgcactctagtttatacttgcgctctgaaatgtgtaaacatagggtgcctacctatttcacctgacccatactcgtttctgattcagaatcagtgtgggctcctgcagtgggcgcgggtcacggctgactccaacttccaatacaacagccatcactagcacagtgtttttttgtttaaccaacgtagttgtattagtagttctataaagagaactgcttttaacattagggactgggagcagtccatgggataaaaaggaaagtgttttctcacgagaaaacatgtcaggaaaaataaagaacactttctacctctgtttcagatttttgaaacacttattttaaaccaaattttaatttctgtgtccaaaataagttttaaggacatctgttcttccatacgaaataggttaggctgcctatttctcactgagctcatggaatggttctgcttatgatactctgcacgctgccttttagtgagtgaggagtttggggttgcctagcaacttgctaacttgtaaaaagtcatctttccctcacagaaagaaacgaaagaaagcaaagcaaagtcagtgaaagacaatctttatagtttcaggagtaaatctaaatgtggcttttgtcaagcacttagatggatataaatgcagcaacttgttttaaaaaaatgcacaatttacttcccaaaaaagttgttacttgccttttcaagttgttgacaaacacacatttgatattctcttatatgttatagtaatgtaacgtataaactcaagcctttttattctttgtgattaaatcctgttttaaaatgtcacaaaacaggaaccagcattctaattagatttactatatcaagatatggttcaaataggactactagagttcattgaacactaaaactatgaaacaattactttttatattaaaaagaccatggatttaacttatgaaaatccaaatgcaggatagtaatttttgtttacttttttaaccaaactgaatttttgaaagactattgcaggtgtttaaaaagaaagaaaagttgttttatctaatactgtaagtagttgtcatattctggaaaatttaatagttttagagttaagatatctcctctctttggttagggaagaagaaagcccttcaccattgtggaatgatgccctggctttaaggtttagctccacatcatgcttctcttgagaattctatttggtagttacaattacagaaactgattagtttgtcagtttgcagatagatttagcacagtactcatcactcggatagattgagatgttctttcacatcagatgatctgtaacactgtaagatactgatctttacaactgtttaatcagttttatttttgtacagtattagtgacctaagttattttgctgtcccgtttttgtaaatcaaatgaaattataaaagaggattctgacagtaggtattttgtacatatgtatatatgttgtccaaataaaaataataaatgataaagactgaa

SEQ ID NO: 454 - DNA, 2399 bp, Homo sapiens
agtcattgccgaggaaggcttgcacagggtgaaagctttgcttctctgctgctgtaacagggactagcacagacacacggatgagtggggtcatttccagatattaggtcacagcagaagcagccaaaatggatccccagtgcactatgggactgagtaacattctctttgtgatggccttcctgctctctgctaacttcagtcaacctgaaatagtaccaatttctaatataacagaaaatgtgtacataaatttgacctgctcatctatacacggttacccagaacctaagaagatgagtgttttgctaagaaccaagaattcaactatcgagtatgatggtattatgcagaaatctcaagataatgtcacagaactgtacgacgtttccatcagcttgtctgtttcattccctgatgttacgagcaatatgaccatcttctgtattctggaaactgacaagacgcggcttttatcttcacctttctctatagagcttgaggaccctcagcctcccccagaccacattccttggattacagctgtacttccaacagttattatatgtgtgatggttttctgtctaattctatggaaatggaagaagaagaagcggcctcgcaactcttataaatgtggaaccaacacaatggagagggaagagagtgaacagaccaagaaaagagaaaaaatccatatacctgaaagatctgatgaagcccagcgtgtttttaaaagttcgaagacatcttcatgcgacaaaagtgatacatgtttttaattaaagagtaaagcccatacaagtattcattttttctaccctttcctttgtaagttcctgggcaacctttttgatttcttccagaaggcaaaaagacattaccatgagtaataagggggctccaggactccctctaagtggaatagcctccctgtaactccagctctgctccgtatgccaagaggagactttaattctcttactgcttcttttcacttcagagcacacttatgggccaagcccagcttaatggctcatgacctggaaataaaatttaggaccaatacctcctccagatcagattcttctcttaatttcatagattgtgttttttttttaaatagacctctcaatttctggaaaactgccttttatctgcccagaattctaagctggtgccccactgaattttgtgtacctgtgactaaacaactacctcctcagtctgggtgggacttatgtatttatgaccttatagtgttaatatcttgaaacatagagatctatgtactgtaatagtgtgattactatgctctagagaaaagtctacccctgctaaggagttctcatccctctgtcagggtcagtaaggaaaacggtggcctagggtacaggcaacaatgagcagaccaacctaaatttggggaaattaggagaggcagagatagaacctggagccacttctatctgggctgttgctaatattgaggaggcttgccccacccaacaagccatagtggagagaactgaataaacaggaaaatgccagagcttgtgaaccctgtttctcttgaagaactgactagtgagatggcctggggaagctgtgaaagaaccaaaagagatcacaatactcaaaagagagagagagagaaaaaagagagatcttgatccacagaaatacatgaaatgtctggtctgtccaccccatcaacaagtcttgaaacaagcaacagatggatagtctgtccaaatggacataagacagacagcagtttccctggtggtcagggaggggttttggtgatacccaagttattgggatgtcatcttcctggaagcagagctggggagggagagccatcaccttgataatgggatgaatggaaggaggcttaggactttccactcctggctgagagaggaagagctgcaacggaattaggaagaccaagacacagatcacccggggcttacttagcctacagatgtcctacgggaacgtgggctggcccagcatagggctagcaaatttgagttggatgattgtttttgctcaaggcaaccagaggaaacttgcatacagagacagatatactgggagaaatgactttgaaaacctggctctaaggtgggatcactaagggatggggcagtctctgcccaaacataaagagaactctggggagcctgagccacaaaaatgttcctttattttatgtaaaccctcaagggttatagactgccatgctagacaagcttgtccatgtaatattcccatgtttttaccctgcccctgccttgattagactcctagcacctggctagtttctaacatgttttgtgcagcacagtttttaataaatgcttgttacattcatttaaaaaaaaaaaaaa

SEQ ID NO: 455 - DNA, 6952 bp, Homo sapiens
ggcccccagagagggtggggagatgacacagttgttcccccagccctggcggggcgggcagcatggttcactccagcatgggggctccagaaataagaatgtctaagcccctggaggccgagaagcaaggtctggactccccatcagagcacacagacaccgaaagaaatggaccagacactaatcatcagaacccccaaaataagacctccccattctccgtgtccccaactggccccagtacaaagatcaaggctgaagaccccagtggcgattcagccccagcagcacccctgccccctcagccggcccagcctcatctgccccaggcccaactcatgttgacgggcagccagctagctggggacatacagcagctcctccagctccagcagctggtgcttgtgccaggccaccacctccagccacctgctcagttcctgctaccgcaggcccagcagagccagccaggcctgctaccgacaccaaatctattccagctacctcagcaaacccagggagctcttctgacctcccagccccgggccgggcttcccacacaggccgtgacccgccctacgctgcccgacccgcacctctcgcacccgcagccccccaaatgcttggagccaccatcccaccccgaggagcccagtgatctggaggagctggagcaattcgcccgcaccttcaagcaacgccgcatcaagctgggcttcacgcagggtgatgtgggcctggccatgggcaagctctacggcaacgacttcagccagacgaccatttcccgcttcgaggccctcaacctgagcttcaagaacatgtgcaaactcaagcccctcctggagaagtggctcaacgatgcagagactatgtctgtggactcaagcctgcccagccccaaccagctgagcagccccagcctgggtttcgacggcctgcccggccggagacgcaagaagaggaccagcatcgagacaaacgtccgcttcgccttagagaagagttttctagcgaaccagaagcctacctcagaggagatcctgctgatcgccgagcagctgcacatggagaaggaagtgatccgcgtctggttctgcaaccggcgccagaaggagaaacgcatcaacccctgcagtgcggcccccatgctgcccagcccagggaagccggccagctacagcccccatatggtcacaccccaagggggcgcggggaccttaccgttgtcccaagcttccagcagtctgagcacaacagttactaccttatcctcagctgtggggacgctccaccccagccggacagctggagggggtgggggcgggggcggggctgcgccccccctcaattccatcccctctgtcactcccccacccccggccaccaccaacagcacaaaccccagccctcaaggcagccactcggctatcggcttgtcaggcctgaaccccagcacgggccctggcctctggtggaaccctgccccttaccagccttgatggcagcgggaatctggtgctgggggcagccggtgcagccccggggagccctggcctggtgacctcgccgctcttcttgaatcatgctgggctgcccctgctcagcaccccgcctggtgtgggcctggtctcagcagcggctgcggctgtggcagcctccatctccagcaagtctcctggcctctcctcctcatcctcttcatcctcatcctcctcctcctccacttgcagcgagacggcagcacagacccctggaggtccaggggggcccgaggcagggtccaaacctgagtgagggccagccatgcctcccctcccattcctctggtccctgccttggtcccttgcctgggaagagggcgaggaggccagtggtggggacgcagagggtcctcagagcaggagtgacaagggaggaaagaccaaaaaaacaaccaaccaaaaaaaaaaaaaaaaaggaaagaaactaaccaacaaaagagaaaaccaaaaataatcacaacagaaaccagctgccccaaaggaaccagaggtgaaaaacaaacaaaaaaaaaccaaaaacaaaccaaaaaaaaaaaaaacccacaaaatcaaacaaaccaaaaaaccagtcgcgagccagacctcagcgtgctcaccctcactgctacgacgccaaataaaaaccccagccaggggcggagaagcctccagcaggtcagacctcatgccaccgagccctggctgtgggaccaacccccaaccctgcctcccccgtgggggctacagaaggaaaaagagaagatgccagcttcctaatcccagcccccagccctgggccagcgaagacagggcacagcctgggcagatgggctggggcttagcaccacccaccaaatgttcttttccagaaggtgaaagagaaagggcctgaacaaccttacaccaaatattcagtagcttcatccaaaggatgtacagaatttttagcattgtgctcaacagaatgtgtccctaccatgtgtccccttctcccctggcccccagctctccccacctgggcagggggtcttgctttaacctcctccctccccccagcaggggagagttcaagggaaggcctgcggacaacttttcatcccctgttcctccctcttttcccctttgaagggtgggctaggccattttgccaagttctagctctcacaagtccctcctcaaccctgtcaccctcctctgctctggaactgactccctccccagcctatgggaaggtggaaatttcaggcaagaggggatgaagacattcagttgagggcattcagttgtctttttccatcctgtctgtttccctgaaaaaaaaaaaaattcatattccagtgcctatccgtgggatccttcacgttctttgacattaaccagaaaccaaaaagagaactcacctcgcttttcccaccctgtgcccctctggtactggcgaatgcctctccctccccccacatgcacgcacgcacacaccccagtggtggggttcctcgagatggcatccccatcagggtccatgtggtggggacagtgccacagcctgtggtccccatctgagagggcgcggtggtggccaccactcccacaagacctccacaactcttggctggaccctgtgtttgaccagccccggacacgtctccactgacgacggacagaggagagacaccactgggagccaccctgccctcctgctattgtggaggccaacaaagttttgaaccgaaaaccaaaaaaacagaaacaaacaaacaataaatttaaactagaaaaaaaatttatatatatatataaacatatatatatatatatatataaaagggaaagaagatgaggactcttcaagaataagatggaaccgcgaggcggagccaagcccctgcaccggtggtccaggcccttgttccccaaggcggatggaaggacggatgcttctttctcttcacaaatacctcatggacgttgtctttgggaaagccggagggggcggctggggcagggcctgtccctcggccagggcagatggaagcgggtgggcggggctgagagagggtatcagggacaggggtgaagagccccaaactcccctcccaaatcaactgaaaaagctttaaaaaaagacaggaaaaaaaggagtaagaaagcaaaaagaacagatgaaggaaaacttaacaacttttgggtggtttgattcctcctttgatttctttttcggttctcttttgtctgacctctctcctcccctccttcctctctcctcccctccttcctctctcctctcctccttcctgtctcctctctctccctttgctctcctctcttctctctcaatcttgttctttctgtgtctctcctcaaaccaaagtgttgcagtgaaggacacgagccattgaaatcagggtggggcctgacagccgtagtgtggcccctgccccttgttgggcaggagcagagagagaggagagccctgagaccgcagggctttggcctgggcagcttccactttctgccggacactctgaggagaggcagatggagctccaggcctcagcgttctcttttttccttgtctcccttctcccacccgggaaatgaaactgttgggctgggcgacggaggcagcagagactcggccattgcaggggcctctgggtgccttgtccgggcagtggtgaagtagccgcccctcccaccccggcacgatggggcctggcacctcgtctacccaacctcaccggaatgtaagcatctccgctgaacgactccctgcccttaccctacctctgagtttgtccatgtttatttcctgaagagagaagggactggcaagagggcttgggccccagcccaagggtggagagggggccaagggctcctgaccaaataggaaggacatttgagcagagcaaaatgaaaggaattacaaccaaaaaccccctccgagaagacaggcagcatggaaggcatggtggagatgactcaaacaaaaactatgattctagaccaaaaaggaaaaaaaaaaaaaaaaaaggaaagaaaatccaggactcaccaccacccacttcatcctgcttcctccccatcaagtcccaccacctgggacctctccccaccccagtatgtgggagtggggtaaagaggagaggaggagcagggggcagggatggggcagatgccctgatgttggtggagggacccctgtgcagccgggggtgctggggaccctccccatccaaccctcacacctaggaaaagaaaaacaagaaaaaaaaattcctgggagggggaaaaataaccaaatcccaagctttaactacagctgtgaaaccaaatattgggaagggggtaggagggagggaggggcaggtgagccccaggtctccccctgggcccccctcccctgaggactcgagataaggcaccaaatacctcatagaactttaatgttaaaaaaaggaaaccaaatatcgttggctgggggccagccagggcaaggggctggggggctggagggagccagggttgggaaggtgatgggggaattcatgccccccacccccatctgccccttacactctggtcccccgtctcgactccgggaaacaaaactatctcatcgtttttattttgtggtctgtacagagcctgtgtccgtgtgtctgtgtatgagcgagagagttggagggctggggagctttatgtgggggatggggagggcaaccccaggctaggctatgggctaggttagatgtccgaggttgggggccaagggcctgggctagaaagagaggagagatgagtgggttggagcagtggggagccctctgaatttctcttctccccaaccctgacctcctacttaagggagggacagagactgggtctaccctaatggtgggccttttcattgtgccaaaaaaaaaaaaaaaaaaattgatgccagtaactaaaccacctctctctgttctcttctggggggtggggtgggtgtgtgtgtgggggtgggtagggatggggaacccaagccccagtaggagttggggctgagatcaggaggaggggaaggatatgagttttccatccatctccctggagaaggccatgacgggctctccaagccctggggagatctggcgagggactagccaagtcagggtgacctcttgacctgactagtttttctaacccacatgaacaccagggtgcctctctcttcctctagcccagggtagggggacctgagtgagagagagagtgagacagacagcaagattgagacacgcgggcccccactggtctctgagtgggaaaggcaagtgcgagagataaaggcctccaagagaaaaaagaaacaaaccaaagatttaaccatttaaaaaaaaaaaaaaacccacagacaactccgctacctttttatatgttggaaaaaaagtgaaaaaaaattaaaaataaaaataaaaaaaaatacacaaaaactccaagccgcaagtccttcatgcggtttaaactttgacctcagcagtctccaaagcaagacgacgatgacaaaggcggaaacaaagaaaaaataatgtatatttttaagtatttgtccttgaattgttagctccttgttaaacaaacaaaaggagagaaaaatccagagagaagtgttgctgggatggagacaactatttactatgtctgtgacccctcccttctgcctccctccccttcctctctttcctgtcctctatccttgctgcccctcccccaatatgtcccccaaacccaggggctcagtatttatttatttatataattgcagggtgactgggggcctctctcggcaactcgtagagagcctttggataatggcagggtggggaatgggcgaggagtctttgggaagagcaggggcctgaactttcaactcctttctggcctcttgtcccactgcttccaccatcaccttccaaatccagggctgcactagggcaaggtgaccaccctacttggtaaagacctgattggcgcagcccattctggtgtgggtgtctttcaccacccagaatgaccaggttggaatgggggtgggtgaagttggagggggtggcaagtacaaggcaagggtgcccaggaaccggcatccagaaatcagccctggagtagacctgcctttcctccatccttaccaagttagcctccctttcagttccgtctgacccctgtgttggtagccccttccttcccttcctgtaccccctccgtctcttctcgtggtagcgggttagtgtttcagtgttcttaactccaatctgcttgttcattgtacaatgtgcttcttttaaggccccatttttgtaacttgagtgtgtcattcatctgaacaacaaacatcaaaaaataaaaaattaaaaactgtacagagagaaatgaaaaaaaaa

SEQ ID NO: 456 - DNA, 6733 bp, Homo sapiens
attgctactgattacatggatatctttagggaagcagaaaatgattgctgaacacatgccttgtgttttgatgattgcattaaaagtcccccagcgggatggcatttattggctctcagagcttttcttagattaaatttcaggcagccagtacaaggagaaacatcataacctgtatccaacagcatatgtgcagctaaagagtaatcttaatcaagtccttctaggctgtgctaaataaacgagggttttcagcaagaccccagacttttattttgaagtggagtagcagctgttggctattgcggtgcagagctgcagcgaggcctgggtcacacagtgctccgggtgtctgcaggctgcaggccgagcccagtggcgcaggcactgagctgtacttatttgctgtgctatttgacctcttggtttcagagagctccctggaccatctaatggctatgggagatgataaaagcttcgatgatgaagaatcagtggatggaaataggccatcatcagctgcatcagccttcaaggttcctgcacctaaaacatccggaaatcctgccaacagtgcaaggaagcctggttcagcaggtggccctaaggttggaggtgcttctaaggaaggaggtgctggagcagttgatgaagatgattttataaaagcttttacagatgtcccttctattcagatttattctagtcgagaactcgaagaaacattaaataaaatcagggaaattttgtcagatgataaacatgactgggatcagcgtgccaatgcactgaagaaaattcgatcactgcttgttgctggagctgcacagtatgattgcttttttcaacatttacgattgttggatggagcacttaaactttcagctaaggatcttagatcccaggtggttagagaagcttgtattactgtagcccacctttcaacagttttgggaaacaagtttgatcatggcgctgaagccattgtacctacactttttaatctcgtccccaatagtgcaaaagtcatggcaacttctggatgtgcagcaatcagatttatcattcggcatactcatgtacccagacttatacctttaataacaagcaattgcacatcaaaatcagttcccgtgaggagacgttcatttgaatttttagatttattgttgcaagagtggcagactcattcattggaaagacatgcagccgtcttggttgaaactattaaaaagggaattcatgatgctgacgctgaggccagagtggaggcaagaaagacatacatgggtcttagaaaccactttcctggtgaagctgaaacattatataattcccttgagccatcttatcagaagagtcttcaaacttacttaaagagttctggcagtgtagcatctcttccacaatcagacaggtcctcatccagctcacaggaaagtctcaatcgccctttttcttccaaatggtctacagcaaatccatcaactgtggctggaagagtatcagcaggcagcagcaaagccagttcccttccaggaagcctgcagcgttcacgaagtgacattgatgtgaatgctgctgcaggtgccaaggcacatcatgctgctggacagtctgtgcgaagcgggcgcttaggtgcaggtgccctgaatgcaggttcctatgcgtcactagaggatacttctgacaagctggatggaacagcatctgaagatggccgggtgagagcaaaactttcagcaccacttgctggcatgggaaatgccaaggcagattctagaggaagaagtcgaacaaaaatggtgtctcaatcacagcctggtagccggtctgggtctccaggaagagttctgaccacaacagccctgtccactgtgagctctggtgttcaaagagtcctggtcaattcagcctcagcacaaaaaagaagcaagataccacggagccagggctgtagcagagaggctagtccatctaggctttcagtggcccgaagcagtcgtattcctcgaccaagtgtgagtcaaggatgcagccgggaagctagtcgggagagcagcagagacacaagtcctgttcgctcttttcagcccctcgcctccagacaccattccagatcaactggtgccctctacgcccccgaagtgtatggggcctcaggtccaggttatgggatcagccaatcaagtcgactgtcgtcttctgttagtgccatgcgagtcctgaacacaggttctgatgtggaggaggcggtggcagatgccttgaaaaaaccagctcgaagaagatatgaatcatatggaatgcattcagatgatgacgccaacagcgatgcatctagtgcttgttcagaacgctcctatagttctcgaaatggtagtattcctacatatatgaggcagacggaagatgtggcagaagtcctcaatagatgtgctagttccaattggtcagaaaggaaagaaggcctcctaggtctgcagaacttattaaaaaatcagagaacactaagtcgagttgaactgaaaagattatgtgaaattttcacaagaatgtttgctgaccctcatggcaagagagtattcagcatgtttttggagactctagtggatttcatacaagtccacaaagatgatcttcaagattggttgtttgtactgctgacacaactactaaaaaaaatgggtgctgatttgcttggatctgttcaggcaaaagttcagaaagcccttgatgttacaagagagtcttttccaaatgatcttcagttcaatattctaatgagatttacagttgatcagacccagacaccaagcttaaaggtgaaggttgctatccttaaatacatagaaactctggccaaacagatggatccaggagattttataaattccagtgaaactcgcctagcagtgtctcgggtcatcacttggacaacagaacccaaaagttctgatgttcggaaggcagcacagtcagtgctgatttcattatttgaactcaataccccagagtttacaatgttattaggagctttaccaaaaacttttcaggatggtgctaccaagcttcttcataatcaccttcgaaacactggcaatggaacccagagttccatggggagtcctttgacaagaccaacaccacgatcaccagctaactggtccagtcctcttacttctcctaccaatacatcacagaatactttatctccaagtgcatttgattatgacacagaaaatatgaactctgaagatatttatagctctcttagaggtgtcactgaagcaatccagaatttcagcttccgtagccaagaagatatgaatgagccattgaaaagggattctaaaaaagatgatggcgattcaatgtgtggtggtcctgggatgtctgacccaagagcaggaggtgatgctactgactcaagtcaaacagctcttgataataaagcttcattgctccattcaatgcctactcactcctctccacgctctcgagactataatccatataactattcagatagcatcagtcccttcaacaagtctgccctcaaggaagccatgtttgatgatgatgctgaccagtttcctgacgatctttccctagatcattctgacctagttgcagagttgttgaaggagctgtctaaccataatgagcgtgtagaagaaagaaaaattgccctctatgaacttatgaaactgacacaggaagaatcttttagtgtttgggatgaacacttcaaaacaatattgcttttattgcttgaaacgcttggagataaagagcctacaatcagggctttggcattaaaggttttaagagaaatcctaaggcatcaaccagcaagatttaaaaactatgcagaattgactgtcatgaaaacattggaagcacataaagatcctcataaggaggtggtgagatctgctgaggaagcggcatcagtgttggccacttcaattagtccagagcagtgcatcaaagtgctttgtcctatcattcaaactgcagactacccaattaatctggctgcaatcaaaatgcaaacaaaagtgatagagagagtgtccaaggaaaccctaaacctgcttttgccagagattatgccaggtctaatacagggttatgataattcagagagcagtgttcggaaagcttgtgtcttctgcctggtggctgttcatgcggtaattggtgatgaactaaaaccacatctcagtcaacttactggcagtaaaatgaagctactgaatctttacatcaaacgtgcacaaacaggttctggaggagctgatcccactactgatgtttctggacaaagttagtgaagctcatcacagcgaaccaggtctctcaaaagaaaggacagatagaccaccctcatcaatgaaaggaagttctcaaacacatcctttggaacttactattgtttcccagttttagttttttgtttcgtttcgttttgtattttctgtaacagaggactatcctcagtctgcatgtaacttttatgatagttattccaaattcaagaagaagcagtattaacatcaattgatcgacacaaagtaatttttaatttaattcatcatttcacatgtttgtactttgtcttcccattaacctttgccagtgttatgattgtataaatttttttaaatgctggttaaacaggaatgcttaaagctttaaaagtttaacagtctaaaacatttttgcttttattcaactgcagaataatatttttattgctactttgagttttgtttcgtatcatgtcctatgctagaaatatttaaatgatgtgaaacaaagcaggactaatttgaactacagctggactccgtttgtgtgatggtgatacatgtcattagttgcaacttctttggggtgatctatagtttgaaaactaaaacctcaaagacagatgttacagaatcagccagttctgtaaaactgatattgtctattggttattgatcttgccatctttatttaaaaccatgtcccttctatgatcccttaagaaagctgcaccaaatcatctgcctgttttttcttgatacttactgaaatagaaggttttattgcagggtttattttggtttgtttatatctttgttgtgaatgatgcttttttgtatttattaatatcaaattcacttatgaataaacttgataatggaaacggacaaaaaaaatcaagtgcgtgtgtgtccttgaccgtcttctgtttctcacgtaataaacaaattatcgagacatgggagtgaccagcaccttttctttaaatggtggaacctggtttccttttaccatgaaattgtcttacttgaaaatattgatcctgatgagagagaagatggtgccaaggctgtctttgtataatgggctcaaattctctacctcttcagggctaatacttttaactgagctgctgcctatagtgtcttttggaaaactacttaaagggtgattttctgttactttttagcaaatttttttaatcacctcttgctacacccattcttttcatgtgcagccgactcaaaaattaccagttttggtgaaaggctaaattagataatttggaaccaggatactaatgatttctcatctttacttttttttaatcctaatataaagtgaatttgattgaaaaggcaaatagctattagggaagcagtttgccattgttgcagagttatctgtactttgtttaactgaaaaaaatgtagaaatatatgtaaagaatttaagacaagagtactgaatggatgatttgtcataggctttcccctttctttctgttctagcagcaggaaaagtttctctatatcctctccctctacctgtaacaattttgttttctactgttaattacattgtgtatttatagttctatgcttactgttgtgcatatactggcaataaaactgtacataacattacttgaaaaagttaataatgtatatcagtttttctgtctcactgtgtaacaagtcactcagttttattttaactttagacggtcttgtatcagtggtggtctcttgaattttgtaagttcatctgaggagaaaagatttttcaggtgtagctaccacaatcaaaggtatatagctacatacgcatgtatatattacagcttatctgtaagaagaaaatgcattttaaacacaactcttctcagtagcattttatgacctttggatatgtttgtaatcatttcgaatcaaaatattgatttaattttgacctctggtttaagatactgctttaactactgttgacaaccaagtagagtgacttaagctgaacagtaactaactggaaaattagataagcacctggcatctaatggcaggcaggcactcaagaaatgaattaactacataatggaaaagtatggtttaatgtgtccaaatgaaagctagtagatgtaaacatggaaaaattgtgtttacaattttataatctcagttgataagactataagaaagctgattatttaaatcactatatacaatacacccttaatttgttcattccagaaacatactgagatgtcagctacttaaaaatggtcacaaaaagctactgtttatatttttcctcctgctattctctcccaaattaattattaataagtgttgttcatttactgcactgctgagaactaattaaaattatatattccagattgtaaaaaaaaaaaaaa

SEQ ID NO: 457 - DNA, 3400 bp, Homo sapiens
gacttccggtgctggaggagggggccggcggcgagggactccaggaggacgcgtccaacttcgagaccggcgggggccggctccgctcttccaacccctccatgtgtgaagagggcggacgacgcagcgggggaagaaaaataagctagtctaggacaagtgtccaggcgacgtggaacccagtaagggaataaagaagactggaaacgtctctcccctcccctatcccagtccctcaccctaatccgcgcgcaatagaaaaggcggaagcgcctgtccacgatcagggcggggcaaggggaagaaatctcgcgataggagagcggtccgggcgggggtggcacctctccctcctcctggcgttagttccggtcgcagaggagacaccgccgcagttgccggtacatcggggatttctggctctttcctcttcgccttaaattcgggtgtcttttatgaataatcaaaagcagcaaaagccaacgctatcaggccagcgttttaaaactagaaaaagagatgaaaaagagaggtttgaccctactcagtttcaagactgtattattcaaggcttaactgaaaccggtactgatttggaagcagtagctaagtttcttgatgcttctggagcaaaacttgattaccgtcgatatgcagaaacactctttgacattctggtggctggtggaatgctggccccaggtggtacactggcagatgacatgatgcgtacagatgtctgcgtgtttgcagcccaagaagatctagagaccatgcaagcatttgctcaggtttttaacaagttaatcaggcgctacaaatacctggagaaaggttttgaagatgaagtaaaaaagctgctgctgttcttgaagggtttttcagagtcggagaggaacaagctagctatgttgactggtgttcttctggctaatggaacacttaatgcatccattcttaatagcctttataatgaaaatttggttaaagaaggagtttcagcagcttttgctgtgaagctctttaaatcatggataaatgaaaaagatatcaatgcagtagctgcaagtcttcggaaagtcagcatggataacagactgatggaactctttcctgccaataagcaaagtgttgaacacttcacaaaatattttactgaggcaggcttgaaagagctttcagaatatgttcggaatcagcaaaccatcggagctcgtaaggagctccagaaagaacttcaagaacagatgtcccgtggtgatccatttaaggatataattttatatgtcaaggaggagatgaaaaaaaacaacatcccagagccagttgtcatcggaatagtctggtcaagtgtaatgagcactgtggaatggaacaaaaaagaggagcttgtagcagagcaagccatcaagcacttgaagcaatacagccctctacttgctgcctttactactcaaggtcagtctgagctgactctgttactgaagattcaggagtattgctatgacaacattcatttcatgaaagccttccagaaaatagtggtgcttttttataaagctgaagtcctgagcgaggagcccattttgaagtggtataaagatgcacatgttgcaaaggggaagagtgttttccttgagcaaatgaaaaagtttgtagaatggctcaaaaatgctgaagaagaatctgaatctgaagctgaagaaggtgactgaattttgaaactacaccctcagtaaagcaaacaggagttgtagataaaatgtcatgtctcatgtgtcctggttcttacatcttcctacctccctgtatcaagcatgatataagggctttcatggcaaattttattttaactgtttctatggttgctggaaatgttgggtttagtttctaaaaccatgttttaagtagctacaggagctatagatttgaatctaatgttgcattagtcttttcagttatcttctacctcctgtattttctactgtaataatgtaatttaaggccttccacaatgaacagttcactttattccctgggttttctataaacagttttaaggatatgatttggttaaaaaataatttgttataaaaattctgtttgcaaattaaactggaaaagtatccagagtctcaaaaggcaatgatttgtgagataatatggcatgcccggagccctgctcatcaatgaaaaacccatatgtaataatcgaattcatttaacatgaatcttgagtacgtggaccattgcttgcatgttaactttttgttttgttttgttttgttttgttttgcatttttaactccagatatcctaaagctcaattgtttggtctctggttttcatccttagagaagccatggagaacagacttgaaaagtttaggaaatcataatgtggcagaggtggtgggaagaagaaagttgagctttttccccttgagaaacttctgcatttagtttctatctttccaggcaaaacaaatgggtattcttttcatacaaccattttcaaatgaaccttagaaaagtcttaacatttaaggtattttatgcacagaatacacttagattgataggaaagaactcgtaatggagtttgagtaaagaaaatgactgatgtactaaacccagtaaaaattgttgaaaatgttaaaggtcagcatgttctaattgggaatctagatatagcttagatttcctattggcttagagtatttgctataacaaatgaagtgcaatgacaattatatattcctactcggtcatactggactggcttcgttctcttaatatactcagtaatgactcaagcctctggctattaacataccctagttgccgttttttaattgccatgagccaaatacttcttggtatacaattgatccatttattttaatggctgccttttcattttcatcttttcttgctgctacccatctatgtatgtagtcattggggggaaaatgtagccacattttttatgggaagactttgtgttaaaagtgaacattttgaaggtttttaactggtgaaactagcctggaataatgccaccagagactgagtggaaatcgccccttttgaaggtgccattcttatgagccaaaagtttgtcatttaaaagttcattttgagggaataacatgtaatataatttgaaataaaggtatagtaaccttaaaaagaacattataactgattgttgtgaatggggtgaatttgttaaaatgagtaactttgataaagtttttcatgcacaggcaaaatgtattcactagatttctacgtagtgatctgcttttactttgtaatttgtagttctcaaaagacttttttttaaaaaaataaagtccatacttacacttaggctttataaaaaaaaaaaaaaaaaa

SEQ ID NO: 458 - DNA, 3123 bp, Homo sapiens
ttggctacatcggacccagatgactgcctcctcacttcctccctcccgattccgccgcggcccccaaagactctcggggtggccccttgtccgcaccgcttggagggagtgtgctctgagttaagctggtctcttctggtcctggaaaaaaatgagtattgacaaggttgctggatctgcgcagaaaagaaagtgccacttaataaaaaatttagcccggcagtggtaccgtctgcagagcttgctgcccttggacgttagcaggaagccttcggggtgctgtaatcggcgggcagaggagagggaggccgcggaattaaaaggaacaaaagctagagcgccatgccaaacgtccccggcaagacccagttaggcaggagccgggagtgatgggaaaatgaactagaacatattggagaattgggagaagtctctttggtttggaaaaaaaaaaaaggaatcttcagcctagatcactttcttatccggactgggatattaaatatacgacacatccaggagtttattggagcgcagactgatggcgcaaaggtacgatgagctgccccattacggcgggatggacggagtaggggttcccgcttccatgtacggagaccctcacgcgccgcggccgatccccccggttcaccacctgaaccacgggccgccgctccacgccacacagcactacggcgcgcacgccccgcaccccaatgtcatgccggccagtatgggatccgctgtcaacgacgccttgaagcgggacaaggacgcgatctatgggcacccgttgtttcctctgttagctctggtctttgagaagtgcgagctggcgacctgcactccccgggaacctggagtggctggcggagacgtctgctcctccgactccttcaacgaggacatcgcggtcttcgccaagcaggttcgcgccgaaaagccacttttttcctcaaatccagagctggacaatttgatgatacaagcaatacaagtactaaggtttcatcttttggagttagaaaaggtccacgaactgtgcgataacttctgccaccgatacattagctgtttgaaggggaaaatgcccatcgacctcgtcattgatgaaagagacggcagctccaagtcagatcatgaagaactttcaggctcctccacaaatctcgctgaccataacccttcttcttggcgagaccacgatgatgcaacctcaacccactcagcaggcaccccagggccctccagtgggggccatgcttcccagagcggagacaacagcagtgagcaaggggatggtttagacaacagtgtagcttcacctggtacaggtgacgatgatgatccggataaggacaaaaaacgccagaagaaaagaggcattttccccaaagtagcaacaaatatcatgagagcatggctcttccagcatctcacacatccgtacccttccgaagagcagaagaaacagttagcgcaagacacaggacttacaattctccaagtaaacaactggtttattaatgccagaagaagaatagtacagcccatgattgaccagtcaaatcgagcagtgagccaaggagcagcatatagtccagagggtcagcccatggggagctttgtgttggatggtcagcaacacatggggatccggcctgcaggtttgcagagcatgccaggggactacgtttctcagggtggtcctatgggaatgagtatggcacagccaagttacactcctccccagatgaccccacaccctactcaattaagacatggacccccaatgcattcatatttgccaagccatccccaccacccagccatgatgatgcacggaggaccccctacccaccctggaatgactatgtcagcacagagccccacaatgttaaattctgtagatcccaatgttggcggacaggttatggacattcatgcccaatagtataagggaactcaagggaaaaggaaacacacgcaaaaactattttaagactttctgaactttgaccagatgttgacacttaatatgaaattccagacagctgtgattattttttacttttgtcatttttcatcaagcaacagaggaccaatgcaacaagaacacaaatgtgaaatcatgggctgactgagacaattctgtccatgtaaagatcctctggaaaaagactccgagagttataactactgtagtataaatataggaactaagttaaacttgtacatttctgttgatcacgccgttatgttgcctcaaatagttttagaagagaaaaaaaaatatatccttgttttccacactatgtgtgttgttcccaaaagaatgactgttttggttcatcagtgaattcaccatccaggagagactgtggtatatattttaaacctgttgggccaatgagaaaagaaccacactggagatcatgatgaacttttggctgaacctcatcactcgaactccagcttcaagaatgtgttttcatgcccggcctttgttcctccataaatgtgtcctttagtttcaaacagatctttatagttcgtgcttcataagccaattcttattattatttttgggggactcttcttcaaagagcttgccaatgaagatttaaagacagagcaggagcttcttccaggagttctgagccttggttgtggacaaaacaatcttaagttgggcagctttcctcaacacaaaaaaaagttattaatggtcattgaaccataactaggactttatcagaaactcaaagcttgggggataaaaaggagcaagagaatactgtaacaaacttcgtacagagttcggtctattaattgtttcatgttagatattctatgtgtttacctcaattgaaaaaaaaaagaatgtttttgctagtatcagatctgctgtggaattggtattgtatgtccatgaattcttcttttctcagcacgtgttcctcactagaagaaaatgctgttacctttaagctttgtcaaatttacattaaaatacttgtatgaggactgtgacgttatgttaaaaaaaaaaaggtgttaagtcacaaaaagcggtaataaatatttcatttttgattttttgttaaaaaaaaaaaaaaaaaa

SEQ ID NO: 459 - DNA, 6822 bp, Homo sapiens
gtgaatgaaggagcgggcggaggaggaagtgtcatggcgtcgggccgtggagcttcttctcgctggttctttactcgggaacagctggagaacacgccgagccgccgctgcggagtggaggcggataaagagctctcgtgccgccagcaggcggccaacctcatccaggagatgggacagcgtctcaatgtctctcagcttacaataaacactgcgattgtttatatgcacaggttttatatgcaccattctttcaccaaattcaacaaaaatataatatcgtctactgcattatttttggctgcaaaagtggaagaacaggctcgaaaacttgaacatgttatcaaagtagcacatgcttgtcttcatcctctagagccactgctggatactaaatgtgatgcttaccttcaacagactcaagaactggttatacttgaaaccataatgctacaaactctaggttttgagatcaccattgaacacccacacacagatgtggtgaaatgtacccagttagtaagagcaagcaaggatttggcacagacatcctatttcatggctaccaacagtctgcatcttacaaccttctgtcttcagtacaaaccaacagtgatagcatgtgtatgcattcatttggcttgcaaatggtccaattgggagatccctgtatcaactgatggaaagcattggtgggaatatgtggatcctacagttactctagaattattagatgagctaacacatgagtttctacaaatattggagaaaacgcctaataggttgaagaagattcgaaactggagggctaatcaggcagctaggaaaccaaaagtagatggacaggtatcagagacaccacttcttggttcatctttggtccagaattccattttagtagatagtgtcactggtgtgcctacaaacccaagttttcagaaaccatctacatcagcattccctgcgccagtacctctaaattcaggaaatatttctgttcaagacagccatacatctgataatttgtcaatgctagcaacaggaatgccaagtacttcatacggtttatcatcacaccaggaatggcctcaacatcaagactcagcaaggacagaacagctatattcacagaaacaggagacatctttgtctggtagccagtacaacatcaacttccagcagggaccttctatatcactgcattcaggattacatcacagacctgacaaaatttcagatcattcttctgttaagcaagaatatactcataaagcagggagcagtaaacaccatgggccaatttccactactccaggaataattcctcagaaaatgtctttagataaatatagagaaaagcgtaaactagaaactcttgatctcgatgtaagggatcattatatagctgcccaggtagaacagcagcacaaacaagggcagtcacaggcagccagcagcagttctgttacttctcccattaaaatgaaaatacctatcgcaaatactgaaaaatacatggcagacaaaaaggaaaagagtgggtcactgaaattacggattccaataccacccactgataaaagcgccagtaaagaagaactgaaaatgaaaataaaagtttcttcttcagaaagacacagctcttctgatgaaggcagtgggaagagcaaacattcaagcccacatattagcagagaccataaggagaagcacaaggagcatccttcaagccgccaccacaccagcagccacaagcattcccactcgcatagtggcagcagcagcggtggcagtaaacacagtgccgacggaataccacccactgttctgaggagtcctgttggcctgagcagtgatggcatttcctctagctccagctcttcaaggaagaggctgcatgtcaatgatgcatctcacaaccaccactccaaaatgagcaaaagttccaaaagttcaggtgggctacggacatctcagcaccctcgtgaaactggacaagaagccagtggagaccaacggtcctgatgccaatcacgagtacagtacaagcagccagcatatggactacaaagacacattcgacatgctggactcactgttaagtgcccaaggaatgaacatgtaataatttgtttaggtcaatttttcctttacttttttaatttaaaaattgttagaatggaaaaattccttctgatctagcagtggtaacccctgctgttgctgccactgcttcaatatttgtaagtgctgctttattcttcattctgaaaagaagagattatagtaaacaagtctttatctccacatatgatagtgttataaatactgtaaaagcatggaaggtgcaaaactcagtatttctacaattgcagctaagaacattaggatgaatggctggctgcttctaggaatataagatgcctcaagcattcattatttatgatttgaatactgtagctattttttgttgcttggcttttgaatgagtgtaaattgttttcttttgtgtatttatacttgtatgtatgatttgcatgtttcaatgataaagggataaaacagtatactgacaactgtttacaagaaagtggagaaaaatgtacatacatttttgtatgtttagatattaccgtaaatactcaggattggagctgcttgtaagtataacaatatacagaataactttattttatcttgtcagagtccatcactaatctaaaacaaaggtggcacttttttatgttaaccttaaactctaggccttactggaagccactgataggggacacttcactaccagatgtgtgcagtgcaacagatggtcatatacactgtgaggcactgaaattttgccttcagaggttctgaccagattggctgctgaaatagcccctaactttctgaaggcttgaagaggaaaaaataaagtttacatactcttgatgtgaagtgcatttaaatgtttgttggcttgttgcagttctatgaaacagagctgttaataatggttatgtggattactgtgatttgaaaactaaattcacaataacttacctagtagagatttagtgagttgtttcctttaaagaattttacactacatattttaatagtaaacagggatcacttttcctttagcattcagaatgacaccatattcttaaatatactccttccctgaagcgtgtttgtgtgtgatgccatatttctttttcaggtaaatgtagtcttccttataaaaatgaaattaaacctatgctctcaattcttttatattctaacaataaataaaaaagaaaagattactgactgtgcattgtacctgtatttatagtttatggttatcaggaagctctgtaagaaagaaaaggtcagcctcccaggcaaaccagtagtggaggttttacatttgtttgcacatctcagtatatttctgttgaggtaaagtttgcacagtcatctgacttctgatcaagcattagattttaacttgtttagattttgtcttaaacaccagtaatatggctcttgtttatcagctaatcttgaatttattctgtggtaaatcttttgagttgttgagtatatttgagattgattggattcgacctcttgttgaactgaaaacttaattttttctctgtatttttgttacaaagccactgatacgtgcacaattgtaattaagtatgttgcagttgtaaatattagagtttaatctcatgctctacctttatttagcaattacctaatttgccagtagctttataatttttaaagataattgttcattattttgtcaatgttatttgaacttggggtacttaggagcctctttgtagggactgtgcctaggtagcatgtcctaacatttgttctggtcttgcataacttcagtaatctttgtcattatatgtaactttgttgctctgtatggcataatattgtatccataaacatggtaattttgatacagttatacttttacagtggtacataatccaaggactagtatagaattaagctgagtgcaagatgagggagggaagggctttcttggtaatttagatgtgaaacctctacagagctatcatgtaaaaactacataaggtggttgtgctactgtataattgggggtgataataccaggaattttaataagattttgtaaagaatatccagaaaagtagtgaacttattttcagtagacatagaaaacaatgtgaatatttaaggtctgtgactatagttaaacttcactaagaatttgcagaattgttttgagatgtgtgaataaaggtaattttattgaatcttcattggtgctaatgatggacagttaaaaagatagctagtgtatattgttatgggtcagtacttattagtacttccaaaattgaatttgaaatgctatgtattcacttttcactctgtaaatgtaattctttacaatgactttatttattaaagggcagccagttgtcatttttacaggattgtgtgagctattcaaactcttcaacccctgaacagggtattaagcttccaaaataatgatggggataaatatggaaatcctttttaagttgtatttccattaaacaaaaacccttataattcatactatcatgaatttgctttatccatctcatttgcataacagttcatctgtctggtcccattaggctctaccaaagaaagactctgatgagtggacattattactgtgactcttgtaagtagccataaataaaccaaaatagtatcaaatttaggtatgaaattccacatgtgcaaagtactgttaaggtgataacatttttgatgagatttaaaaaaatatttgaaatattaaaaagcattatctttaaacatcctataaaagagtgagtcatttttaagttgtgttttccctagatcactgatttgttacctttacacagaagcacattgcaaagaaaggctttatttctacctcttccattcagttttccaatattgagctgtgtccctctgaatatttgccttagctatttcaaaataggtattttcagaaccaaagcaaagggtggtttgttcactgaaacattcttagaggcctacttaacgggcggcagtatccggtagtggtaaaacctcacagtttcctaattgcaggtatgtaaataccaaaaaagtcctgttgtcagccctaggtttatctttgaaagcagttaaatgtgcaccttggtcttcctccgtgtgttcagattccttctggttaaagttcttattcagagtcatctaaaagaaatttctaacatgatgtatggtttcttgaatgtcatgagtggctgcgtatattgctttgtagcaacagattgtattaataattaatagaatacctaatttttttggcctatcctctttgaactagaaatgactacttgagggctatttcagagaaccaatatgaaatgtttttgttagtacaaaataccattgccttaaaaggtttcaagcacattttcttttctatttgagaacttaaattgctgacttgtattcgttaagcaaccttagaaataaaccactgcttatatctgcatgaatattatgcatttcatgagtacagttagttgattagatatttcagggttttgcattttctatagacatggggacttttttaacatggtaacgtcttaggaaaaccattctctcaaggtattacaccatttccaattttatccaaatgaaaagcatatctgcttaaatttaggatgtctttgctgagaatatttggaggctcttgttaggaagaatcatggattcagtatttctaacctgattactgcctcagaggctgtcttgaagggagacagtaggattcactgactacctttacccagatgagggatcaacaaatctcacacttaaactaaatgagttgacaggacaataggtgctaatctcatgtgccctaagatggacttatttagatagggatttttgcattggaaaagcagcacattctctgaccttgggtaccaagctatgatactaatttgagaatcacattctgatacgttaatatcagaaatcagtgagcaacctaattgctgtaagctgacatacatggaagccgaaatcaaaaggttgcttttgttagtttccctggagcatctatttttgtaatacattttgccagtgggactgaaaagctcaaaatgttttagacctaatatcatacattaattttctgctctgcagtgtcaatttgggcacagccagtttttacctctgtggcaccttctttataatttactgttacctattctgcctgacagattgattaagtaggttgataagatccatcgaagattgaatggctaggagtaattctgttctcgtataggcaacttaacttcactgtggaatccatttatctcaaagtttgagggctgtctactttattttcaagtttggggcggaaactcaaaatcccgagcattgccactttagtagtttgtttgatttgcctattgtttaataatgagtacattcttattaagtgatgagtacattcttaattttaaggtatgtttttttcaagcagcttcattttattaggaaaaatacatactcatttgttgtaaacagtgattgtggggtttcattttctgaatgtactcaaaactcccaacaacaattgaacaggatgtttgctaatagaaaatctaaaacaggaatatgtgtatatggcatgaattagtcattgactttaagcttcttatccatacaaggaactaataaaatgtttattgacaacataaatcc

SEQ ID NO: 460 - DNA, 8051 bp, Homo sapiens
agagaaaggggtagaaatggcggctccgctcggctcccgctgaggagggcgaagccggcggagtgtctgtgctgccggtctgcagcaccgcccccgcttcccgcacgccgcctgctcacgccgacttcccttcctctgcccggctctctcttgtgctcgtctgcgctccgcacgctccgggccggctcgtctctcattgcccggctcggctccgctggccctgactgaccggccggcgggccggccttgctcggctctcccgggcgcggcgtggactccgtccccctggctggaccatggtgaacacccggaagagctctctccgccttctcgggtccaagtctcctggtcccgggcctgggcctggggccggagcagagcctggggcgaccggaggcagcagccatttcatctcctctcggacccgctcctccaagacccgcgccgccagctgccccgccgccaaagccgggggaagcggtggcgccggcgtcactctggatgaggccaggaaagttgaagttgatggtagtttaagtgatagccacgtatctcctccagccaaacgcactttgaaacaacctgattctgtttgcaaagacaaatcaaaatcacgaagtactggtcagcgagaggaatggaacttatcaactggacaggccaggttaacttctcagcctggtgctacattaccaaatggacatagtggcttatcccttcgaagccatccccttcgaggggaaaagaagggagatggggacctttcttgtataaatggtgacatggaagtcagaaaaagttgtcgttccaggaaaaacagatttgaaagtgtgaaccagagtttgttatttgatcaactagtaaatagcactgctgaagctgtactacaggaaatggacaacattaacatccgacagaatcgtcgatcaggagaagtagaacgacttcgaatgtggacagatacagaatttgaaaacatggatatgtattcaagagtgaaaaggcgaagaaagtcactaagaagaaatagttatgggatacaaaatcatcatgaagtttctactgagggtgaagaagaagaatctcaagaggaggatggagatatagaagttgaagaggcagaaggagaagaaaatgatagaccatataatttgagacagagaaaaacagtggatcgataccaagcacctccaatagtaccagctcatcaaaaaaagagggaaaacacgctgtttgatattcatagatctccagcaagaagaagccatattaggagaaagaagcatgccattcatagtagtgacacaacttcttctgatgaggaacgctttgaaagaaggaaatcaaagagcatggcaagagcaagaaatagatgtttgcctatgaacttcagagcagaggacttagctagcggtattctccgagaacgagtgaaagtgggtgcaagcttggctgatgttgatccaatgaacattgataaatcagtacggtttgatagcataggtggattgagccatcatattcatgcgctaaaggaaatggtagtattcccacttttatatccagaaatttttgaaaagtttaaaattcagcctccaaggggctgtttgttttatggccctcctggcacaggtaaaaccttggttgccagagcattagctaatgaatgcagccaaggagacaaaaaagtggctttttttatgcgaaaaggagcagattgtttgagcaagtgggttggtgaatctgaaaggcaacttaggcttctttttgatcaggcatatttgatgagaccttctataatattttttgatgaaatagatggattagctccagttcgctctagcagacaagatcagatccacagctctatagtatcaaccctccttgctcttatggatggattagataataggggtgaaattgttgttattggtgctacaaacagacttgactctatagatcctgcactcaggagacctggtcgttttgacagagaattcctcttcaacctgcctgatcaaaaggcaagaaaacacatcttacagatccataccagggactggaatccaaaattgtcagatgcatttttaggtgaattggctgaaaaatgtgttggctactgtggagccgatatcaaggccctgtgcactgaagccgccctgattgcactgcggaggcgttatccccagatctatgctagcagtcataaactgcagctggatgtttcctcaatagtgcttagtgcccaagatttttaccatgcaatgcagaatatcgtgcctgcttcccaacgtgctgtgatgtcttcagggcatgcactatcccccatcataagaccactgctggaaagaagcttcaacaacatcctagcagtcttgcaaaaagtgtttcctcatgctgaaattagccagagtgacaaaaaagaagatatagaaactttaattttagaggatagtgaagatgaaaatgctttatcaatttttgagaccaattgtcactcaggatcaccaaagaaacagtcatcatctgctgctatacataaaccctaccttcattttacaatgtcaccatatcatcagccaacctcttacaggccacgcttattgctctctggagaacggggctcaggtcaaacttctcaccttgctccagcacttttgcacactctagaaagattctctgtgcatagactagatctcccagcactttattcagttagtgccaaaacacctgaggaatcatgtgcacagatttttcgtgaagctcgaagaacagtacctagtattgtttacatgcctcacattggggattggtgggaagctgtcagtgaaactgtgagagcaacttttctgacattgctacaagatataccatcattttcacctatatttttattgtctacctctgaaaccatgtacagtgaactgcctgaagaggttaaatgtatctttagaatacagtatgaagaggtcttgtatattcaaaggcctattgaagaagacagaagaaaattttttcaagaattgattctcaatcaggcatcaatggctccaccacgaaggaaacatgctgctctttgtgctatggaagtgcttcctcttgcactaccttctccacctcgtcaattatcagaatcagaaaaaagtcgaatggaggaccaggaggaaaatactttaagagagttgcggttgtttctcagggatgtaaccaagaggctggccacagataaacgctttaacatcttcagcaaaccggtttcagattatcttgaagtaatcaaggaaccaatggacttatcaacagtaataactaaaattgataaacataattacctgactgcaaaggatttcctgaaagatattgacctcatctgtagcaatgctttagagtataatccagataaggacccaggagataaaataattaggcacagggcttgtaccctgaaggacactgcacatgctatcattgcagctgaattagatccagaatttaataaactttgtgaggaaattaaggaagcaagaataaaaagaggcttatcagtaacatcagaacaaataaatcctcatagtactggagctcggaagacagaaactagagtcgaagaggcatttcggcacaaacaaagaaatccaatggatgtgtggcacaactctgcaaataaatgtgcatttcgggttcggagaaaatcaaggcggagatcacagtggggtaaaggaattattaagaaaaggaaagttaataatttaaaaaaagatgaagaagacaccaaatttgcagactatgagaaccatacggaggacaggaaattattagagaatggagagtttgaggtaagcactgactgccatgaggaaaatggagaagagactggagacttatctatgaccaatgatgaatcatcctgtgacatcatggacttggaccaggggcagaggcttaacaatggagcaggcacaaaagagaactttgcatctactgaggaggaaagttcaaatgaatctctactggtcaacagcagcagttccttaaacccggagcagacctccaggaaagagactttccttaaaggaaattgtctaaatggtgaggcttccactgacagttttgaaggaataccagttctggaatgtcagaatggcaagcttgaagtagtttctttctgtgatagtggagataaatgtagttctgaacaaaagattcttctggaggaccagtcaaaagaaaaaccagaaacttcgactgaaaatcatggagatgatcttgagaaactagaggcactggaatgtagcaataatgagaagttagaacctggctctgatgtggaggttaaagatgcagaactggataaagaaggtgcttctaaagtaaagaaataccgtaaattaattttagagcaggcaaaaacgacaagcctggaactggttccagaagagccatctgagcctgtgcctcctcttatagttgatcgtgagagattgaagaaattgcttgatttgttggtggataaaagcaacaatctggcagttgatcagcttgagagattatattctcttcttagtcagtgtatctaccgtcatcgtaaagattatgacaaatcacaacttgtagaggagatggaaagaacagttcatatgtttgagacattcctatgaacttttcaagatgagtggtttatcctctccaatctgctcctcacagagcagtcttctgagccattcaatttcaaattgcaccaattatgtgcagagccttggtgtaaagtgctctctcactcattctttctctctgttgaatttggtgctattgtctcaggtacctgaaaccaaccagcctacaagaaccaaacagaacttcagaaacatgttgtattttccacaaataaaaaatacaaccccacagcttggagattttggtgctacagaaactgctctcgcttctgctcctctttttgtgcactctcttttggagactcctctcttagggagcagaccagcaaacaggaggaaactggatgggggcagttctaactgtgttgaattgtttaaacagtgggcaacttgttatttttttttcctccattttacccctttaatcatatttttcccccatctgggtaatggactgaaacctgttttagagttggctatggtctgttctggtgggaagctgaagaaactggatgaaattaggtcaggctctttagaactgcctttaacgtgcctttttattcatttgaggaagataaggctaaaaggatgggctgtttgaagcaaataaattagaaatatttctttggtcacaaccttgaaaataagttttgatactctatgtcattaagagacaaccagtgtttgggtatgaaatgcctgtcttattctcaaagctcaatcaagacacccagtaagccacataatatactaaaatggtaagttttcttgtaaggtctgttttggtttaagaaacatgaataacaacaaagaataatacacagtccacacacaaaaaaacaaaaaacaaaactgcacacgttttggtattgccaacaatgatgactagaaaataaatagatagtggccattttttcttctgtcagtggcaatttaatagttattcatgtttgagttcccagagaaaaatggttttcatatgtagtaaattgttgttttgttttaaagccaggacttgccaaatggacagaaaagagaggaattcatcagaagctccataaaattcattttctgtatgcttaattgcaaacgagctctggtatggtccttgaataacagtattaatgtttaaatcccatctcctaagcttaccttcacaactcttctttttgattggaaaccattttgaatcttgttgagtgatttctgtgaattgtatgtatctgaaattaattatgggttactagttttacaaaaactttctacaaatttggagacacagtctaggcagttgcaatgaggcaaaggatgcagtgactttttttatcagatgatttttaaacaaaaagaaaattttgccagcaagttggcttggtatcttcattcattgtagccgttagctgcaggtgtgtctttccaatatatgcaacacatgtagtttgggttttaattagggcgaatggtcttggactactgcagagattctgagctacctcagctttttgtattttagttaccaacagtgtttacagagtcttgtaatcactttgccaccgtttacatcctgaagctaaggtacttgtctccttgtctttggctctttgtagtgtgcagaaagcatactttggccatagcctactgcagtaatccaaagtgcttctttgcatttacatttacatctaacgccttctaattctagcttaatttttttttaaatgccacgtgttttctttgtacctagtctgtgaagtttctgtaatatccagttagtcatacaagtcaagatgctacccatgtagacacactgtatttttaaggtgggcaagtgcgattaacgatgaaccattttaaaggggaggttatttgaaacctctaatttgattattgggaggattttcatgctttctttagtatttattaccatcataccgattcaaactattttattgtctaatacattagcattttgtattttgatggaaattgttacagaatttaaagatttgatgaaataagatgtagcagattttttgtagcaagtttctggtaaaagggttttttgcaagtctcaggttcttgctgcactatttttttttaaatatttattccagttattctaattcagaagcattcttttcaagtaacagcagcacttgtgaaaggaaaaaaaaatgcacatgtttcttagtaggttactaaatttgtacaattaattaagattttagccatcagtgagtttgaaaagggaaatgtatttattttcagcattaaaatgcttccaaaagatcaagttgcttttgtttgtttgtttttttaaccgtaatgtagatggagaaattggaggcaacctcagtataggaactgccactttgaacagtttaggtcttaaagagaaagtcaatctaatgccaaggggagaacaatgagctgaaattgtaccaactcctctggccctccttccctcaattaaaaaaacacacttaccagttttgcttattttacagatatctggtggttctatagtttaaagcagcttgtgaaattaaaaaagtggactcaattttgtttacctttctgtaagtttttcatttttgctgtatagcattggcaaaaatatgtacaaattgacctctgttcttatttcctattgtgagcattataaagataagctcctatgtaaaaccttgctctcagatgagtaaaatatgtatcacagcatagctcagcaataattcatgctcagctgtggggaccctgggggctttttgaagatgatggaaccgcactagggttgaaactgatggctgtggagttaattgtgttttcgagcttgaatctcacctgtgattttttttttttaatgttgtttcatgacttgatttttctcataagccaatgtatttgtaggtttactggattttatttttagggagtgggtaatttcttcccttttttgattaagttggttcagctatggtgctattcagtaggtatcttcagtgtcaggtcccgtagctgaatgccattgttattataattattatttgtaatcacattgtaagcttgaatttgggcttgtacctgcatcttttgtattctgtacatctggttacttagactttgggagtccaatttggtttcagtcatgtatgtctactttgtagtttaagtagacttcatcaactatggtctattttgggtttgtagttttaatttagaattgtgttaaattgatgttttgcatttgacttcatttgacattagttgaagtaaattatttaatttttgaattctggaatttgaacatttactgtaatttgtaatataactgctgtgaaatacttgaataaagatgacaagaaaaacaaaaaaaaaaaa

SEQ ID NO: 461 - DNA, 7051 bp, Homo sapiens
gcgggtggtgccggtggcggcggcgggggagcgcgggacaggaggcttcggggaagatggacccggcgccctcgctgggctgcagcctcaaggatgtgaagtggagctcggtggccgtgccgctcgacctcctggtcagcacttaccggctgccccagatcgcgcgcctggacaacggagagtgcgtagaagggctgcgggaaaatgactatctgctgattcattcctgccgccagtggaccaccatcactgcccacagcttggaggagggtcactatgtcattgggccaaagatagagattccggtacattatgcagggcaattcaagctgctggaacaagaccgagatataaaggagccagtgcaatatttcaacagtgtggaggaggtggctaaggcatttcctgaacgcgtgtacgtcatggaggatatcacattcaacgtgaaggttgcttcaggtgaatgcaatgaagacactgaagtttacaacatcaccctgtgtactggggatgaactcactctaatggggcaggcagaaatcctttatgcaaagacattcaaggaaaagtcacgactcaacacaatcttcaaaaagattgggaagctcaattccatcagcaagctgggaaaaggcaaaatgccgtgcctcatttgtatgaatcaccggaccaacgaaagcattagccttccattccagtgcaagggcagatttagcacccgaagtcccctggaacttcagatgcaagagggcgaacacaccatccgcaacattgtggagaaaaccaggcttcctgtgaatgtgactgtgccaagccctccaccgagaaacccatacgacctccacttcatccgtgaggggcaccgctataagtttgtgaacatccagaccaagacggtggtggtttgctgtgtgctgcggaacaacaagatcctccccatgcactttcctttgcacttgactgtccccaagttcagcctcccagaacacctggtgaagggagagagctggcccgaaaccctggtccatcactggctaggtatctgccaagaacagttcgacatcgatgagtattcacgggctgtccgtgatgtgaaaaccgactggaatgaagaatgcaagagccccaagaagggtcggtgctctggccacaaccacgtgcccaattcgctcagctacgcccgcgatgagctcacccagtccttccaccgactctcggtctgtgtgtatggcaacaatctccatggcaacagtgaggtgaaccttcatggttgcagggacctggggggagattgggctccctttcctcatgacatcctgccctatcaggactctggagatagtgggagcgactaccttttcccagaagctagtgaagaatcagcaggcatcccgggaaagtcagaacttccctacgaagagctgtggctggaggaaggcaagcccagccatcagcctctcactcgctctctgagcgagaagaacagatgtgatcagtttagaggttctgtccgatccaaatgtgcgacttctcctcttcccatccctgggactctgggagcagcagtgaagtcttcagatactgccctacctccacctccagtgcctcccaaatctgaagccgtcagagaagaatgccggctcctgaacgccccacctgttccaccccgaagcgcaaagcctttgtccaccagtccctccatccctcctcgcacagtcaagccagcgcggcaacagactcgctctcccagccccaccttgtcctactattcttcagggctacacaacatcagcgtcactaaaactgacacaaatccttctgaaagcactcctgtttcctgctatccatgtaaccgagtgaaaactgattctgtggacctgaaatccccgtttggaagtccttctgctgaagctgtgtcctctcggctctcatggcctaaccattattcaggagcatcagaaagccagaccaggagtgacttcctgctggatccaagcaggagttatagttaccctagacaaaagacgccaggcacaccaaagagaaactgcccagcaccttttgattttgatggctgtgagctcctggccagccccactagcccagtcactgcagaattcagtagcagcgtctctggttgtcccaagtcagccagctactctctggagagcacagatgtgaaatctcttgcagctggtgtgacaaagcagagtacgtcatgccctgccttaccccccagggctccaaaactagtggaagagaaggtcgcctccgaaacatctcctttgcctctgaaaattgatggtgctgaggaagaccccaagtctgggtcaccagatctctcggaggaccagtattttgttaaaaagggcatgcaggacatcttctctgcctcctaccctttctcatctccgctccatctccagctggcccccagatcctgtggcgacggttccccatggcagccacctgctgacctatcaggactctctatagaggaagtgtccaagtcactacggttcattggtttgtccgaagatgtcatatcattctttgttactgaaaagattgatgggaacctgcttgttcagctaacggaagaaatcctctcagaggatttcaaattgagcaaattgcaggtgaagaagataatgcaattcattaatggctggaggcccaaaatatagccaaataacccccggccagcatggaacaaaactgatcaatgcgtgtgctagaaggggtgggctgggacacaatttcatgtttttgcactaaaaaccttctctgtaaatagggataagagaaactcttactatgcagattacgtttttgaatggtgaacaggctattttgtacatcaataaaaatgctgtacagaacacttggaggtgtgccttgtacgtcactcaacaaacactcagcagctgctaaaagaaaaaaaggcatgtgcagagaaatcattcttacccaagtaggtttatgtgagaaggtatgatatttattacaaaatagccaaagctggaagacataaaaatctttaaaaaaaaaaaaaaaacacttttgaacaagtcccttctttcaggagggttgactttagacaattaactgtgttctgtgctctgtcattcagattgcttcttgctaattgttttactcttgtgcctgaaaatgttagtgatacgaattgacactttaatgttgtatgcttggtggggatctttttatcacaaggcattttccaagagtcatatgttgataaagggatatatgttgtccttagaaatcacacaaatcatgaccacaataatttatctgtaactgctgctaattttattgagcagagaaaaaagaatatacatatataaacatgtataggtgcatacacaatacacccggatatgttttacacataattttgattctgatattttagataacatctgttcacttttaaacaatctgttgaggttttgggactgttatctacattgattctcttaggaatagtggacagaatgactccaaagattctcagaaccctgtctcttgaagctcaatcttatttgggttcatcactgaaaacttagaacaaatcagtaaagaatcctgtattgaagaattaagtttgagtttaagcccactcaccgcagggctggtttttgcatgtaatactcccatgatgtctggggaaatgacagtttctgttgaattataattctccggtttaagggtctccttcccctggtgtctgatggtgagaggtctgaagagcatttgtcagagtacattaggcattctcaacctacttcatgctttacgagagctgagaaatcagacgcaccggcctttattattatatatgctacatctgttgagtatttttaaaataccaataagaggacttgtttatttcataaaccacttcttccctctctttcaaagaaaatacattattaccatacttttacattagtctgagaatttttgctaaatatgattaagtattccaaaatataatggcgtcattattcttgacttttttagagaatatacatcttaagactgtattagttctcagagcaaggcatcatctactcccctgcacctgagagtctggccccagattccagatgtgcggacagcccatgaccgaggtgcacacagtgccctcttgaataggaaggtcagccagtgaggcggcagcataacttgcaggatggacttatatcttaccatctcttcctgctaccaaaataaaaaaataaattgaaagacaagacccaccagtctagttttgtagacctgtgaaatgtgtctttatttcttggcattagaagaaagatatttttaatccatatcgtggttttagagttgaagtgaattgatacccaattttccatcttagatctcctttatcaaaaaaaaaagcattttttttctcctaacgtgtctcccaaaatgtaaatactataggcaaaaagagtaccctgtaaaattctcacactggagcacctcttcaaaagtcacagataactcaatgaggaagtgctggtactgcactcacaggacatgagacctatgaagctttcgtgttttgaaagcatccttctgtgtgagggggactgcctcccttagtaaagtaaacctctcagaacttctttttaaaataaaaacagacaagatgcagttactaagctgcaagttttcattggcaaacctagctgaatccgttttaaaatacttagcactcggacacaattctcaaactcaggaagaaggaacagggttggtttgggtttactataaaggttgcctcacataaacaactgactccttttagcgttttttttctttttgtaaaaactttacacaaaatagggttttaaattctttttgcttgttttggacttggtgtatttttgtcaagtttatattgattggcaacgcagagactccttgagggcagggactgtggcctttgattcacttatgctacagtctagtatcactacagtgctgagtaaaagacacagcccctgccctcttggagatcatattgtttatatttgaaatctcagttgctaagagtatgtatgtgtgagtaagaaagacgtgaagtcctatgggcagctgggtatatggagaattacgtgtgtcctgtctttaaaacgtcagcctctattaaggggtacagaacaccccaagatcactaaaacttggaatgtgttggaggcagaaagtatctctctcattgcctagtgttgttgtttttttgttttttgttttttgttttttttactgacctggaattcttttaattgtaataaatatcttctgtcacaaataaatgccacaaataaatgaaattgccattcctaagctgagcacctgtctgtgaaggaccttggtgtcctgactggacagagcattcatagctccaagagaatcatgacaagatatgcaaagcagggataataaggagaaagcccttccctttcgagaagcccttccctttcacagcccttccctgcgattctgcagtgaaaagtgatgcccagagatccacacacagaacccttctaaccagccaggtcaagacttatcatcttatctcctctggcaggtcccctgtaatcaaaagagaggaagtgtctatctaaacaagacccttttgggtccttagattcatggcaaaaatcatcatggcccccatcagaaaagaaaatcagcaataaaccaagccaagcaactaaaatgtataatgtggacctgactcatgttgggaggcagaattcagacactcacagatcaatcttgcaagttttctcttctttaagttgagctgctcaactttatgaactgtgaaatttacttacattctttcaacccacatatatcattgcagtttatgaagttgcagtgaactgcccattcagctaaattgcagtgtttattcttgtctcatgtcgaaatacaacaatcttatgggaaatattatgacagtccgttccaactgttctcagacacatgcataaacagtctctgctcacattccacagccacctgcatgttatccatacagctccctgagaagtccagggatgggaggtggggtgtggaaggatggagggtccttcattttctaaacactttgtataagtcactactcatcgtgcctagcaagtataagattaacattttgaataacaaactggaaaacaaataatccttcaaagaacctagcgaactgttcaaaggaaattttaatttcagtctaccagaaaagttaaatctgttgttggacgtagggggctttcagaaacatgcctcttatatcaatttccactatctttcaagttacctaaaggcaccaggctgcttgagcaagaagaataaaaggcctagagtgcaaattatgtgaagtagagtttttagattgtgggattgtaataatacgggattctcatggttacatcatgttaaatcacactgttcagtctttaaaacttggtgttttaaaatttgtctcattgtgatagccagaaacaaggaataaacgtgatttcagtttaaactatatacaaatatcttctgtaattttgctgctctaatttttaggctataaattttgtaatagagcttatcagatcgcaaatttcctttgtttacaatctcatgtagtagggctcagataatttcttagctataaaccttttctcccactctcatattgtttcatttaaaatatttaagctaagcctaaaaattgaaatcagttaagaatttggagagtttatcttaaatggaaatggtgtattcttttcaaagaattttgtaaccatctttacagtttctttgcttggaaaacttgggttgttaactaccagttaacaatggcattactttccaaaacgttatctaatgggcccaatgtgtacctcaagataaacacagtatgttatgtctaaaaatttccttgtctgttgatttaaatggttctgaaatgtctgtaataaagaaattttcaaagttgcaaaaaaaaaaaaaa

SEQ ID NO: 462 - DNA, 6521 bp, Homo sapiens
gctgcggccggctgcggggataaatactgcggcagctactgccgcgcagcactcccggagcctgcaacgcttgagatcctctccgcgcccgccaccccgcagggtgccccgcgccgttcccgccgccccgccgcccccgtcgcgggcccctgcaccccgagcatccgccccgggtggcacgtccccgagcccaccaggccggccccgtctccccatccgtctagtccgctcgcggtgccatgccattcctcgggcaggactggcggtcccccgggcagaactgggtgaagacggccgacggctggaagcgcttcctggatgagaagagcggcagtttcgtgagcgacctcagcagttactgcaacaaggaggtatacaataaggagaatcttttcaacagcctgaactatgatgttgcagccaagaagagaaagaaggacatgctgaatagcaaaaccaaaactcagtatttccaccaagaaaaatggatctatgttcacaaaggaagtactaaagagcgccatggatattgcaccctgggggaagctttcaacagactggacttctcaactgccattctggattccagaagatttaactacgtggtccggcctgccttcaaaggcctcaccttcactgacctgcctttgtgcctacaactgaacatcatgcagaggctgagcgacgggcgggacctggtcagcctgggccaggctgcccccgacctgcacgtgctcagcgaagaccggctgctgtggaagaaactctgccagtaccacttctccgagcggcagatccgcaaacgattaattctgtcagacaaagggcagctggattggaagaagatgtatttcaaacttgtccgatgttacccaaggaaagagcagtatggagatacccttcagctctgcaaacactgtcacatcctttcctggaagggcactgaccatccgtgcactgccaataacccagagagctgctccgtttcactttcaccccaggactttatcaacttgttcaagttctgaatcccagcacatgacaacacttcagaagggtccccctgctgactggagagctgggaatatggcatttggacacttcatttgtaaatagtgtacattttaaacattggctcgaaacttcagagataagtcatggagaggacattggaggggagaaatgcagttgctgactgggaatttaagaatgtgaacttctcactagaattggtatggaaaagcaaaatactgtaaataaactttttttctaacaatttgccagcaagactataagggcaataattctatttcagcggtgaaaatggagtcctcttaatggtcacagaaactctcttatagttccctaggaagaaaaaggcaaaactcaaatacaaaataggacgctttgtttacaatgtgaaaatttgtttagaaaagaaaaaatgaagaaggaaaactatataggagaaattcctgggctttggggtttgatctggtgtttgttttgagaaggcgaaggaagcgccacccatcctaaacctgcatgggcacagagccttaccctacagagataccacacaatggtctacctctaaaagcgtagagtgccctctctgacaacgcatgtgatccagtaggcagtgtctgtttttctcgtaagtgttttcatcactataaaaagtgatttaaaatggaaagggatattggaggcaatcctctggtttcacacttccttttcaggcaaacagggccctccttagagttatctgttcaccagaacaacccaaaagcacatgttccttttttcctgtcatgttgtagctcatttgggggaaaagaaggccaacttaaaacagtcccaggggaggattgcttgagcccaggagtctgaggtttgcagtgagctatgattgtgccactgcactccagcctgtctccaaaacaaaacaaaacaaaacaaaagccgtcccagaggaagtcctgctgcagaaaagatgatagaattggtcacccaatcaatagctgtgaagacttccttattcctgctgaacttccttccttggatatcttcatggataagcctgtgtctgtggacagagtggggcccaagtgctgaggctcgaaagacaggttttacaatcagccaattaaacatcttaccagttgctgtaccccttgccaaggggatgagctgaggagcttcttttctttaggtccaacatcaaaatgagtccatctgagctagggctttttgcaaaggtgattaaaaatcaaggctggagttccagccaaatagggaggagaggtaccacaagttcatcttaaacttgcttccgggctgggtagttaaaacaggaagatcccaaggggatcttacgaggcaaatatcagcaggtaactgtggaagaaaggaaatctcaggacctaatgagttcgttgtaaaatattcctgggaatagatgggggatctactcccagttttttactttttacagaatattgttgctttcctacaacaatgtacatatatttgcagttgtatatgctttttttttttccaaataaacttgtcaccctgcatgcccttggcaaataagtgaagcagaaataggaacacagtccacattcaagttgaggaacagtgtatctttaagagctgagctttgggtgacctggaaagggggaaagatggctaagcatggagagaaacgaggcaagagacaagctatgatacaacaccgcttcagcccctgccctcaatagcacacaacccacatatcagctttctgaagagaaggaacctactgtttagtgctcctcactttgcaatgtttgtgctacgccagaatttctccagtttttttcattatcatccccctgagaaaaaaattacattgaatttaaattttccctaataagagaaattaaatatgaaagaataggattttgttgggtaagattgagctttggaaggtcacgaaccattattctatctaaggtgtgtgttttgttttgtttttttttgttttttttttgcaatccctctccccctgaaccaatttcacattgggaatgcaggacctagactgctgaataaaaagctacttcttctataattgtcaggttctctccaatttctcagcttcctcaaagacatggggtggagttgggtgtgccatcactgagagagctctggaacttttgactcttagtgacatttttagatttaggggttcatggccttccacatgttgccaccaactggtgatctctgccccttcatgctgatcaagaaagtagaaactcctcgtcgccttcaggtttgcagtcgcagaaacattgcctgctgtggactgtcagcacaaaactgggacactggtgtcatttagactgtcagcagtgcacatgattgtacgatagactccaggcaaccatgtgcatctgtgcaagatgacctctgccccaagagaagggttacggtctaattaaatgtttaccaagatggtaccagtgggctctccccgtgtcctttggtgttattggagctggtgtatgacagactcaaggaaattttttaaggaaaatgaagaagaaatcaacctttatggttctctttcattggaagaggagaataaggaaagaaatggcaggtagagagggagggggaaaggaatagaaatggcatgtctttgatgctgtggcttgtgtggggacaatgggaagagcacagcaggcacaacatatctgtgttagtgccacgtggtatctgttaagtatggccagagcctcacatataagtgaagagagttaagacaattcttgctctttgaacaataatagtctatagaatttctattggcaaaccatcccagacaacctgacctatcaaacaaaagcaaataatccctgtctcagaactgctggtctaaaagctagaaggggcatgataatggaaattgctagaaaagagagaatgctctactctctttcctgtgcctacctacccccatcctaaaccctgtaaaacagaatttcaaaatagatgtcaaatatgaagtaattcagacttccaaagaaggaaagagttctgcccagggcagtatgagcaaatccacagggatgttaagatttggtccaactcaaaggtttatgggcagtgagcctagagtctcttgagagtaaacccttgcatttgggacaaggagaatatgtgaagttcaggagtgctcacactagagcaagatccagaaaaaaaaaaatccaatggcattttaaactagattgcattatcactcaatgctgttactttgagcagacaaatcagttgaatgggagggcaaatggcagaaatgaacaaaagctattaggtgaaagcatccccaatgtatcagttgtgagatgatttttgtttaatgatgatcaggtttacattgaagtggcttggaagacgtatttcagagggactgggtttgtactgcaaaactctgaacactagagcaggttctactagcacttgggcagtaaggtagcgggtgtgtattatgctattgccatagttctcgtctttgtggattcacataccctttcccatgaggagcttgctactaacagcctcctgtttctgttgtttttatatgggagaagagaaagagcttggaatttcaattgtctaaacaattggtatgatttacaagaaggcaaaccattcaggagatgttcaacagtgtatcattcttagcattcaatacaatgtttattataaaatatacacctgagtttatgtttttctgccaggctgaagggcaataatgtcttgctatgcaaacactctattttatgtgtgaatttttttaactgtaattttatgtgtgaatttttttaactaaactctatcatcattttctatgttgacatcttttttttttttttaatctgtttccaactctgagtctgtgaactatctcttctgactggatgctggcctaaaatcctattagtgcttaaacagacctcaaaacactctgaacctgtaggccaatacagagatgttgttctttgatatatcttgggtccttgatggcttcaacaaacaaggtcataatttgtttaaattcagtgttttctgtagataccttcttctcagtttcattaagaagagtaaccatctttggttttccaaagaatggaaactcctaccctagactttagacttagagcgtctgcctttcacgatgagtaagagatccagaatgtttaggggatgtgcgtcagcccacctggtacagtggcaaagctgaatgcgaacttgaggcctcctgaggcctgaccttctatgcccccagccctccaccccaagcaccttttggtgtggctggaaacacatgacattggatgtgatttttctcaagcccttcactgtggaaggcatgggagactgcccagcattgggcatgtggctgttaacgtttccatttcaagtccctgattcttactggagaagttaaggagccacttaatgttttcacagacctctgattctgttgtgaatgtggcattccagtgagtacaacctgcttgctataaagaaagcagcatattttgacaattttatttcttccttgggtacttacatttttattacaaaaatggccgttataaaaaaagacagaagggctgggcagtggcttgctccctagaaactgagattccgaagcaggtgtttcctctcccctagactcagaggtacatttaatccatcttctccatttcctccttcaggaccagctatgagattcagtgcatttctagcccagcggatgttcattctccactaaacttcatcttttactaagcaaagggggattattccatgaggcagccaggagcaaggggccatgatattcatgactttgtctgctgggcatttttcaaagtgtccttgaattcactcagcaaacaaagctttctggagaatctctcaaaacttaggccctgctccatttggccaaaaatgatggctgctccaaaactctgaacttcttaaaactccatctgctacattatttctggagtttaaacatgactttttctgtctttgagtatagatgtgtttgtttaattaacgaagcacaagtctgttaagcagaaggctccaagctgtattctatacttgggaatccttggtgccatctttattctaccaagtgccaatcaccatggctaaagtgggcgtatattacagcctgtgtcctaagcttagaagctttaatgtacttttttaaatgaaaagtattagagggggttgaacattgtaactaaagcataaagttagaccaattacatgcagagatgtttatttaatattgtgtgagctgagtccttctgtataaattatttgcacacttttcttgcatgatgaactgattttttatagttgtttgtaccagacggtggcatatttttgtaaaaaacttttgacactgaattgcaataaatgtttttccaacaacacaaaaaaaa

SEQ ID NO: 463 - DNA, 7183 bp, Homo sapiens
ggaaaatggcgaacgactcccctgcaaaaagtctggtggacatcgacctctcctccctgcgggatcctgctgggatttttgagctggtggaagtggttggaaatggcacctatggacaagtctataagggtcgacatgttaaaacgggtcagttggcagccatcaaagttatggatgtcactgaggatgaagaggaagaaatcaaactggagataaatatgctaaagaaatactctcatcacagaaacattgcaacatattatggtgctttcatcaaaaagagccctccaggacatgatgaccaactctggcttgttatggagttctgtggggctgggtccattacagaccttgtgaagaacaccaaagggaacacactcaaagaagactggatcgcttacatctccagagaaatcctgaggggactggcacatcttcacattcatcatgtgattcaccgggatatcaagggccagaatgtgttgctgactgagaatgcagaggtgaaacttgttgactttggtgtgagtgctcagctggacaggactgtggggcggagaaatacgttcataggcactccctactggatggctcctgaggtcatcgcctgtgatgagaacccagatgccacctatgattacagaagtgatctttggtcttgtggcattacagccattgagatggcagaaggtgctccccctctctgtgacatgcatccaatgagagcactgtttctcattcccagaaaccctcctccccggctgaagtcaaaaaaatggtcgaagaagttttttagttttatagaagggtgcctggtgaagaattacatgcagcggccctctacagagcagcttttgaaacatccttttataagggatcagccaaatgaaaggcaagttagaatccagcttaaggatcatatagatcgtaccaggaagaagagaggcgagaaagatgaaactgagtatgagtacagtgggagtgaggaagaagaggaggaagtgcctgaacaggaaggagagccaagttccattgtgaacgtgcctggtgagtctactcttcgccgagatttcctgagactgcagcaggagaacaaggaacgttccgaggctcttcggagacaacagttactacaggagcaacagctccgggagcaggaagaatataaaaggcaactgctggcagagagacagaagcggattgagcagcagaaagaacagaggcgacggctagaagagcaacaaaggagagagcgggaagctagaaggcagcaggaacgtgaacagcgaaggagagaacaagaagaaaagaggcgtctagaggagttggagagaaggcgcaaagaagaagaggagaggagacgggcagaagaagaaaagaggagagttgaaagagaacaggagtatatcaggcgacagctagaagaggagcagcggcacttggaagtccttcagcagcagctgctccaggagcaggccatgttactggagtgccgatggcgggagatggaggagcaccggcaggcagagaggctccagaggcagttgcaacaagaacaagcatatctcctgtctctacagcatgaccataggaggccgcacccgcagcactcgcagcagccgccaccaccgcagcaggaaaggagcaagccaagcttccatgctcccgagcccaaagcccactacgagcctgctgaccgagcgcgagaggtggaagatagatttaggaaaactaaccacagctcccctgaagcccagtctaagcagacaggcagagtattggagccaccagtgccttcccgatcagagtctttttccaatggcaactccgagtctgtgcatcccgccctgcagagaccagcggagccacaggttcctgtgagaacaacatctcgctcccctgttctgtcccgtcgagattccccactgcagggcagtgggcagcagaatagccaggcaggacagagaaactccaccagtattgagcccaggcttctgtgggagagagtggagaagctggtgcccagacctggcagtggcagctcctcagggtccagcaactcaggatcccagcccgggtctcaccctgggtctcagagtggctccggggaacgcttcagagtgagatcatcatccaagtctgaaggctctccatctcagcgcctggaaaatgcagtgaaaaaacctgaagataaaaaggaagttttcagacccctcaagcctgctgatctgaccgcactggccaaagagcttcgagcagtggaagatgtacggccacctcacaaagtaacggactactcctcatccagtgaggagtcggggacgacggatgaggaggacgacgatgtggagcaggaaggggctgacgagtccacctcaggaccagaggacaccagagcagcgtcatctctgaatttgagcaatggtgaaacggaatctgtgaaaaccatgattgtccatgatgatgtagaaagtgagccggccatgaccccatccaaggagggcactctaatcgtccgccagactcagtccgctagtagcacactccagaaacacaaatcttcctcctcctttacaccttttatagaccccagattactacagatttctccatctagcggaacaacagtgacatctgtggtgggattttcctgtgatgggatgagaccagaagccataaggcaagatcctacccggaaaggctcagtggtcaatgtgaatcctaccaacactaggccacagagtgacaccccggagattcgtaaatacaagaagaggtttaactctgagattctgtgtgctgccttatggggagtgaatttgctagtgggtacagagagtggcctgatgctgctggacagaagtggccaagggaaggtctatcctcttatcaaccgaagacgatttcaacaaatggacgtacttgagggcttgaatgtcttggtgacaatatctggcaaaaaggataagttacgtgtctactatttgtcctggttaagaaataaaatacttcacaatgatccagaagttgagaagaagcagggatggacaaccgtaggggatttggaaggatgtgtacattataaagttgtaaaatatgaaagaatcaaatttctggtgattgctttgaagagttctgtggaagtctatgcgtgggcaccaaagccatatcacaaatttatggcctttaagtcatttggagaattggtacataagccattactggtggatctcactgttgaggaaggccagaggttgaaagtgatctatggatcctgtgctggattccatgctgttgatgtggattcaggatcagtctatgacatttatctaccaacacatatccagtgtagcatcaaaccccatgcaatcatcatcctccccaatacagatggaatggagcttctggtgtgctatgaagatgagggggtttatgtaaacacatatggaaggatcaccaaggatgtagttctacagtggggagagatgcctacatcagtagcatatattcgatccaatcagacaatgggctggggagagaaggccatagagatccgatctgtggaaactggtcacttggatggtgtgttcatgcacaaaagggctcaaagactaaaattcttgtgtgaacgcaatgacaaggtgttctttgcctctgttcggtctggtggcagcagtcaggtttatttcatgaccttaggcaggacttctcttctgagctggtagaagcagtgtgatccagggattactggcctccagagtcttcaagatcctgagaacttggaattccttgtaactggagctcggagctgcaccgagggcaaccaggacagctgtgtgtgcagacctcatgtgttgggttctctcccctccttcctgttcctcttatataccagtttatccccattctttttttttttcttactccaaaataaatcaaggctgcaatgcagctggtgctgttcagattctaccatcaggtgctataagtgtttgggattgagcatcatactggaaagcaaacacctttcctccagctccagaattccttgtctctgaatgactctgtcttgtgggtgtctgacagtggcgacgatgaacatgccgttggttttattggcagtgggcacaaggaggtgagaagtggtggtaaaaggagcggagtgctgaagcagagagcagatttaatatagtaacattaacagtgtatttaattgacatttcttttttgtaatgtgacgatatgtggacaaagaagaagatgcaggtttaagaagttaatatttataaaatgtgaaagacacagttactaggataacttttttgtgggtggggcttgggagatggggtggggtgggttaaggggtcccattttgtttctttggatttggggtgggggtcctggccaagaactcagtcatttttctgtgtaccaggttgcctaaatcatgtgcagatggttctaaaaaaaaaaaaaaaaaaaaaaaaaaaaggaaaaaaaaaaagaaaaagaaaacgtgtgcattttgtataatggccagaactttgtcgtgtgacagtattagcactgcctcagttaaaggtttaatttttgtttaaacctagacgtgcaacaaaagttttaccacagtctgcacttgcagaagaaagaaaaaaattcaaaccacatgtttattttttttttgcctacctcattgttcttaatgcattgagaggtgatttagtttatatgtttttggaagaaaccattaatgtttaatttaatcttaataccaaaacgaccagattgaagtttgacttttattgtcacaaatcagcaggcacaagaactgtccatgaagatgggaaatagccttaaggctgatgcagtttacttacaagtttagaaaccagaatgctttgtttttaccagattcaccattagaggttgatggggcaactgcagcccatgacacaagatctcattgttctcgatgtagaggggttggtagcagacaggtggttacattagaatagtcacacaaactgttcagtgttgcaggaaccttttcttgggggtgggggagtttcccttttctaaaaatgcaatgcactaaaactattttaagaatgtagttaattctgcttattcataaagtgggcatcttctgtgttttaggtgtaatatcgaagtcctggcttttctcgttttctcacttgctctcttgttctctgtttttttaaaccaattttactttatgaatatattcatgacatttgtaataaatgtcttgagaaagaatttgtttcatggcttcatggtcatcactcaagctcccgtaaggatattaccgtctcaggaaaggatcaggactccatgtcacagtcctgccatcttactttcctcttgtcgagttctgagtggaaataactgcattatggctgctttaacctcagtcatcaaaagaaacttgctgttttttaggcttgatctttttcctttgtggttaattttcctgtatattgtgaaaatgggggattttccctctgctcccacccacctaaacacagcagccatttgtacctgtttgcttcccatcccacttggcacccactctgacctcttgtcagtttcctgttcctggttccatctttttgaaaaaggccctcctttgagctacaaacatctggtaagacaagtacatccactcatgaatgcagacacagcagctggtggttttgtgtatacctgtaaagacaagctgagaagcttactttttggggaagtaaaagaagatggaaatggatgtttcatttgtatgagtttggagcagtgctgaaggccaaagccgcctactggtttgtagttaacctagagaaggttgaaaaattaatcctacctttaaagggatttgaggtaggctggattccatcgccacaggactttagttagaattaaattcctgcttgtaatttatatccatgtttaggcttttcataagatgaaacatgccacagtgaacacactcgtgtacatatcaagagaagaaggaaaggcacaggtggagaacagtaaaaggtgggcagatgtctttgaagaaatgctcaatgtctgatgctaagtgggagaaggcagagaacaaaggatgtggcataatggtcttaacattatccaaagacttgaagctccatgtctgtaagtcaaatgttacacaaaaaaaaatgcaaatggtgtttcattggaattaccaagtgcttagaacttgctggctttcccataggtggtaaaggggtctgagctcacaccgagttgtgcttggcttgcttgtgcagctccaggcacccggtgggcactctggtggtgtttgtggtgaactgaattgaatccattgttgggcttaagttactgaaattggaacaccctttgtccttctcggcgggggcttcctggtctgtgctttacttggcttttttccttcccgtcttagcctcacccccttgtcaaccagattgagttgctatagcttgatgcagggacccagtgaagtttctccgttaaagattgggagtcgtcgaaatgtttagattcttttaggaaaggaattattttccccccttttacagggtagtaacttctccacagaagtgccaatatggcaaaattacacaagaaaacagtattgcaatgacaccattacataaggaacattgaactgttagaggagtgctcttccaaacaaaacaaaaatgtctctaggtttagtcagagctttcacaagtaataacctttctgtattaaaatcagagtaaccctttctgtattgagtgcagtgttttttactcttttctcatgcacatgttacgttggagaaaatgtttacaaaaatggttttgttacactaatgcgcaccacatatttatggtttattttaagtgactttttatgggttatttaggttttcgtcttagttgtagcacacttaccctaattttgccaattattaatttgctaaatagtaatacaaatgacaaactgcattaaatttactaattataaaagctgcaaagcagactggtggcaagtacacagcccttttttttgcagtgctaacttgtctactgtgtattatgaaaattactgttgtccccccacccttttttccttaaataaagtaaaaatgacacctaaaaaaaaaaaaaaaaaa

SEQ ID NO: 464 - DNA, 2623 bp, Homo sapiens
gtgcttttaacgacggaccgagctacttccgggagagaatgggagggtggaaaattttgtgcgtttggcgggtttcgctctcttcataagtattgatcattccgcagccctgcggaccggacacgtgaggaggtagtgacgccgacactgccagaacacactgctacaaggtcccagatggccacgtctctggattttaaaacttatgtagatcaggcatgtagagctgctgaggagtttgtcaatatttactatgagacaatggataaaagaagacgggcactaaccaggctgtatctggacaaggccaccttaatatggaatggaaatgctgtttcagggctggatgccctaaataatttttttgacacattgccttctagtgagttccaggtcaatatgttagattgccaaccagttcatgagcaagcaactcagtcccaaactacagttcttgttgtgaccagtggaactgtgaagtttgatggaaacaaacaacatttcttcaaccagaacttcctgctgactgctcagtccactcccaacaatactgtgtggaagattgcaagtgattgcttccgttttcaagattggtctagtagttaaaggggcaaaagtccattctcatttggtccattagttccagcaattgaaatttatgtgaattattttgattgtagaagcactataatatgtgctgaaactaaatttctttaatattttctattcctgtcagcaccttttctagcagctgccagtttggagcattgccctctaagagctttaaaactatttttttacatgccttatatacattccactaatgacattcttataataatattaaacacatgatcttggtactaacatactcactgtgaacccagcctattgcaaaaataaaatctttttataatattatctatgggatgtcagcacaatataacactctgggaagaagtggagttttttggttattaggttaattttctagtaaaacacgttgcctgttttcagttaacactggtaatgccattttaatatatggctttttcaaatcagttcagtgaaaatagtacagatttaggtttacataactactctgacatactggaattgcatatagagatgttcagtggtcgtttttcattttaagtaatttttgttttggcatttttttgtgtgaagtaaattaatcaactagagaggtgcaaaacgttctcagttgatatctgagtattgggtgcatttggtggcttaaaagcaaagcttcctaaaaagatttttcttggcagctccaggtctatacatttaggtaatgaatggtagtagaactaatagctttaacaggagaatagggaatgagaaatagaaatccaaggctgaagccaaaagtaaggagggtggccaaatggtaaactattggtacttgttttctacctcctaaaaatgtagcttatttttaggatttaaatcactaagtaaataagtatccttgccaagtgatcatgagtgtcatttttgttctaagactaatatttttagatctttttacttcacctcatacttatcaccaatgtatatctccatttattcaataacttactggggtaaaataacagcaataaacctaaccttttaacagggtctaacatgagagttggagtcaaagccattgttatcttttggtgacacccttaaattttaagtcttccagtcttccatgtgaactttaggcccaaagtttcttatgtatcacacatcccccaaataagtgattttttcccagtgctttgtactgtcaactgcattatctttaattatttaaaggtagaattatttaattttgtgatttgttcttccatatgacattgagcaaatagatctgtttcaaaatatgttcccgctatgtggataactcttctttttaaaaagaaaatagagaatagcaaatcttcatgataatcctcaaaagaacaaaatgcttaactttatctcttaatttctaaaggtaaataacctaggttcagcttttgcttaaacattaaatatcttttccattttttaatgtttgtaagctagatatgccagctttgtttctacattgcaaccaaaaactgtttcttttcacttaattataaaaccagtaattcatttactcttgcccaaaactatacactgtatttctgttatagtaacaaaatagagttatgtagaattgtatggaactcaaatttaaaccatgctttcttgtagtactgattgaaacttacacgttttattctactcatagtgagcttattcttattttggattgattttccaaaaccacagcttcagcagcaacaatcagaatgtccaaatgctgtcctttcccttacagagaagaacaatggtaactaaaagctgcatataactagcaataactacattgaacggtgtgcattgttcatgattgttgtgttttaagacttgtatataaactgctttttccaaactctgtataacttttaaatggctggaactactcgtataaggactagactgtatttttgacatgctcctatttttgtaacttgaaaaaataaaattttgccttgtgacagattttctcaaaaaaaaa

SEQ ID NO: 465 - DNA, 2498 bp, Homo sapiens
gcctgaataaaaggccgcacacgtgtgtcgggttttcttgggtgcgatagaggacctgcccttcagcagcggtggcgccctgctagggtcgtttgtttctttctgctgtgagttagtttagcgtgagattgcagatgttaccatcggctggaattatttcgtctgcgctggaggcatcggcaagaacgtcatctgcgaccgcacggccacgccgctggacgctttccgcatgacctcggccgcccactactaccccaagctcatgagcatcatgggcaacgtgctgcgcttcctgccggctttcgtgcgcatgaagcagctgatcgaggagggctacgtgggcgagccgctggtgtgtgaggtgcaggtgcacggcggcagcctgctgggcaagaagtacaactggagctgcgacgacttgatgggcggcggcggcctgcactccgtgggcacctacatcatcgacctgctcaccttcctcaccggccaaaaggccgtcaaggtccacgggctgctcaagaccttcgtgaagcagactgaccacatcaagggcatccgacagatcaccagcgatgacttctgcaccttccagatggtgctggagggcggggtgtgctgcaccgtcaccctcaacttcaacgtgcccggcgagttcaagcaggatgtcactgtggtgggctcagccgggcgcctgctggccgtgggcaccgacctgtacgggcagcgcaacagcgccccggagcaggagctgctggtgcaggacgccacgccggtgagcaactccctgcttccggagaaggccttcagcgacatcccctcgccctacctgcgcggcaccatcaagatgatgcaggcggtgcgccaggccttccaggaccaggacgaccggcgcacgtgggatgggcggcccctcaccatggccgccaccttcgacgactgcctgtatgccttgtgcgtggtggacaccatcaagaggtccagccagacgggcgagtggcagaacattgccatcatgaccgaggagccggagctgagccccgcctacctgatcagcgaggccatgcgccgcagcaggatgtccctctactgttagcacagattgagaacctcggggacttgagccttctgcaggggatgtccacagagagggaagggccgaggggagagggtgaccatggggaatgtggggatcagggaggtggagggacagtgtgaataaatggcatctaggaaggtaaactccaatcccggtgaccgaccccaaaccagactgttggtgggctgagctcctagcctggaagcattcaggagagcctgccattcctgggatgatccctgctgggtatttgcacgagagtggtttggtttagctgcctctgctgccctttactgtgacaagcaaggaggggttgcttccctccctacctcatccatcccacacaccttggccttctgcaagccaagtggttctgcaaggtcaaggcactagtatcagatggcaagctcagtgcccgggatacccactgctggcaggagaaggcccattttcacagtccacagaagcgtgttaggctggggttgggggtgggatgggctggtgagaaagttcaaattccaggaagccactttttattggatataaggtatctaacggcaaaagtacttagtagcaaagtggccaccttttgattgattgggcttcctcataggaagcactgagggtgtgtctttgtacttggttcattgcccttcacctggtagagaaagagaggtcagaaatagcaagcaaaaagcaggactcccaggagccacaagaaaagagcacaggctgcaccaaagcaggggcagcagagaataaaatatccctttgaacttgtcaacaattaaaaaactgcaaggagtcaccttataacactatttccagtaaaggtggaattgagtatcagagggattactgcggtgttaaggtagccctgccacgtggctctccaggcagggccaagaagacagcacaaagtatgggtttggccataagctcatatgctgcccccaaagactggggagagctgtgtgcctcagtgttgcagtgtgaattcctaaatagagggtaaagtgagcctagccaggaggtgtttggggctctatcgcgcatctctcctaccaagctgggcaagagcttttaggagattcatccagctttgtggatttagaaaggaagccttcagttccaatcagaatcctctttccttacaaaaaaaaaaaaaaaaaaaaaaaaaaaaaggattttccttagctccagcatttgctttcaggattctgacacctgagaatttgggggtaggtactaaacgaaacaaaacaaaaggacaacaaggaacattatttctagtgtttctaaaatgggggtttagaaccccttaaggggccatacttaggcttgaaaaggctaatgttggaaaaaacatgttcttctaattggtcaaaaaaaaaaaaaaaaa

SEQ ID NO: 466 - DNA, 5456 bp, Homo sapiens
agtcacagccaggtaaccctggagtgaagcggtttagttagaagggagcagataaactcgtcactctagtagctttaaccctcaccctgaggcaccttagcaatcagccattgcctgcaagcctccaaagcttgtctttgcctaatatggagcccaaagaagccactgggaaagaaaacatggtcaccaagaaaaagaatctggccttcttgaggtctagactctatatgctggagagaaggaagactgacactgtggttgagagcagtgtttctggggaccactctggcaccttgaggaggagccaatctgacaggaccgaatacaaccagaaattacaagaaaagatgactccacagggtgagtgttctgtagctgagaccttaaccccagaggaagagcatcatatgaagaggatgatggcaaagcgggaaaagatcattaaggagctgatacagacagaaaaggattatctcaatgatctagagctgtgtgttagggaagtggttcagcccctgagaaataaaaagactgataggctggatgtggatagcttgtttagcaacattgagtccgtgcatcagatatcagccaagctgctgtcattgttggaagaggccacaacagacgtggaaccggccatgcaagtaattggagaagtattcttgcagattaaagggccactggaagatatttataaaatctactgctatcaccatgatgaagcacatagtatactggagtcctatgaaaaggaagaagagctgaaggaacatttgagccactgtatccagtccttaaagaaaatatacatgcaagaaggcaaaccaaacttattggacatgggctctttgatgatcaaaccaattcaacgtgtgatgaaataccccctattactgtgcgaacttcggaattccacccctccctctcacccagattacagagcactggacgatgcctttgctgctgtgaaggacattaatgttaacatcaatgaacttaaaagaaggaaagatttagttctaaaatacaagaagaatgacgaggatgaatcacttaaagacaaattgtctaaactaaatattcattcaattagcaagaaatcaaaaagagtgacaaatcatctgaagattctgaccagaggagaatcacaggttaaagacaatacctttaacagagaagaaaagctgtttagagctttagaaaagactgtgaggctttgtgtgaagaacatttcactctgtcttcaacacatacaggatgccatgcccctggctctgcagagtgtgatggaccttcaggagatttcatacaacaaagacgatgagatggactattctgagaccctaagtaatgccttaaattcgtgtcatgactttgcatctcacttacagagactcatcctgacccccttgtcagccctgctgtccttattcccagggcctcacaagctcatccagaaacgctatgacaaactgctggattgcaacagctacctgcagcgatcaacgggagaggagtcagacttggccaaaaaggagtatgaggccctcaacgcccagcttgtggaggagctccaggcattcaaccaggctgctcggaagattctgttgaactgtctatgcagcttcattaccctccttagggacctgatgctcgtggcacagcaggcttactccacacttgtgccgatgccactgttggtttcaagcatttctgagattcagaatcaagtactagaagagatccaaaatttgaattgtgtgaaagaaaacagtgccacctttattgagaggaaactcagttttgaaaagaagaaacctgtgcagattctgccagaaatgccacatcaaactgacattcatcgctccaaacttctatccacatatagtgcagaggaactctatcaagctaagcgcaagtgcaatgctacacaagaatatgacatcaatcttctggaaggagacttggtggctgtgatagaacagaaagatccactggggagtacaagcaggtggcttgtggacacaggaaatgtgaaaggatatgtttattcctccttcctaaaaccctacaatccagcaaaaatgcagaaagtggatgctgagaacaggttctgtgacgatgattttgagaacatcagcctcttcgtgtcttcacggccagctagtgacagtgtcacaggcacctcagaaagcagcattggtgatagcagctcatctcttagtggcacatgtggaaagtttgaaacaaatggtactgatgttgacagttttcaagaagtagacgaacagattttctatgcagttcatgcttttcaagcacggagtgaccatgaactcagccttcaggaataccagagagttcatatactcaggttttgtgacctaagtggcaataaagagtggtggttagctgaagctcaagggcagaaaggatacgtgccagctaactaccttggaaagatgacttatgcttaagaaaataagccttcaacttttattttccagcaagttgttgattgactacctcataaaactgacattacaaaactttggaccagaaagcaagaaacctctgaactacagaaactgatactgtactgggttttcaggaatactgtacttcctaacaggattattgcatgaatgtattataaaggatacatgttgaaagaaatactaagccaacagaaatagcaaagcaaatgacccaagcttcaactatcaactatttaaaagtgaagatcttttgaaggagtaattatattcttttatcatcaagaaaggttggatccaaaggtttttcaatttacttttttttttactgtatgatgtattttgccttaaatgtttttgtttttcatattgctctcttgcaaatgcatacatgtttatatacatacatataaaccatatatattatgtagctttatacacgtatgtggataatatgaattatacacctatatgtataaatcagagtatacaccaaatatacataagaagaatataccaccaactagaagtctttgataatatattttgttaatgtttcgtttatatgttttgaactaaaactgaataacttgatattaacatgtaacattactgaatgcacactatatgccagacattgttctaagtgctttatatgtagtaacttgtttaatattcaaaacattatgaagaaaccatggcccaaaaaggtgaagtaatttaatccaaatcacattgctattaagtggtgggcctggacttaaacctaggtagtgtaaaccaaaaataaaattctaaggcttccaaccatctaaatagacttccccttcagccagggcttttttctttcttttcttgttgtttttttttttttttaaagagacaataaaaggaggtttttttattcaaaggtataactggataagtagatttgtttacaatcattcttgtgaaatacttttttaaaaaaatacgatcaacttctttgcaaatagtagacacatacctcaacaatgatgacctaatttttgatccataatgtaagattaggtagaaataggcaagctcacactgctaaattaactatcaaatactcagtcaaaactccatttgtggcccccacttcttgatctatttctgttccacttcgtcttctaccatcttgccgactttcctgagcaactgctttgtcgactctctctacctgaccaattgccagatcgacaacctgactggcctgaccagccactcctctgtctggaattaaaagatgtttccatcataatattctttaatttcaggtaatttagctggcactgagagtatccagccggaatcatgccactttgcctgtaacctttgactcaattggaggaatatcaaagcaaacacccatatttcctttcaggaggcacactctggtaatctgagacactgcattactattcagctttctaagttctttccaagcacagctgacatcctgtatttcctctaggctttccagagtcatggtcacaaaccccttatcagagttgattaaagatcatggttcaaagcttgatacaccagaaatgtgggctaaagctgcagccaatgcatctatcgcccctttctcttctatcagtatctgagctgatggttggaaaaaaatcaacagcagcataagaaatggaagccagagaccttatggcatccatgcttttaaatttaactaaatccattgtagaaggaacacctacacatttaaaagtaatttgtgttttttgttccacatgtcttagttgacctttctcttggttgataaaaacatatacaaacccctgtctgtccagctttacccacgcatccagagagatggatataggactcaatatcctgaggaggagaactttgaatcaccaggtcaactacaggaatgtccaaaccacgaggagccacattggttgccaccaaaactttataattacctctctgaagccttttagtgtaatttctctttgtgactgtgcaatgtccccatgtaaacacagtgcattctgttttgtgcggattcatggccatgtcagttacattcttcttcgtctcacagaaaataatagccctcccttcagatccactgtagacttgaaggacatctcattttcatctgtgttttataaaggaggaaattgaggacctcacatggagggactggaatttaaaaccaggtcttctgactttaaggcctttcttttagtgttttcccttttcttttccttaagtcactaaaatctgtagttatataatcttacataaagcatatgcaaaatagaaaaatgatagtcaccacatatctactaatgggattaaaatgtacaatcctaaaagcttacttgttagcacacttgcttatctgtccattcattcattgaaccagtaagtatttattgagagttagtgggaatacaatgctgtgcaagacaaacaagatccctccattcataccacttaaattctagtggggaaaacatctgcacataacaaactaaataaaatgatcataaaataataaatgctatttatataaaactggctactttcattactgctcagttaaagggtcttgtagctcattttatgacatgaaaaaaatcaaggtctaaaagctccttgagacaatttaaactctaataccaaatatacctctataaaataccaaactgagctaaatacggtatatgtgtacttatacatatgtacataacctaaatatacgtgtgcacacattatctatacaaagagccatactcagtgaaagataaattacctcctaaactaaagtcccctctgaggtacaacagaaattaaaataattgcttctcttctcaactctatgtagcacgtattttccatgatgggataaatgttttcatttcaagtgccaatgtgtgaactgtaataaacattactgctttc

SEQ ID NO: 467 - DNA, 4892 bp, Homo sapiens
gggggtggggctgcgccggcctcttcccagccagcttgaaagggtttgcgtagccggccttgtgggcccttgaagcgctctgttaaagcgctctgtgggcggcctggccccaactcctctagtctaggcgcacgaagggagttgctcctaggtcttgtccgtgccgggttcgcttttctttccttcccgaagcctggcccttagatctactatcgcagagtctgcggccgccaggaagcccagattcgagtgtccggagagtaaccggaagtgctgtccccaggcctaggggcggcgccggcggctgccaggagctggtcggaactgatggctaccagtggcaggtacttcctgcaggagaaacagtgtaagcaaagatgggaagaggagaggcaagaattgagtgttgtgaatagttctgaactagagaccttttgaaaccaaaaggaagatggtcttgagtctttcttgttacgaatgctatcttctttgagaagtcaaattgtcaggatcaggaatgtatgttttcttccatctggattctagggttggaaataccaagtaaggaattaacatatatgatgctggaaacttgtagaggctcatgattgaaaggcctgaaacagatgtatcttccaagttcttatcaagaaaatgactgtgagggcaacgatgggtcaagaagaccagcggaaaactccctaggagagagccatagaaaatgtacacttcagaagagaaatgtaatcagagaactcaaaaaaggaaaatatataatgtatgccctcggaagggtaaaaagatttttattcatatgcatgagattattcagatagatggtcatatataccagtgccttgaatgcaagcaaaacttctgtgaaaacttagctcttattatgtgtgagagaacccatactggggagaaaccttataaatgtgatatgtgtgagaaaacctttgtccaaagctcagatcttacttcacaccagaggatccacaattacgagaaaccttataaatgtagcaaatgtgagaagagcttttggcatcacttagcgctttcaggacatcagagaacacatgcaggtaaaaaattctatacatgtgacatttgtggcaagaattttggtcagagttctgatctgcttgtccaccagcgaagccatactggcgagaaaccatatctatgtagtgagtgtgacaaatgcttcagtagaagtacaaacctcataaggcatcgaagaactcacacaggtgagaaaccatttaagtgtctcgagtgtgaaaaagcttttagtgggaaatcagatcttattagccaccagagaactcacactggggaaaggccctacaaatgtaataagtgtgagaaaagttaccgacaccgttcagccttcattgtacataaaagagttcatactggggagaagccctataagtgtggtgcctgtgaaaaatgctttggccagaaatcagaccttatcgtgcaccagagagtccacacaggtgagaagccgtataaatgcctggaatgtatgagaagttttactcggagtgccaacctaattaggcaccaggcaactcacactcacacttttaaatgccttgaatatgaaaaaagctttaactgtagctcagatcttattgtacatcagagaattcacatggaagagaaaccacatcagtggtctgcgtgtgagagtggcttcctcctaggaatggactttgttgcccaacagaaaatgagaactcaaacagaggagctacactataaatacactgtatgtgataaaagcttccaccagagttcagcccttcttcaacatcagacagtacacattggtgaaaaaccgtttgtctgtaatgtgagtgaaaaaggtcttgagcttagccctccccatgcgtcagaagcctcacagatgtcttgaccaggcgagaagctgtaataccaatattaaaaattatttatgtatcagagaactcattaagatgaggacaaatctcagactttgctcagagctcagaattcagtggggaccagagagcctgcaattggaaatatgagaaattctttgcccagagagctgccctaacagaacacttcatcctcactccaacgagaaatctacagatgcccagaggttttgaaaacttaccgtctgagctcaaatttgatcactcacaagaggattcatacaagtgggaaaccttagaaatgcactgagtgtgagagagctttctactaatgctcagcccttctcgttgtaagagaattcacaccggagaacaactttttaaatgccttcagtgtcagttgtgctgcagacagtatgaacatctcattggacctcagaaaacccaccctggggagaagccccagcaagtgtgaaaaaagcttctaacaaaactctgacttacccatcagagaagccatactggtgaaaaattgtatatttgtcttaagtatggcaaaagcattcgttggagagccttacttgggtttgcacccaaaaaaaaaaacccaatctgaggaaagactgcaagtgtctgaatgaagagtgcttgtcaatgatcaactcttgtggtacatcagggaactcacataggtgaaaaaacccatacttaccttgagtctgagaaaacctttggtagaagctcctgtcttatcaggccccaaaaaacctgttctgcagtgagagatttaattgtgggtgagaatctatgtacatataatatgtatgagaagactgttctcatagttagttgactcatatggtagagaggactttacatgaaatcagtatgaaaatagttttttagatacccagaagcttgttctgggagaagctagggtgggtcagagtagacctgatgggtaactcaggtaaagatgcttttcttttatctgaactacttaatgattgctttacttttactttttaaaaaattcagaaatccaataaaggaaaggacggtaaccttatgatagaaggtgtggcatgtgttactgttgggggaaaggagtatattgactttgccttggttgatatttttatgcttgtctaggatgggactagagtgttgatagtaacatggcagccttttgctggcagtgaaatgaacttaagaagctagggagtagctatcctagatcaaaactctcctaatagtttttcctttgcaggaccaatcttataaagaaacagcatactcagctttttacttagtgtcagttgaggcatactctcaaaagttttttcccctaaaatatctttcaagttattactggtatttgaaatttcaagtttagaaattcatttctttttaactcaaagtgcaaatttcatataatgattatgatggttttagtgtccatatttttgtggcttcacttatcatctctttcagcagtagctacccacagtcagctcctagtaaaatggctacaggaaaactgaaagaaaagtttaagcctgagtaggcatagagtaaaaaatgcataatgatgcattattaatataagagtaaggctttttttattttgagtatcctaactccaaacctagtgttcttttcactccattatcctgctgtttatagcaaatcaagacccataatgatacgtctttcatttatttcagttctgccaaggaaagagaaaataccttttaatcccagggaaaggattgcaatcaccacattataaggtatatggcgtggaatgcagaattctaaatactagaagggaaaagtagttggcagattcatcagaggcttaaggataagtacttgtttccaatttaaaagtataattaggattgtctttaatgttctctagaaatactataattaatctagagatctatcaatggtcacatctcagtttttttcttccctgagattcaaagacgtgtaataccaatacttcagattcctatagtatttgggactttgtagactagtgaatagatactttgttgctagtccaaatcctctgattttggtttgatttgtcctagcagatccctgaacttcagagagtattgccatttggattcatggagttggcgaactgctacactgctaccttgtgtatggctctaagctttgatcctaatgactggttgatgatcatgataatattagggccagtgaatatagctcatagtgataataaggattctagggtatttttttttcttttagaaaaagatcctggaagtttatttgatctgacatgtttttgtaatatttagaaatagctcttgtatcataaaaagttgcccagtataagacacacaagatgtattttttttctctggtgaaaatcatgcctatcactagtatatgtttgacatttgtagtatacttaaaatagtattgggtgtgaggcatggtggtgatgaaaagtagtccttacggctacttgttagtcattagagagaacatggagaaggggtcaaagttggtatcattaacagggcaatgacttgacccttctttcaactgatcttactggtagttgtctctagtttttaagtaaattaatgatggaccatcccccaaacagagaactatgggggtatgaaacaaggctgaaggcttttaaccatgggagaaaaaggtgttggtattattcatatagcataacctgaggttggagaggaccacttgggagcctgtaaccaaaactagaaggtaacttctgggatggacggaggttcccttgaagcagtgccaacctaaatctacctcaggtaagtagttagattaactttttcaagatttcagaccaaacaagacaacttgtattcagttgatgtattcctatgctttaatgtttttgtttgcccttaattattaaataaacatttgttctgaaaaactcca

SEQ ID NO: 468 - DNA, 6511 bp, Homo sapiens
attttccccccttcggccgcggcgaggaggagccggagcgggagtgacaccgagccggacccagcgcgacctgcggcggctccgggtgactcgggccagtgtagaggtcctcaggccgccggcaggagcagctgggccaattccctggccgggagcggaaggggatggcgtcgggcctgggctccccgtccccctgctcggcgggcagtgaggaggaggatatggatgcacttttgaacaacagcctgcccccaccccacccagaaaatgaagaggacccagaagaggatttgtcagaaacagagactccaaagctcaagaagaagaaaaagcctaagaaacctcgggaccctaaaatccctaagagcaagcgccaaaaaaaggagcgtatgctcttatgccggcagctgggggacagctctggggaggggccagagtttgtggaggaggaggaagaggtggctctgcgctcagacagtgagggcagcgactatactcctggcaagaagaagaagaagaagcttggacctaagaaagagaagaagagcaaatccaagcggaaggaggaggaggaggaggaggatgatgatgatgattcaaaggagcctaaatcatctgctcagctcctggaagactggggcatggaagacattgaccacgtgttctcagaggaggattatcgaaccctcaccaactacaaggccttcagccagtttgtcagacccctcattgctgccaaaaatcccaagattgctgtctccaagatgatgatggttttgggtgcaaaatggcgggagttcagtaccaataaccccttcaaaggcagttctggggcatcagtggcagctgcggcagcagcagcggtagctgtggtggagagcatggtgacagccactgaggttgcaccaccacctccccctgtggaggtgcctatccgcaaggccaagaccaaggagggcaaaggtcccaatgctcggaggaagcccaagggcagccctcgtgtacctgatgccaagaagcctaaacccaagaaagtagctcccctgaaaatcaagctgggaggttttggttccaagcgtaagagatcctcgagtgaggatgatgacttagatgtggaatctgacttcgatgatgccagtatcaatagctattctgtttctgatggttccaccagccgtagtagccgcagccgcaagaaactccgaaccactaaaaagaaaaagaaaggcgaggaggaggtgactgctgtggatggttatgagacagaccaccaggactattgcgaggtgtgccagcaaggcggtgagatcatcctgtgtgatacctgtccccgtgcttaccacatggtctgcctggatcccgacatggagaaggctcccgagggcaagtggagctgcccacactgcgagaaggaaggcatccagtgggaagctaaagaggacaattcggagggtgaggagatcctggaagaggttgggggagacctcgaagaggaggatgaccaccatatggaattctgtcgggtctgcaaggatggtggggaactgctctgctgtgatacctgtccttcttcctaccacatccactgcctgaatcccccacttccagagatccccaacggtgaatggctctgtccccgttgtacgtgtccagctctgaagggcaaagtgcagaagatcctaatctggaagtggggtcagccaccatctcccacaccagtgcctcggcctccagatgctgatcccaacacgccctccccaaagcccttggaggggcggccagagcggcagttctttgtgaaatggcaaggcatgtcttactggcactgctcctgggtttctgaactgcagctggagctgcactgtcaggtgatgttccgaaactatcagcggaagaatgatatggatgagccaccttctggggactttggtggtgatgaagagaaaagccgaaagcgaaagaacaaggaccctaaatttgcagagatggaggaacgcttctatcgctatgggataaaacccgagtggatgatgatccaccgaatcctcaaccacagtgtggacaagaagggccacgtccactacttgatcaagtggcgggacttaccttacgatcaggcttcttgggagagtgaggatgtggagatccaggattacgacctgttcaagcagagctattggaatcacagggagttaatgaggggtgaggaaggccgaccaggcaagaagctcaagaaggtgaagcttcggaagttggagaggcctccagaaacgccaacagttgatccaacagtgaagtatgagcgacagccagagtacctggatgctacaggtggaaccctgcacccctatcaaatggagggcctgaattggttgcgcttctcctgggctcagggcactgacaccatcttggctgatgagatgggccttgggaaaactgtacagacagcagtcttcctgtattccctttacaaggagggtcattccaaaggccccttcctagtgagcgcccctctttctaccatcatcaactgggagcgggagtttgaaatgtgggctccagacatgtatgtcgtaacctatgtgggtgacaaggacagccgtgccatcatccgagagaatgagttctcctttgaagacaatgccattcgtggtggcaagaaggcctcccgcatgaagaaagaggcatctgtgaaattccatgtgctgctgacatcctatgaattgatcaccattgacatggctattttgggctctattgattgggcctgcctcatcgtggatgaagcccatcggctgaagaacaatcagtctaagttcttccgggtattgaatggttactcactccagcacaagctgttgctgactgggacaccattacaaaacaatctggaagagttgtttcatctgctcaactttctcacccccgagaggttccacaatttggaaggttttttggaggagtttgctgacattgccaaggaggaccagataaaaaaactgcatgacatgctggggccgcacatgttgcggcggctcaaagccgatgtgttcaagaacatgccctccaagacagaactaattgtgcgtgtggagctgagccctatgcagaagaaatactacaagtacatcctcactcgaaattttgaagcactcaatgcccgaggtggtggcaaccaggtgtctctgctgaatgtggtgatggatcttaagaagtgctgcaaccatccatacctcttccctgtggctgcaatggaagctcctaagatgcctaatggcatgtatgatggcagtgccctaatcagagcatctgggaaattattgctgctgcagaaaatgctcaagaaccttaaggagggtgggcatcgtgtactcatcttttcccagatgaccaagatgctagacctgctagaggatttcttggaacatgaaggttataaatacgaacgcatcgatggtggaatcactgggaacatgcggcaagaggccattgaccgcttcaatgcaccgggtgctcagcagttctgcttcttgctttccactcgagctgggggccttggaatcaatctggccactgctgacacagttattatctatgactctgactggaacccccataatgacattcaggcctttagcagagctcaccggattgggcaaaataaaaaggtaatgatctaccggtttgtgacccgtgcgtcagtggaggagcgcatcacgcaggtggcaaagaagaaaatgatgctgacgcatctagtggtgcggcctgggctgggctccaagactggatctatgtccaaacaggagcttgatgatatcctcaaatttggcactgaggaactattcaaggatgaagccactgatggaggaggagacaacaaagagggagaagatagcagtgttatccactacgatgataaggccattgaacggctgctagaccgtaaccaggatgagactgaagacacagaattgcagggcatgaatgaatatttgagctcattcaaagtggcccagtatgtggtacgggaagaagaaatgggggaggaagaggaggtagaacgggaaatcattaaacaggaagaaagtgtggatcctgactactgggagaaattgctgcggcaccattatgagcagcagcaagaagatctagcccgaaatctgggcaaaggaaaaagaatccgtaaacaggtcaactacaatgatggctcccaggaggaccgagattggcaggacgaccagtccgacaaccagtccgattactcagtggcttcagaggaaggtgatgaagactttgatgaacgttcagaagctccccgtaggcccagtcgtaagggcctgcggaatgataaagataagccattgcctcctctgttggcccgtgttggtgggaatattgaagtacttggttttaatgctcgtcagcgaaaagcctttcttaatgcaattatgcgatatggtatgccacctcaggatgcttttactacccagtggcttgtaagagacctgcgaggcaaatcagagaaagagttcaaggcatatgtctctcttttcatgcggcatttatgtgagccgggggcagatggggctgagacctttgctgatggtgtcccccgagaaggcctgtctcgccagcatgtccttactagaattggtgttatgtctttgattcgcaagaaggttcaggagtttgaacatgttaatgggcgctggagcatgcctgaactggctgaggtggaggaaaacaagaagatgtcccagccagggtcaccctccccaaaaactcctacaccctccactccaggggacacgcagcccaacactcctgcacctgtcccacctgctgaagatgggataaaaatagaggaaaatagcctcaaagaagaagagagcatagaaggagaaaaggaggttaaatctacagcccctgagactgccattgagtgtacacaggcccctgcccctgcctcagaggatgaaaaggtcgttgttgaaccccctgagggagaggagaaagtggaaaaggcagaggtgaaggagagaacagaggaacctatggagacagagcccaaaggtgctgctgatgtagagaaggtggaggaaaagtcagcaatagatctgacccctattgtggtagaagacaaagaagagaagaaagaagaagaagagaaaaaagaggtgatgcttcagaatggagagacccccaaggacctgaatgatgagaaacagaagaaaaatattaaacaacgtttcatgtttaacattgcagatggtggttttactgagttgcactccctttggcagaatgaagagcgggcagccacagttaccaagaagacttatgagatctggcatcgacggcatgactactggctgctagccggcattataaaccatggctatgcccggtggcaagacatccagaatgacccacgctatgccatcctcaatgagcctttcaagggtgaaatgaaccgtggcaatttcttagagatcaagaataaatttctagctcgaaggtttaagctcttagaacaagctctggtgattgaggaacagctgcgccgggctgcttacttgaacatgtcagaagacccttctcacccttccatggccctcaacacccgctttgctgaggtggagtgtttggcggaaagtcatcagcacctgtccaaggagtcaatggcaggaaacaagccagccaatgcagtcctgcacaaagttctgaaacagctggaagaactgctgagtgacatgaaagctgatgtgactcgactcccagctaccattgcccgaattcccccagttgctgtgaggttacagatgtcagagcgtaacattctcagccgcctggcaaaccgggcacccgaacctaccccacagcaggtagcccagcagcagtgaagatgcagactgataccacctccaccgctgagcagtgaccttcctcactttctcttgtcccagcttctcccctgggggcctgagagaccctcaccttccttctgcccatcttccatgttgtaaaggaacagccccagtgcactgggggaggggagggagtgaggggcagtggtgcccttcctgcagaagagacatgcagcagtagcgctggcgccatctgcaggagctggcgggctggccttctggaccctggcttctccccactgtaacgcctgttacacacaaactgttgtgggttcctgccaggcttgaagaaaatgatctgaattttttcctccttttggttttattttgttggtttattttgtgttttcttttctcctttttggggggtattcagagtgggctgggcccctgggcgagacacagctacctctgttggcatctttttaataccaggaacccagcggctctagccactgagcggctaaatgaaataaagtggaaaaaaaaaaaaaggaaaaaaccaaaagcataaaaaaccacagcaaatttcttgatgaaaattgaaaataaaagtttccttgtattttaaaaaaaaaaaaaaa

SEQ ID NO: 469 - DNA, 3539 bp, Homo sapiens
ccggaaccggccttggaacaactgtggaacctgaggccgcttgccctcccgccccatggagcggcccccggggctgcggccgggcgcgggcgggccctgggagatgcgggagcggctgggcaccggcggcttcgggaacgtctgtctgtaccagcatcgggaacttgatctcaaaatagcaattaagtcttgtcgcctagagctaagtaccaaaaacagagaacgatggtgccatgaaatccagattatgaagaagttgaaccatgccaatgttgtaaaggcctgtgatgttcctgaagaattgaatattttgattcatgatgtgcctcttctagcaatggaatactgttctggaggagatctccgaaagctgctcaacaaaccagaaaattgttgtggacttaaagaaagccagatactttctttactaagtgatatagggtctgggattcgatatttgcatgaaaacaaaattatacatcgagatctaaaacctgaaaacatagttcttcaggatgttggtggaaagataatacataaaataattgatctgggatatgccaaagatgttgatcaaggaagtctgtgtacatcttttgtgggaacactgcagtatctggccccagagctctttgagaataagccttacacagccactgttgattattggagctttgggaccatggtatttgaatgtattgctggatataggccttttttgcatcatctgcagccatttacctggcatgagaagattaagaagaaggatccaaagtgtatatttgcatgtgaagagatgtcaggagaagttcggtttagtagccatttacctcaaccaaatagcctttgtagtttagtagtagaacccatggaaaactggctacagttgatgttgaattgggaccctcagcagagaggaggacctgttgaccttactttgaagcagccaagatgttttgtattaatggatcacattttgaatttgaagatagtacacatcctaaatatgacttctgcaaagataatttcttttctgttaccacctgatgaaagtcttcattcactacagtctcgtattgagcgtgaaactggaataaatactggttctcaagaacttctttcagagacaggaatttctctggatcctcggaaaccagcctctcaatgtgttctagatggagttagaggctgtgatagctatatggtttatttgtttgataaaagtaaaactgtatatgaagggccatttgcttccagaagtttatctgattgtgtaaattatattgtacaggacagcaaaatacagcttccaattatacagctgcgtaaagtgtgggctgaagcagtgcactatgtgtctggactaaaagaagactatagcaggctctttcagggacaaagggcagcaatgttaagtcttcttagatataatgctaacttaacaaaaatgaagaacactttgatctcagcatcacaacaactgaaagctaaattggagttttttcacaaaagcattcagcttgacttggagagatacagcgagcagatgacgtatgggatatcttcagaaaaaatgctaaaagcatggaaagaaatggaagaaaaggccatccactatgctgaggttggtgtcattggatacctggaggatcagattatgtctttgcatgctgaaatcatggagctacagaagagcccctatggaagacgtcagggagacttgatggaatctctggaacagcgtgccattgatctatataagcagttaaaacacagaccttcagatcactcctacagtgacagcacagagatggtgaaaatcattgtgcacactgtgcagagtcaggaccgtgtgctcaaggagctgtttggtcatttgagcaagttgttgggctgtaagcagaagattattgatctactccctaaggtggaagtggccctcagtaatatcaaagaagctgacaatactgtcatgttcatgcagggaaaaaggcagaaagaaatatggcatctccttaaaattgcctgtacacagagttctgcccggtcccttgtaggatccagtctagaaggtgcagtaacccctcagacatcagcatggctgcccccgacttcagcagaacatgatcattctctgtcatgtgtggtaactcctcaagatggggagacttcagcacaaatgatagaagaaaatttgaactgccttggccatttaagcactattattcatgaggcaaatgaggaacagggcaatagtatgatgaatcttgattggagttggttaacagaatgagttgtcacttgttcactgtccccaaacctatggaagttgttgctatacatgttggaaatgtgtttttcccccatgaaaccattcttcagacatcagtcaatggaagaaatggctatgaacagaaactacatttctactatgatcagaagaacatgattttacaagtataacagttttgagtaattcaagcctctaaacagacaggaatttagaaaaagtcaatgtacttgtttgaatatttgttttaataccacagctatttagaagcatcatcacgacacatttgccttcagtcttggtaaaacattacttatttaactgattaaaaataccttctatgtattagtgtcaacttttaacttttgggcgtaagaccaaatgtagttttgtatacagagaagaaaacctcaagtaataggcattttaagtaaaagtctacctgtgtttttttctaaaaaggctgctcacaagttctatttcttgaagaataaattctacctccttgtgttgcactgaacaggttctcttcctggcatcataaggagttggtgtaatcattttaaattccactgaaaatttaacagtatccccttctcatcgaagggattgtgtatctgtgcttctaatattagttggctttcataaatcatgttgttgtgtgtatatgtatttaagatgtacatttaataatatcaaagagaagatgcctgttaatttataatgtatttgaaaattacatgttttttcatttgtaaaaatgagtcatttgtttaaacaatctttcatgtcttgtcatacaaatttataaaggtctgcactcctttatctgtaattgtaattccaaaatccaaaaagctctgaaaacaaggtttccataagcttggtgacaaaattcatttgcttgcaatctaatctgaactgaccttgaatctttttatcccatttagtgtgaatattcctttattttgctgcttgatgatgagagggagggctgctgccacagactgtggtgagggctggttaatgtagtatggtatatgcacaaaactacttttctaaaatctaaaatttcataattctgaaacaacttgccccaagggtttcagagaaaggactgtggacctctatcatctgctaagtaatttagaagatattatttgtcttaaaaaatgtgaaatgcttttatattctaatagtttttcactttgtgtattaaatggtttttaaattaaaaaaaaaaaaaaaa

SEQ ID NO: 470 - DNA, 1297 bp, Homo sapiens
ggggcggggcttcgggcgagagggagggcagcaggagaaaggataagaaagggagtgggactggcgcctacggtggccgaagtgggacgcgccgagccggaggctgcaggatgatgcggttcatgctattattcagccggcagggaaaactgcggctgcaaaaatggtacctggccacttcggacaaggaacggaagaagatggtgcgcgagctcatgcaggttgtcctggctcgaaagcccaagatgtgcagcttcctggagtggagggacctcaaagttgtctataagagatatgccagcctctacttctgctgcgccatcgagggccaagacaatgagctcatcacactggagctgatccaccgatacgtggagctcttagacaaatactttggcagtgtgtgcgagctggacatcatcttcaactttgagaaggcctacttcatcctggatgagtttttgatggggggggatgtccaggacacctccaagaagagtgtgctgaaagccatcgagcaggctgacctactgcaagaggaggatgagtcgccacggagtgtgctggaggagatgggtttggcatagcccctgctgggccggggtgtggcgatggggtcctggcagcgtggcgggaacggctgcttctcctctgcccagggccctgttcttggtgggactcggctgcccctcctctgctgcctcacctttcggagtgagctgtgggctcaggcccttcaaacattccctccctccaccccctacctccactttccccttttcccactgaaggttttagaagctaggaggcaggaaaatgtgacccagatgggggtgctatttggcttttattccctgcctttgcagaactgatgtcaccccagatgtccttccctccctaataactgtaaatatataaatatgtcaggttaaagggaaaaggtgttcagggcacttcttgtcctctctgtcccataacctacctccaccctccccctagccagccaggcagcttctctgcctgggaggggagcctggacccccctctttctccttggctgcagtggggcctttatccagtgccagggaggaacaacatagttaatttttttctaaccttgccactttgagggaaggaagggttgggggaagggcaagctttatgggaccctggtcctggccctggcctttcactccagttctgggtgaggcaggagctgggaggggtggggagggggagggggaagtgtctgcctttatgtcctttcttctgaaataaaagtaaaagcatttctgga

SEQ ID NO: 471 - DNA, 5625 bp, Homo sapiens
acctagcgccccctcccccgggagcgcggaggagcattaataaacctctaagccgaggagaaaactctggctggggcagtgcgctgagcgccggaggagcgtaggcagggcagcgctggcgccagtggcgacaggagccgcgcgaccggcaaaaatacacgggaggccgtcgccgaaaagagtccgcggtcctctctcgtaaacacactctcctccaccggcgcctccccctccgctctgcgcgccgcccggctgggcgcccgaggccgctccgactgctatgtgaccgcgaggctgcgggaggaaggggacagggaagaagaggctctcccgcgggagcccttgaggaccaagtttgcggccacttctgcaggcgtcccttcttagctctcgcccgcccctttctgcagcctaggcggcccgggttctcttctcttcctcgcgcgcccagccgcctcggttcccggcgaccatggtgacgatggaggagctgcgggagatggactgcagtgtgctcaaaaggctgatgaaccgggacgagaatggcggcggcgcgggcggcagcggcagccacggcaccctggggctgccgagcggcggcaagtgcctgctgctggactgcagaccgttcctggcgcacagcgcgggctacatcctaggttcggtcaacgtgcgctgtaacaccatcgtgcggcggcgggctaagggctccgtgagcctggagcagatcctgcccgccgaggaggaggtacgcgcccgcttgcgctccggcctctactcggcggtcatcgtctacgacgagcgcagcccgcgcgccgagagcctccgcgaggacagcaccgtgtcgctggtggtgcaggcgctgcgccgcaacgccgagcgcaccgacatctgcctgctcaaaggcggctatgagaggttttcctccgagtacccagaattctgttctaaaaccaaggccctggcagccatcccacccccggttccccccagtgccacagagcccttggacctgggctgcagctcctgtgggaccccactacacgaccaggggggtcctgtggagatccttcccttcctctacctcggcagtgcctaccatgctgcccggagagacatgctggacgccctgggcatcacggctctgttgaatgtctcctcggactgcccaaaccactttgaaggacactatcagtacaagtgcatcccagtggaagataaccacaaggccgacatcagctcctggttcatggaagccatagagtacatcgatgccgtgaaggactgccgtgggcgcgtgctggtgcactgccaggcgggcatctcgcggtcggccaccatctgcctggcctacctgatgatgaagaaacgggtgaggctggaggaggccttcgagttcgttaagcagcgccgcagcatcatctcgcccaacttcagcttcatggggcagctgctgcagttcgagtcccaggtgctggccacgtcctgtgctgcggaggctgctagcccctcgggacccctgcgggagcggggcaagacccccgccacccccacctcgcagttcgtcttcagctttccggtctccgtgggcgtgcactcggcccccagcagcctgccctacctgcacagccccatcaccacctctcccagctgttagagccgccctgggggccccagaaccagagctggctcccagcaagggtaggacgggccgcatgcgggcagaaagttgggactgagcagctgggagcaggcgaccgagctccttccccatcatttctccttggccaacgacgaggccagccagaatggcaataaggactccgaatacataataaaagcaaacagaacactccaacttagagcaataacggctgccgcagcagccagggaagaccttggtttggtttatgtgtcagtttcacttttccgatagaaatttcttacctcatttttttaagcagtaaggcttgaagtgatgaaacccacagatcctagcaaatgtgcccaaccagctttactaaagggggaggaagggagggcaaagggatgagaagacaagtttcccagaagtgcctggttctgtgtacttgtccctttgttgtcgttgttgtagttaaaggaatttcattttttaaaagaaatcttcgaaggtgtggttttcatttctcagtcaccaacagatgaataattatgcttaataataaagtatttattaagactttcttcagagtatgaaagtacaaaaagtctagttacagtggatttagaatatatttatgttgatgtcaaacagctgagcaccgtagcatgcagatgtcaaggcagttaggaagtaaatggtgtcttgtagatatgtgcaaggtagcatgatgagcaacttgagtttgttgccactgagaagcaggcgggttgggtgggaggaggaagaaagggaagaattaggtttgaattgctttttaaaaaaaaaagaaaagaaaaagacagcatctcactatgttgccaaggctcatcttgagaagcaggcgggttgggtgggaggaggaagaaagggaagaattaggtttgaattgcttttttaaaaaaaaagaaaagaaaaaaaaagacagcatctcactatgttgccaaggctcatctcaagctcttgggctcaagagatcctcccacctcggcctcctgagtagctgggactgcaggtgtgtgtcatcatgaccaatgtgaattgcttttgaagctggttcatgggcatgtaggccaccgaagcaattttagaccacagtaagtcaagcttttttccctccgatgatcactgggtggttgcagcattttttgcataaacctgcctaagacttgtctatcgtctgtgatcaatatgccatattacactaaggtgctcctggaaaattgggtgcagttcaaattttcctacagcaaatcatttggcaaggccagccattggggaaaccagacaactagagataaccctgaaatgaatccttttgtaaattgaagcaccatcttttctttttttgcataaattggaggttttaattttagggcagttacctgaagtgaaatataccaacaatttcttgtgttctttaaattcctagttaggtgaatatttttgaaggtcctcttttgaataaagaggggaatggacaccacatttcaggtcttctcgaagtgtggaagggcaagagagcatcagtgagctgatggtggattgcttacatcggattccattggtatgaatttcccaaactggaaatcaaagcgccagggtggggttggggctgactgctggtgagggggctggccgctggctcccgtgacgtgcgtcatgggcacgcaggcgccattttgaatctatcgtcggcacgtgggtgccattttgaatccttagttgggcctttctaaatggagaatggctttggagggagacacgttttctgtggggagggtttgggggggagggaggagggaacaagctacatgctattttgtttgtagtattgtggaacagtcttgttatggagtgccagcttagaggttgttgcaaacttgtctagaagtgagagcatggttttttttagccctttgagagtctacatctaatgaacattcttgctcacccataaataacgtcaagcctcaatgtcaccgtcacgttgggatactctttctcatctggcatcctagacaggacaaggttggttacctttccttccatgaaccatgaacctgtgacggcatcattcatcctgacttcaccaagctccgcctgtgggtgaggccagagctcccactggcaatttttagaagagccagaggctccctgcttcctctagaaataacagttcagggtgaagcatggagggtttcagttcccagacaatggaaccatttagagacaacacagttggacatttccactttttccttgattcctggaagtccagtgggttctgcagctgaaaaagccctgggtcccagcagcagagagacaggacagaggggatgcttgggcggggagggacggtaacctgcagaacagattccatttttatagaacgagtacacgtttgctaaaacagtcctgctttcccagactggattcccaccacagggacagtcggaactcaggactagctccagcgacatctttcctccgaattcaagccttctatcacaatgtcaaaacagctatttataaagccattttcattgtacttgataacagcacgagtcccaaaacttttagaaataaaataggacattggcttgattgaaaagagggactttttaaaaattgttctttcgtcagaagccttttggatgacttacaatagctctgatgaagataccaccccagcgtcagtccaataggtcagtgagtttcaacaggcatccatccctcccatgaagggattctggtgatgggaagtttctgtaatgacaggaaagcattgaccctcattgattgtcaactttggtattagccatgaaagacaggatgctcattgggtgttctgtagagtgaggaatgctgcctattccctcccagaacgtctgacccaggggtgtgtgttgaggagccctgggggaaatggaccaagttttcccacagagcagtattaggctgaagagcaggtgactggtaggccccagctcccatcattccctcccaaagccattttgttcagttgctcatccacgctggattccagagagttttccaatttgggaagccatgagaaaggtttttaaatcttgggaagatggagagagggacataggatagttgactccaacatgacaggaagaggctggagattgggaattggccatcaaccaagcctgtagtagtaaagccatggtcccgcattggaattacttggggaacttatacagttctgatacccaggctctcctagaccagttcaaccaattctaggtgggggactcaggcatcagtgtgtttcgtagctccccgggtgttttccctgtgcagccgagcttgggaaactgccatgctttttggatgtcaaggcgctgttggaggctgggtgtgacagcacagagccaggttgtcttgtggaaaccacagccacgggtttgccactggctcagcatggcctcactgccagtcccagcctggctgagggacaagatggtttctcttgggagttcctgagtggagcacccttccaggctttttgaaagccagctgatctgtggagccttgttaagggactcaatacggtgtttggatattgatgtttttccttgagactgtcttgtccatcaataaagatggaggatgtctcctctttgaaccccgcttccccaccagtactctctctcccttagagtttatgagttattcaaggaggagacttcttaaagacagcaacgcaattcttgtaacttgtgtaaatagccccatctttcagagtgataccatttctacatttgataatgcctgtattcctgtaggatgtatatagtttaggggattttttttttgtttggttttgttttttagaagtcaatatgtctggttttatttattgcttgaaaaagatcatttgaaaaaaataaatacattttcaaccactaaaa

SEQ ID NO: 472 - DNA, 2394 bp, Homo sapiens
agtttccctccgcagcggcggcggcggctgcccctcggctccaggagaggccgccacccggggttccggtggcgttaggctgcagcagtggcgcttcccgccgcccgagcttcggaaacttcccggccgcgacgcagggaaccggcgcggagaaccgagcagagcggagcgcccgtggtccagcgtgtagggagccgatcgcccatggagggtctgggccgctcgtgcctgtggctgcgtcgggagctgtcgcccccgcggccgcggctcctgctcctggactgccgcagccgcgagctgtacgagtcggcgcgcatcggtggggcgctgagcgtggccctgccggcgctcctgctgcgccgcctgcggaggggcagcctgtcggtgcgcgcgctcctgcctgggccgccgctgcagccgcccccgcctgcccccgtgctcctgtacgaccagggcgggggccggcgccggcgcggggaggccgaggccgaggccgaggagtgggaggccgagtcggtgctgggcaccctgctgcagaagctgcgagaggaaggctacctggcctactacctccagggaggcttcagcagattccaggccgagtgccctcacctgtgtgagaccagccttgctggccgtgccggctccagcatggcgccggtgcccggtccagtgcccgtggtggggttgggcagcctgtgcctgggctccgactgctctgatgcggaatccgaggctgaccgcgactccatgagctgtggcctggattcggagggtgccacacccccaccagtggggctgcgggcatccttccctgtccagatcctgcccaacctctatctgggcagtgcccgggattccgccaatttggagagcctggccaaactgggcatccgctacatcctcaatgtcacccccaacctcccaaacttcttcgagaagaatggtgactttcactacaagcagatccccatctccgaccactggagccagaacctgtcgcggttctttccggaggccattgagttcattgatgaggccttgtcccagaactgcggggtgctcgtccactgcttggcgggggtcagccgttctgtcaccgtcactgtggcctacctcatgcagaagctccacctctctctcaacgatgcctatgacctggtcaagaggaagaagtctaacatctcccccaacttcaacttcatggggcagttgctggactttgagcgcagcttgcggctggaggagcgccactcgcaggagcagggcagtggggggcaggcatctgcggcctccaacccgccctccttcttcaccacccccaccagtgatggcgccttcgagctggcccccacctagggccccgtggccggcaggccggcccctgccccacccccacccacgggtgtccctgcccactcgtgtggcaagggaggggagggcaggagggctcggcctgagcagggtgctggggggagagcgcaatacctcacgcgggctgccgtcctaatcaacgtgcctatggcgggaccacgctcggagcctgcctcttctgcgactgttactttttctttgcgggatgggggtgggggttccctctccaggtggttgtccaggcccatgtcccggccctgggtgctcagccagctcggctaggccctgcgcctccctgcgcttcccccttcaggaagggtgtgtgccacctcgttgcactggatcccagtggctgcttgggggagaggcgtttgccatcactggtgttgtcacctccctgtttctccaccaagggcttgggcctctcggggctggggcctcccaggggatggggacccagagtgcagtggccgcccacatccatggcctaggagctactgggcaggttcccggccacacatctggtgggctgttttgttttttttttttcctcttcccccagatgtcttgacgggatcactggggctctttgtgagtgagggtggccaaactaccgccggaggagatggggtctcagagcgagagctgcggagggggaggggaagaagaaggcctcacttttgctgctgcggggcccacacagccgctgctactttggggggtggggaaggggccaagctgcagacacacacagtcattcatttctgtccacacccctgtgggtggcgggtgtgcgtgtgtgtgcttgtgtgtgcgcacgtgtcggcgctcacacacacatgctagcccactgatgcacccagcccagggctggcagtctttgcagcgtggggccgtctcaccctggagcctggagaggatctatgcttgtttgtttttgtaatccatatcatagttgctttctttaattgttccttctgaataaacagtttatttaagatactgaaaaaaaaaaaaaaa

SEQ ID NO: 473 - DNA, 5212 bp, Homo sapiens
gttatagttttgccgctggactcttccctcccttcccccaccccatcaggatgatatgagacttgaaagaagacgatgcatacaggaggagagacttcagcatgcaaaccttcatctgttcggcttgcaccgtcattttcattccatgctgctggccttcagatggctggacagatgccccattcacatcagtacagtgaccgtcgccagccaaacataagtgaccaacaggtttctgccttatcatattctgaccagattcagcaacctctaactaaccaggtgatgcctgatattgtcatgttacagaggcggatgccccaaaccttccgtgacccagcaactgctcccctgagaaaactttctgttgacttgatcaaaacatacaagcatattaatgaggtttactatgcaaaaaagaagcgaagacaccaacagggccagggagacgattctagtcataagaaggaacggaaggtttacaatgatggttatgatgatgataactatgattatattgtaaaaaacggagaaaagtggatggatcgttacgaaattgactccttgataggcaaaggttcctttggacaggttgtaaaggcatatgatcgtgtggagcaagaatgggttgccattaaaataataaagaacaagaaggcttttctgaatcaagcacagatagaagtgcgacttcttgagctcatgaacaaacatgacactgaaatgaaatactacatagtgcatttgaaacgccactttatgtttcgaaaccatctctgtttagtttttgaaatgctgtcctacaacctctatgacttgctgagaaacaccaatttccgaggggtctctttgaacctaacacgaaagtttgcgcaacagatgtgcactgcactgcttttccttgcgactccagaacttagtatcattcactgtgatctaaaacctgaaaatatccttctttgtaaccccaaacgcagtgcaatcaagatagttgactttggcagttcttgtcagttggggcagaggatataccagtatattcagagtcgcttttatcggtctccagaggtgctactgggaatgccttatgaccttgccattgatatgtggtccctcgggtgtattttggttgaaatgcacactggagaacctctgttcagtggtgccaatgaggtagatcagatgaataaaatagtggaagttctgggtattccacctgctcatattcttgaccaagcaccaaaagcaagaaagttctttgagaagttgccagatggcacttggaacttaaagaagaccaaagatggaaaacgggagtacaaaccaccaggaacccgtaaacttcataacattcttggagtggaaacaggaggacctggtgggcgacgtgctggggagtcaggtcatacggtcgctgactacttgaagttcaaagacctcattttaaggatgcttgattatgaccccaaaactcgaattcaaccttattatgctctgcagcacagtttcttcaagaaaacagctgatgaaggtacaaatacaagtaatagtgtatctacaagccccgccatggagcagtctcagtcttcgggcaccacctccagtacatcgtcaagctcaggtggctcatcggggacaagcaacagtgggagagcccggtcggatccgacgcaccagcatcggcacagtggtgggcacttcacagctgccgtgcaggccatggactgcgagacacacagtccccaggtgcgtcagcaatttcctgctcctcttggttggtcaggcactgaagctcctacacaggtcactgttgaaactcatcctgttcaagaaacaacctttcatgtagcccctcaacagaatgcattgcatcatcaccatggtaacagttcccatcaccatcaccaccaccaccaccatcaccaccaccatggacaacaagccttgggtaaccggaccaggccaagggtctacaattctccaacgaatagctcctctacccaagattctatggaggttggccacagtcaccactccatgacatccctgtcttcctcaacgacttcttcctcgacatcttcctcctctactggtaaccaaggcaatcaggcctaccagaatcgcccagtggctgctaataccttggactttggacagaatggagctatggacgttaatttgaccgtctactccaatccccgccaagagactggcatagctggacatccaacataccaattttctgctaatacaggtcctgcacattacatgactgaaggacatctgacaatgaggcaaggggctgatagagaagagtcccccatgacaggagtttgtgtgcaacagagtcctgtagctagctcgtgactacattgaaacttgagtttgtttcttgtgtgtttttatagaagtggtgttttttttccaaaaacaaagtgcaaagctgcttgaatcaggaggagattaacacactgaaccgctacaagagggcaaagctgattttttttttaacttgaaaagattgcaaagggacattgaagtgtttaaaagagccatgtccaaacccatcttcatggatagctcagaggtatcctctttttgctcccccattttaacttgccacatcccagtcacagtggggtttttttgtctttctattcagcaaaagttaatattcagatgttggtcttggtcatttgccaactaattttaaagtaaaaggcactgcacataatttgcataaagggccccatgagggtgttttttttttttctttttgtcccccccatccccctttttttttgttttgttctgttttgttttgggtgggagggtgggaaatttgggtttttaagtcctctaaacacacttgggcacggaaatgcagtactgtaaggaagagggacctccagcttccacaaacaccatcttcagctgtatgaaagggacggttgtggtgaagtttgtcaggcacagtaagcatgctgagtggcggggatcagaactctcctatctgaacctactgaggagcaaagcagcaattacatgggatcctgtggctctcccgttgcagaggccacaggaagataggatggaacgtgactggtctcctaaccaaggtgcactgagaagcaatcaacgggtcggtcgtggccagtcctggggaggtctgagtggtggtctttgggataacctttggccttatggatttggactcgaaattagaagagcctaccatttcagatgcaatcacttttggacatgcttttgcagacagtccttaatgctgaaaacacagagaatgggtaattcaagaggcctttcttttaaaatagacttttgtgacccactaattgtaaggtattgcaaggtcactttgcgtgtgtcataaagttgacttccttattggttgaaggtcacagaagtagtggtttgctttgatggaaatagctacagctgtgtcccttcctgctttttactttttcttttgctttttctcggcacgtggtatctccaccatttcttctgcacaaagatgtcttctgttcatcctgaacatttttaaaaaatgcagaattttatgtgactgcttttttgcctcacaattatgctgtgaattttacaaaaatttattttcttttttgataatttattgtaccaaagctgtttttatagcacatagatgtctgtaaccaataatgtagcagttctgcactttgacacaaggtgtaactagaccatttttaaatgtcagttgaaaattatggctgtactattgcttaaacaaaactggaactgttgttgaatccatagccaatacatttacagcaatctgtgtactgaacatagtagattgacatctaattcaagattacaacatctgttacattctaagtgtgttcaggcttctgaaggtaaagggacactggatccagaagctatggaaccagcagttgattcttgtattcctgattaacctacttgtaaacttgaaagcaagaccttgattgcaccaacaggtccagagtatgagtgcaagcaaagcagaactctcatgcgtgacctgagcagacaggctggtatttaacaggtgcctcgtgttgagattacgctgccttaatgtaacacagtctggcagttgctaaatttgtgttcccattttaaattgaccaattttggggtgtgacacttttgagcggttgaattgggagaatgaagataagtaatttacctgtccaggatcaaaagaagcctagaaaagaagcagtaatctacctctgccgataacctgtttaagatgactcagcagaacaccgcgtttcattctattggtcaattccatgtggctgactaggtcaattttttttctgaacaaaagcaggtttttatatgtaaacagtgagaaaagaaaggctaaacactatgtaaatgtgaatggaaacttggaaatactcgtttttataaactacaaaaactttttgttgtttatcaggaaatccatatttattttgtaattaactgtcaagcctgtggatgatttttttgaacttggtagttcataaaggtttacagtgaataaaaggatatcatcttgagtatagcaatatcaaaaggaattcagtagttactgctgtttaggaatataaggttaagatatcatatgggtcaggtcattttttttttctgtgctggttgccacatcttagcaagcaccaaaaaactaaagcagtttttaaaccgatatttacgtaaagaaaatcataaaatccaatgcttctgcatactgtgttatgttacagtccagttttgtgtgctttactacacagtttggttacaggacttctgtgcattgtaaacataaacagcatggaaaaggttaaatacctgtgttcagattgtaagatctagtccggacttgctgtgtatattgtaacgttaaatgaaaaaagaacccccctttgtattatagtcatgcggtcttatgtatgataaacagttgaataatttgtcctcagactctttactatgcttttttaaaaattaatttaagaaaaatgtaaacatagtaaaaatcttcctatgcaattaaactggtccaggtctggtaggtatagtatcaaagttgagttaaatgtgtaaaaaggaaactatttgagatacattgacataggcatcagcaatctctgaaagtaaaaattggaggtttaacaga

SEQ ID NO: 474 - DNA, 2602 bp, Homo sapiens
ttgcgacgctcgggtctgggtccgggtccggacgtgcaacagaagccgtcagtggccccgctggctaaaaaagggcaagcatcggaggctcgagccagcggccgcggcgcttcccgacagttcctaattcggggcgctacgccggccccaccacctgttcccggcagccaatggggccgcggggggcggccggggcggagcgcggctacaaaaggcctcgggccccgcgcgcccgcccaccccgctccgggcgcgctctcgggaaggcttggaccgacgcggcccagaggccaggaacattccgcgcgtggaccagccgggccagggcgatgctgcgggtgcggtgtctgcgcggcgggagccgcggcgccgaggcggtgcactacatcggatctcggcttggacgaaccttgacaggatgggtgcagcgaactttccagagcacccaggcagctacggcttcctcccggaactcctgtgcagctgacgacaaagccactgagcctctgcccaaggactgccctgtctcttcttacaacgaatgggaccccttagaggaagtgatagtgggcagagcagaaaacgcctgtgttccaccgttcaccatcgaggtgaaggccaacacatatgaaaagtactggccattttaccagaagcaaggagggcattattttcccaaagatcatttgaaaaaggctgttgctgaaattgaagaaatgtgcaatattttaaaaacggaaggagtgacagtaaggaggcctgaccccattgactggtcattgaagtataaaactcctgattttgagtctacgggtttatacagtgcaatgcctcgagacatcctgatagttgtgggcaatgagattatcgaggctcccatggcatggcgttcacgcttctttgagtaccgagcgtacaggtcaattatcaaagactacttccaccgtggcgccaagtggacaacagctcctaagcccacaatggctgatgagctttataaccaggattatcccatccactctgtagaagacagacacaaattggctgctcagggaaaatttgtgacaactgagtttgagccatgctttgatgctgctgacttcattcgagctggaagagatatttttgcacagagaagccaggttacaaactacctaggcattgaatggatgcgtaggcatcttgctccagactacagagtgcatatcatctcctttaaagatcccaatcccatgcatattgatgctaccttcaacatcattggacctggtattgtgctttccaaccctgaccgaccatgtcaccagattgatcttttcaagaaagcaggatggactatcattactcctccaacaccaatcatcccagacgatcatccactctggatgtcatccaaatggctttccatgaatgtcttaatgctagatgaaaaacgtgttatggtggatgccaatgaagttccaattcaaaagatgtttgaaaagctgggtatcactaccattaaagttaacattcgtaatgccaattccctgggaggaggcttccattgctggacctgcgatgtccggcgccgaggcaccttacagtcctacttggactgaacaggcctgatggagcttgtggctggcctcagatacacctaagaagcttaggggcaaggttcattctcctgctttaaaaagtgcatgaactgtagtgctttaaacaatcatctccttaacaggggtcgtaagcctggtttgcttctattacttttctttgacataaagaaaataacttctgctaggtattactctctactcctaaagttatttactatttggcttcaagtataaaattttggtgaatgtgtaccaagaaaaaattagtcacctgagtaacttggccactaataattaaccatctacctctgtttttaattttctttccaaaaggcagcttgaaatgttggtcctaatcttaattttttttcctcttctatagacttgagaatgtttttctctaaatgagagaaagacttagaatgtacacagatccaaaatagaatcagattatctctttttttctaaaggagagaaagacttagaacatacacagatcctaagtagaaccaggtaattgtctctttttctaataaggaatttgggtaatttttaattttttgttttttaaaaaataacctagactatgcaaaacatcaaagtgaattttccatgaatgtttttaatattctcatctcaacattgtgatatatgctactaaaaaccttttcatatacatcttacctcatttcaagtgaattattttaatctttttctctctttccaaaaatttaggaatgtttagtgtaattggatttcgctatcagttcccatccttaagttttgatattcaatatctgatagatacactgcatctttggtcatctaagatttgtttacaaatgtgcaaattatttagagcatagactttataagcattaaaaaaaactaatggaggtaaaacctaaatgcgatgtgaaataattttagtgttgataccgtatgtgtatttttattctaataaacttttgtgttccagattgaaaaaaaaaaaaaaaaaa

SEQ ID NO: 475 - DNA, 5263 bp, Homo sapiens
tgagcgtttttttttttttttttttttttttttggtctgggcttccgaatatgttttatgacggttgattttacaccaggaggtttgtctccgaggaagacccagggaactggatatctagcgagaacttcctccggattccccggcgcctcgggaaaatgggagctgctgcaaagttggcgtttgccgtctttcttatctcctgttcttcaggtgctatacttggtagatcagaaactcaggagtgtcttttctttaatgctaattgggaaaaagacagaaccaatcaaactggtgttgaaccgtgttatggtgacaaagataaacggcggcattgttttgctacctggaagaatatttctggttccattgaaatagtgaaacaaggttgttggctggatgatatcaactgctatgacaggactgattgtgtagaaaaaaaagacagccctgaagtatatttttgttgctgtgagggcaatatgtgtaatgaaaagttttcttattttccggagatggaagtcacacagcccacttcaaatccagttacacctaagccaccctattacaacatcctgctctattccttggtgccacttatgttaattgcggggattgtcatttgtgcattttgggtgtacaggcatcacaagatggcctaccctcctgtacttgttccaactcaagacccaggaccacccccaccttctccattactaggtttgaaaccactgcagttattagaagtgaaagcaaggggaagatttggttgtgtctggaaagcccagttgcttaacgaatatgtggctgtcaaaatatttccaatacaggacaaacagtcatggcaaaatgaatacgaagtctacagtttgcctggaatgaagcatgagaacatattacagttcattggtgcagaaaaacgaggcaccagtgttgatgtggatctttggctgatcacagcatttcatgaaaagggttcactatcagactttcttaaggctaatgtggtctcttggaatgaactgtgtcatattgcagaaaccatggctagaggattggcatatttacatgaggatatacctggcctaaaagatggccacaaacctgccatatctcacagggacatcaaaagtaaaaatgtgctgttgaaaaacaacctgacagcttgcattgctgactttgggttggccttaaaatttgaggctggcaagtctgcaggcgatacccatggacaggttggtacccggaggtacatggctccagaggtattagagggtgctataaacttccaaagggatgcatttttgaggatagatatgtatgccatgggattagtcctatgggaactggcttctcgctgtactgctgcagatggacctgtagatgaatacatgttgccatttgaggaggaaattggccagcatccatctcttgaagacatgcaggaagttgttgtgcataaaaaaaagaggcctgttttaagagattattggcagaaacatgctggaatggcaatgctctgtgaaaccattgaagaatgttgggatcacgacgcagaagccaggttatcagctggatgtgtaggtgaaagaattacccagatgcagagactaacaaatattattaccacagaggacattgtaacagtggtcacaatggtgacaaatgttgactttcctcccaaagaatctagtctatgatggttgcgccatctgtgcacactaagaaatgggactctgaactggagctgctaagctaaagaaactgcttacagtttattttctgtgtaaaatgagtaggatgtctcttggaaatgttaagaaagaagaccctttgttgaaaaatgttgctctgggagacttactgcattgccgacagcacagatgtgaaggacatgagactaagagaaaccttgcaaactctataaagaaacttttgaaaaagtgtacatgaagaatgtagccctctccaaatcaaggatcttttggacctggctaatggagtgtttgaaaactgacatcagatttcttaatgtctgtcagaagacactaattccttaaatgaactactgctattttttttaaatcaaaaacttttcatttcagattttaaaaagggtaacttgtttttattgcatttgctgttgtttctataaatgactattgtaatgccaatatgacacagcttgtgaatgtttagtgtgctgctgttctgtgtacataaagtcatcaaagtggggtacagtaaagaggcttccaagcattactttaacctccctcaacaaggtatacctcagttccacggttgctaaattataaaattgaaaacactaacaaaatttgaataataaatcgatccatgttttgtaacaaattcactgtgttatttaaggaaaaaaaggtaagctatgcttagtgccaacaataagtggccattcgtaaagcagtgttttagcatttcttgtgctggcttgtaatgtagggaaaaaaagtgctgttttttgaaaagatggtgtcatttcccccttcttcccatgttttaaagccccatcttatatccagttcccaaaatttgcatacttacctaagtattttttttaggtgtgctgtgtttggggaatatttgaaaatttaaagcatgatttaaaattttttaaagtgagctgtgacactggaaagctcttcattttatcttttaaaatagagttttttctatttatatatgtaaaattgtagtgtatttcttttcaccaaacagtgtgtgggacattctttatcactgttttaggatcacctcaggaagtgtcgttacccagaattccccactgtctgctatgagacttgtaactttatcactatacttctgcttggtgccatcttgtcagagtaatatttgatgtctgtgatatgtaaagaattatcctaggataaagatattaaactttaagcagatttcagatgttactgctttaaaacaaatcagggataacaaattaaacgtataacttaaaatatgcaatgacatttagaggtaaccaatgttgatataggtagcatagcctagcctcctccccaaaattgcttttacaactaacactgatactaatttaggatagttcatgccttatccttgctaagaaaatggaattgatggtaggcaggtgctaaagtgcttttcaaaacaatattacgttagaatacaattggattcttcctcaaatttatacaggccaaaaagtaaaacattaattttctgaatttccagattaccaatcaattaatcaacaaatagccagtattatgctgtgtatttctgtcaggtcattttaaaatccatgttaattttataaaagaattttttacatgtcactgtcaggagctcactgtgaatgtgttgtcttcaaatggttatttaaccacacagtacactacattttacatatatgtacgtaatctctgggaatagtaaattaattatgttatttataaacaatacataggtcaacagactttaagcagggaggaaaagaagagtaatagcgtctgtgtgctgcagaccattcagaactgtcacgtgtgtccccatggtctcattcattgtattcctagcaattcccttttcaatgttgagttcacctctttatttcacaaagtacttggtctctcaatttcttgatctggttttgcttccatttaaaaactaatcaagaagggaaaatattgagaatgtgcatacaagaaaatcattaatttcctgaagatgaatttctacctgttgtgaacatttaactttctttttaaaagttaaacaaaaataaacaagggatattatgatgaatgtttggcttatgtgagtactagagataaaatttttaaacccagttattcacaatataaaatgttttcaagttagaaaaaatttttagaaatcctgggtattgtatttaactgtagctaaccaattttaaaacttgtattcttttgagaactattattaatagaaaaactttttataagcagtaaaataagaatgttccagtgactacctgtccttatacctagtcttgttaaaactttcttttgcagggtatttagtgtttggtttacagtcagtgcagagtgggcaagttaacagaaagtttgagctagagatactggaaaaaaaaaagatcaaagaatgagaaaaatggtgatccattttggggcaaactgagaccccccaaataactctttcctcatgtgtatggtgctcctcatgactcgtcttgtattttgcctttctgatacccatcagaactgctgctgctctaacttatactctttaccttgcccagatctccgcgtaaggaatgctttatgatcaacttgccataggactgatggattaaccagtgttcggctttatttgaagtctatgccctgcacagctcttgtatgtattttagatgctagaagtttttttagcatgtgatgtgtgattcttgtttgaattctaggtaccttgtgaattccagaaaaagagactgtgcttcacgattgttagtcccatgaacttgcactatctatctttcatggtgatgttttgaaaatacaatcaggaaaaaacccaacacctttggaatttaaaatagaatcatatcatgaaatttaaaaagaatctcttctgttgcatttcctcacccctaagtaacagctacatttaagtaaaatgcaggtggtaggggaaaaaaaaccatggcgagatggtggtttagtggaataaactgattactggtttttttgtttttttttttttttttaaagaaagaagcttcatcacagatactttccagtttctcttttatacttttttgaaagattactttttaggaacatttggtatgatatgcataaaattatttatccatttatgggcaaaatgatacaagtagcatcttgattgaacatcatttacctcagatattcaaccagcagtacgttttttatgcagtctcaacccatatcccatttgttacctctcagaatattggtaagcagttattttcgctttactctgtatttcttgtgttttgggcacaggttattgtactactgtcaaatcgtacttgctattttttctgcaagtatttaacagaaagcttaaaatccccataaaaccccaccttggataagtgattgttaaatattgtacaaataaaatgtatgctatccccattccatccccaagttaaataaaaaaatgaatacggtatgaaaaaaaaaaa

SEQ ID NO: 476 - DNA, 5317 bp, Homo sapiens
tgggagggggcggtaagcgggggctggggggagggggcggggggggccgcgccgtgctagccgttgggcctgcctcggaggaggcgtcgccgccgccgctgccgctgccggcgccgttgccgctgccgggaaacacaaggaaagggaaccagcgcagcgtggcgatgggcgggggtagagccccgccggagaggctgggcggctgccggtgacagactgtgccctgtccacggtgcctcctgcatgtcctgctgccctgagctgtcccgagctaggtgacagcgtaccacgctgccaccatgaatgaggtgtctgtcatcaaagaaggctggctccacaagcgtggtgaatacatcaagacctggaggccacggtacttcctgctgaagagcgacggctccttcattgggtacaaggagaggcccgaggcccctgatcagactctaccccccttaaacaacttctccgtagcagaatgccagctgatgaagaccgagaggccgcgacccaacacctttgtcatacgctgcctgcagtggaccacagtcatcgagaggaccttccacgtggattctccagacgagagggaggagtggatgcgggccatccagatggtcgccaacagcctcaagcagcgggccccaggcgaggaccccatggactacaagtgtggctcccccagtgactcctccacgactgaggagatggaagtggcggtcagcaaggcacgggctaaagtgaccatgaatgacttcgactatctcaaactccttggcaagggaacctttggcaaagtcatcctggtgcgggagaaggccactggccgctactacgccatgaagatcctgcggaaggaagtcatcattgccaaggatgaagtcgctcacacagtcaccgagagccgggtcctccagaacaccaggcacccgttcctcactgcgctgaagtatgccttccagacccacgaccgcctgtgctttgtgatggagtatgccaacgggggtgagctgttcttccacctgtcccgggagcgtgtcttcacagaggagcgggcccggttttatggtgcagagattgtctcggctcttgagtacttgcactcgcgggacgtggtataccgcgacatcaagctggaaaacctcatgctggacaaagatggccacatcaagatcactgactttggcctctgcaaagagggcatcagtgacggggccaccatgaaaaccttctgtgggaccccggagtacctggcgcctgaggtgctggaggacaatgactatggccgggccgtggactggtgggggctgggtgtggtcatgtacgagatgatgtgcggccgcctgcccttctacaaccaggaccacgagcgcctcttcgagctcatcctcatggaagagatccgcttcccgcgcacgctcagccccgaggccaagtccctgcttgctgggctgcttaagaaggaccccaagcagaggcttggtggggggcccagcgatgccaaggaggtcatggagcacaggttcttcctcagcatcaactggcaggacgtggtccagaagaagctcctgccacccttcaaacctcaggtcacgtccgaggtcgacacaaggtacttcgatgatgaatttaccgcccagtccatcacaatcacaccccctgaccgctatgacagcctgggcttactggagctggaccagcggacccacttcccccagttctcctactcggccagcatccgcgagtgagcagtctgcccacgcagaggacgcacgctcgctgccatcaccgctgggtggttttttccccctaactttttacttagcctttttggtttgtgtccccacccccacctcctcaccccctttccagttcttcttcaggcccctcccagacgcaccccagcggcccctgcagcccctgcctccagcctccagcctcacctttgtgcccagactcgcatttggaagactccacctcccgcccaggcctgggctgttgggcggttggagattcaggttttaatccacacaagccccagtgaggggtgaagcatggcgcctggggcctgcctgagtttctggcctgggtgtcgtgctggtgtctgcctccgcgctgctgcatctggacgaaggctgccttctggtgggacgcgacacccggcagacagtggtgctgccttccaggccccgtggcctaggctcggagtggccaggcacggggcggtccaatcccccacccgctgtccccctatgggggcagaaaagcaataatgtccaggggcaggcaggggcccttgggagctgcagggctgggggttagggctgctccctggtgaatggagtcagatcctaggatctgtaccatggggaaccaggagtggccgggctgggtgccgcctcctggtccggcctcctccccaccaaactgtcctcaccctatggatgaggcaggaggaacatttggggccaaacctgcctgcctcccagccccgtgccttactagggcttccttccagctggccttacctcccgctggaccctgggcctggcctggccccactgggggctatgggctgggctcaccctctcctctgcgggggtggagggccaccagccttggctgttacaatcttacaccggacagtattgggccccatggacttggtcagggaggggtgggggtgggcatctctggtacctattggggtggggggcctctgaaaagggaggctcctaggcccccctcacccctccctctccccagggccccacgttctgcagccttaaggttgaacatgagtgcacgtccatgtcagtgctgtgggactcctgtgcgtgcctcggactgcgtgtgtcggcgggacgcaggcacacgtgggtgtgtgtgcatgtgtgtttgtgtgagggcagcgtgtcctccagtgtgcatggtgtgtgggcttgggccccatccctggcccgagcatttcatcctgtgggggaggggtgctgacctagtgggaggagccccactgtgatccatgagctgccctgcccacgcctcccctccctgtagcaacacctctgggtgtttggagtttagcttttgtgggtttgctctccctatcccatctcctgtactacacagttcatggcagggtggggaggggtggggttggttcgggtgggtgagggtctttttcctctgtgtgcgatgttgttatctgacagttctccgtccctactggcctttctcctcgtcttcatatttgtacggtacaagcaataaagacactcatttcagaccagggcccagcctgcactcacgccagcccaaccactctgggctttgccttggtgatggagtcagacccctgggccccagctcctcctgtactagccgttcccttcagcaaggagggcactgagctcagggtgagggcagctggggtgtgtgcaggagctcaggctggagagggtgggtggagctggtgctgtggggctgaggggtatgggaaggctccccgcatgtgggggtggggtggacagagaccactccaggccctcagtgctgcttaggctaagagaggtggggtggagggacagggctggaagatctgggtagcccagaatgaggagggtgcctgtgctgtcactgaatgagagggagtggttcattccacccggctgccgagcctcagaggggggcattcctatcctgccccacctccctgtttatgctgccacctggaagccttgaggcccccaaattccagtacagacccagtggtgtgttcatggtggcgtggttgctgtcacctgggagctcctgagcgtttggttagaaccctgttcagcttggggtcagccctcccctagtcactgccctttagcctggatgtgtctgggcccctgcacttcccgtgcttgagtcacgtggctgcatggccgggcgctggccggatggaacacctcccccagcaagggaccagggaccagagccctggcctgccctgctgagccctgctgtgcagagggcctggcacagatgaatttgagattttgccgcaaggtgttagcacttcacacccattgagtctttgagattttaagtgaatgtaagcagaaaaagtcagatccaatttacagaaatcagagttagctacagctaggactcgtttggttggggttttttagtttgtctttctaaagtcatgtggaccttaatttaattacaaaagtctaccctggtggtcataaaataggcaggcctatgaagaaaggccttttactcttccatctcatcccagccccgagttgacccacgttgctgctcctcacaccatggtgatgcaggtctcgtagtgtgggcacaggcctggctacctcatctttttagtgcctctctcctcttccacaggatggggtcccacagctgcagcagctggccccgtagttgagcatgtgtggttatcctgtagagcttttcccaagaagggtgtttgaacttagagtcttaataaaatcttaccaaataaattttgagtagaataatcgtcttttgcaatgtacattttaaaaatttcacacattcttttttgtatataaagaacagtgactgggcacagtggctcatgcctgtaatcccagcaatttgggaggccgaggcgggcgggtctcttgaggccaggggttcgagaccagcctgggcatcatagggagaccttcatctctacaaaaaatacaaaaattagctgggcatggtggtgcatgcctgcaatcccagctaacttggaaggctgaggtgaggtgggaagatcacttgagcccaggagtttgaggctgcagtgagctatgattgcggcactgcactgcagcctgggacaatgagactgtgtctctaaaaataaaaaaaaaaaaaacatgatacatgctattaaaaaagacagcaaagcaggagtataagaaaggaaattcacccgaggtcgcagggccttgagtactcattttggtgctgattacctctctgcaaatggacacggcatcataaattggtagtttcctgctctttttgtgtaatcttttccagttaatgtgaagcctctgggggctgccctcgtgcactgatggttgtgtggagtcgggggcggcagtgcgattcccttttagctgctgcatggggggaactcaggctttccagctgcttcctggggttccatggggtagacccctcaaccgcttcagctgccccgttaacaggaattgacttggtttcgtttggtgctaccagcagtcctgtaataaactagctatccatctgtaaaaaaaaaaaaaaaaaa

SEQ ID NO: 477 - DNA, 1602 bp, Homo sapiens
ggctctgcagaggcagcggttggaggcgcggtgggtgtctgcgggggtctcgcggggcggctgcggtgtttcaccgggaaaggctcgaggagagcgcggctcacgagagataacccagctgtgctccctggaaccttcaatttcaaggcctccctgcctctactaggcgccttagctcactatggggaaccacttgactgagatggcgcccactgcctcctccttcttgccccacttccaagccctgcatgtcgtggtcattgggctggactctgctggaaagacctccctcctttaccgcctcaagttcaaggagtttgtccagagtgtccccaccaaaggcttcaacaccgagaagatccgggtgcccctcgggggatcgcgtggcatcaccttccaagtgtgggacgtcggggggcaggagaagctgcgaccactgtggcgctcttatacccgccggacagacggtctagtgtttgtggtggacgctgcggaggctgagcggctggaggaagccaaggtggagttgcaccgaatcagccgggcctcggacaaccagggcgtgccagtgctggtgctggccaacaagcaggaccagcccggggcactgagcgctgctgaggtggagaagaggctggcagtccgagagctagcagccgccactctcactcatgtgcaaggctgcagcgctgtggacggtctgggcctgcagcagggccttgagcgcctctatgagatgatcctcaagaggaagaaggcagctcggggtggcaagaagagacggtgacccaagccccccctccctttcctcccacctagtaggggtctgcacacttggacagcagggtgggaccagcctgtgacctctcagtcagactggggtgcaggacctgtccacctcaatgaaggagagaggagcatggggtgtcccgttttggtgccacactggggtggggatgggagatgggatgtctttgcatatctctctcatcctctctggagaagtgggcgctgcaggactgtggagacgtaaatgtaaactgtgactctacctcgaccctgtttcttatttttcttctctggctaaaaatttttaattggatgtgtttgggggcggggggatggaagtgacttggagaatgtgtttgggatgaaataactatctccccttcctctgtcccccaactggggagtctccccaggctgcttttctaggaataccagtcacatagtttttatttttgtgtctgtgaaagtgccaagaacccctccccacatttgtagatccatgaccctttttataagctgtgtgtgtcctctgtattattgttattaactattttttagcatttgcctgtaagttattaaagactgataactgtagctcttaccttggtctggggcattttcctctccttatcttgccccagagacaattcaagatttctatatggggttgtggcgcagggggagggagatttatcttgaagctgaatttgcaaagcaagcacttataaaaattagattgtgtgttacgggatggcttgtgaaaattataggggggagtggaaaacccctcaagctaaaaaaaaaaaaaaaaaa

SEQ ID NO: 478 - DNA, 1946 bp, Homo sapiens
gatggcggcgcccaggccctgccacgcagacttccgcccggcgcggagaccgaaggctggcggctggtcgcgttgcaggcaacatgtcggaaggaaacgccgccggcgagcccagcacgccgggagggccccgacctctcctgactggggcccgggggctcatcgggcggcggccggcgcctcccctcacccccggccgccttccctccatccgttccagggacctcaccctcgggggagtcaagaagaaaaccttcaccccaaatatcatcagtcggaagatcaaggaagagcccaaggaagaagtaactgtcaagaaggagaagcgtgaaagggacagagaccgacaacgagaggggcatggacgagggcgaggccgtccagaagtgatccagtctcactccatctttgagcagggcccagctgaaatgatgaagaaaaaagggaactgggataagacagtggatgtgtcagacatgggaccttctcatatcatcaacatcaaaaaagagaagagagagacagacgaagaaactaaacagatcttgcgtatgctggagaaggacgatttcctcgatgaccccggcctgaggaacgacactcgaaatatgcctgtgcagctgccgctggctcactcaggatggctttttaaggaagaaaatgacgaaccagatgttaaaccttggctggctggccccaaggaagaggacatggaggtggacatacctgctgtgaaagtgaaagaggagccacgagatgaggaggaagaggccaagatgaaggctcctcccaaagcagccaggaagactccaggcctcccgaaggatgtatctgtggcagagctgctgagggagctgagcctcaccaaggaagaggaactgctgtttctgcagctgccagacaccctccctggccagccacccacccaggacatcaagcctatcaagacagaggtgcagggcgaggacggacaggtggtgctcatcaagcaggagaaagaccgagaagccaaattggcagagaatgcttgtaccctggctgacctgacagagggtcaggttggcaagctactcatccgcaagtctggaagggtgcaactcctcttgggcaaggtgactctggacgtgaccatgggaactgcctgctccttcctgcaggagctggtgtccgtgggccttggagacagtaggacaggggagatgacagtcctgggacacgtgaagcacaaacttgtatgttcccctgattttgaatccctcttggatcacaaacaccggtaaaatgagcaggtggaggaggacggcgcctgtgcccacggctgctgcctgctccagacattttgttcttgaatctgtgagacccagaaggggcccactgagcccactcactccagcctttggcaaccattgttccaggtcccccagggcttcctcccacagcagctgtgaatggcacagtgaccttcctgcagcgtggagatggcacatccttgctgctggggacttggccctgctatttatttttgtatttatgtcttaatctcttccactgatgcatcctccaagggtagatggggagggtctgtgtgaaggggccggcttctcttggtgcctgctgggttgcaggggcaggaagcgtgtggactgcagcttctgctggtgctccccccgtcctcctggaggcagtataggagagagagcaaggattgagtctgagacttaagcactcggtcccagcttgccagttcctggttctgtgtccttggacaaactacctaacctttctgagcctcctatacctcatccgacacaaatggggatgatacctacctccagggttggcgtgaggattcatgggctattatagatgaaaactgcacaaggccagaaccagcaggcactcaataaacgttcatgtcctttttctctaaaaaaaaaaaaaaaaaa

SEQ ID NO: 479 - DNA, 6531 bp, Homo sapiens
gcccagccagcttgcgtcaccgcttcagagcggagaagagcgagcaggggagagcgagaccagttttaaggggaggaccggtgcgagtgaggcagccccgaggctctgctcgcccaccacccaatcctcgcctcccttctgctccaccttctctctctgccctcacctctcccccgaaaaccccctatttagccaaaggaaggaggtcaggggaacgctctcccctccccttccaaaaaacaaaaacagaaaaacccttttccaggccggggaaagcaggagggagaggggccgccgggctggccatggagctgctgtgccacgaggtggacccggtccgcagggccgtgcgggaccgcaacctgctccgagacgaccgcgtcctgcagaacctgctcaccatcgaggagcgctaccttccgcagtgctcctacttcaagtgcgtgcagaaggacatccaaccctacatgcgcagaatggtggccacctggatgctggaggtctgtgaggaacagaagtgcgaagaagaggtcttccctctggccatgaattacctggaccgtttcttggctggggtcccgactccgaagtcccatctgcaactcctgggtgctgtctgcatgttcctggcctccaaactcaaagagaccagcccgctgaccgcggagaagctgtgcatttacaccgacaactccatcaagcctcaggagctgctggagtgggaactggtggtgctggggaagttgaagtggaacctggcagctgtcactcctcatgacttcattgagcacatcttgcgcaagctgccccagcagcgggagaagctgtctctgatccgcaagcatgctcagaccttcattgctctgtgtgccaccgactttaagtttgccatgtacccaccgtcgatgatcgcaactggaagtgtgggagcagccatctgtgggctccagcaggatgaggaagtgagctcgctcacttgtgatgccctgactgagctgctggctaagatcaccaacacagacgtggattgtctcaaagcttgccaggagcagattgaggcggtgctcctcaatagcctgcagcagtaccgtcaggaccaacgtgacggatccaagtcggaggatgaactggaccaagccagcacccctacagacgtgcgggatatcgacctgtgaggatgccagttgggccgaaagagagagacgcgtccataatctggtctcttcttctttctggttgtttttgttctttgtgttttagggtgaaacttaaaaaaaaaattctgcccccacctagatcatatttaaagatcttttagaagtgagagaaaaaggtcctacgaaaacggaataataaaaagcatttggtgcctatttgaagtacagcataagggaatcccttgtatatgcgaacagttattgtttgattatgtaaaagtaatagtaaaatgcttacaggaaaacctgcagagtagttagagaatatgtatgcctgcaatatgggaacaaattagaggagacttttttttttcatgttatgagctagcacatacacccccttgtagtataatttcaaggaactgtgtacgccatttatggcatgattagattgcaaagcaatgaactcaagaaggaattgaaataaggagggacatgatggggaaggagtacaaaacaatctctcaacatgattgaaccatttgggatggagaagcacctttgctctcagccacctgttactaagtcaggagtgtagttggatctctacattaatgtcctcttgctgtctacagtagctgctacctaaaaaaagatgttttattttgccagttggacacaggtgattggctcctgggtttcatgttctgtgacatcctgcttcttcttccaaatgcagttcattgcagacaccaccatattgctatctaatggggaaatgtagctatgggccataaccaaaactcacatgaaacggaggcagatggagaccaagggtgggatccagaatggagtcttttctgttattgtatttaaaagggtaatgtggccttggcatttcttcttagaaaaaaactaatttttggtgctgattggcatgtctggttcacagtttagcattgttataaaccattccattcgaaaagcactttgaaaaattgttcccgagcgatagatgggatggtttatgcaagtcatgctgaatactcctcccctcttctcttttgccccctcccttcctgcccccagtctgggttactcttcgcttctggtatctggcgttctttggtacacagttctggtgttcctaccaggactcaagagacaccccttcctgctgacattcccatcacaacattcctcagacaagcctgtaaactaaaatctgttaccattctgatggcacagaaggatcttaattcccatctctatacttctcctttggacatggaaagaaaagttattgctggtgcaaagatagatggctgaacatcagggtgtggcattttgttcccttttccgtttttttttttttattgttgttgttaattttattgcaaagttgtattcagcgtacttgaatttttcttcctctccacttcttagaggcattcagttagcaaagaggttggagcaacaacttttttttttttttttgcacaattgtaattgacaggtaatgaagctatttgttaaaatatttgcctttttaagtaaaaaagaaaaatcagaacagggctatttgaagaattattttatacacagattctgccttgtttcatagtatgagggttgaagacggaaaacaatctaagggtctctcatttttttaattttgttttgttcagtttggtttttttttttttttgcgctgctaagaagctaaagtcatccatccttattcacgttgacagtacctagctgtaatgtttcacagagtgtgctgctattttataaacatttttataatatattattttactgcttaaattccaagtcctgaagtagatggttgagatatgagttcttcgtactggaaaagcccttccgtagtttgttttcttctggtagcatattcatggttgtttttttttttcttttttggttttttggttttttttttttcctctgatcacattcttcaaagacggagtattctttacctcaggtttactggacaaaatcaataactacaaaaggcaatgattcacgcttttgttttcataatacctcacaaccgtacagtttctgcttgggagcccattcgcatgaggaatacagaagcagtgtgagcagggctgactccctctcaggtggaaggcagggcggtctcactcccagggacctttttggtcatggaggccatcgggctcccagttagaccctggtatcctcatcatgatggaaaaaatacattgaaccaagggatcctccctccccttcaaggcagacgttcagtacaaacatttatgcggtaggctcagatgtcgtaatttgcacttaggtaccaggtgtcaggaaacagactaaaaagaattccaccaggctgtttggagatcctcatcttggagctttttcaaaagcggggcttcatctgcaaagggccctttcatcttgaagtttttcccctccgtctttcccctcccctggcatggacaccttgtgtttaggatcatctctgcaggtttcctaggtctgaatctgcgagtagatgaacctgcagcaagcagcgtttatggtgcttccttctccctcctctgtctcaaactgcgcaggcaagcactatgcaagcccaggccctctgctgagcggtactaaacggtcgggttttcaatcacactgaattggcaggataagaaaaataggtcagataagtatgggatgatagttgaagggaggtgaagaggctgcttctctacagaggtgaaattccagatgagtcagtctcttgggaagtgtgtttagaagggttcaggactttgtgagttagcatgaccctaaaattctaggggatttctggtgggacaatgggtggtgaattctgaagttttggagagggaagtggagcagccagcaagtaagctagccagagttttctcaagagccagctttgctcagcacactctcctgggccccaaggagtcccacggaatggggaaagcgggaaccctggagttcttgggaatcttggagcctaaagagaaaccgaggtgcaaattcatttcatggtgactgacccttgagcttaaacagaagcagcaaatgaaagaaccggacaaataaggaagggcacaagcctacccgactctatttacagtctgtaactttccactcttcctgtagtcccgaggcccctgggtccttctagcttttctctttcccatccttggggccttgtgtgatgatgggtgtggggctgccgatgggaaagtcgggggttgttaggcttttctgcctgctcctgcttaaacacaagaaggaatcctggattttgccctctccttagctcttagtctctttggtaggagttttgttccagaggagctctcccccttggatttgaacttgctctttttgttgttgttgttctttctcttctttttcttacctcccactaaaggggttccaaattatcctggtctttttctaccttgttgtgtttctatctcgtctttacttccatctgtttgtttttttctccatcagtgggggccgagttgttcccccagcctgccaaattttgatccttcccctcttttggccaaatcctagggggaagaaatcctagtatgccaaaaatatatgctaagcataattaaactccatgcgggtccataacagccaagaagcctgcaggagaaagccaagggcagttccctccgcagaacaccccatgcgtgctgagaggcgagctccttgaagaaggggctgttcttccaggaggccttattttgaactgcctcaggaccccactggagagcacagcatgccttactactgggtcatccttggtctatgtgctctgtactggaggctctgttctgcctcttatcagccaggtcaggggcacacatggcttaagtgacaaagccagaggagaagacaaccctgacagcatcacgctgcatcccattgctagcaggattggcaactcttcagacggagctgcgcttccctgcagtctagcacctctagggcctctccagactgtgccctgggagctctgggactgaaaggttaagaacataaggcaggatcagatgactctctccaagagggcaggggaattttctctccatgggccacaggggacagggctgggagaagaaatagacttgcaccttatgtcatgtaaataattgattttctagttcaagaagataatattggtagtgtgggaattggaggtaggaaggggaggaagtctgagtaagccagttggcttctaagccaaaaggattcctctttgtttatctctgagacagtccaaccttgagaatagctttaaaagggaaattaatgctgagatgataaagtccccttaagccaacaaaccctctgtagctatagaatgagtgcaggtttctattggtgtggactcagagcaatttacaagagctgttcatgcagccatccatttgtgcaaaatagggtaagaagattcaagaggatatttattacttcctcataccacatggcttttgatgattctggattctaaacaacccagaatggtcatttcaggcacaacgatactacattcgtgtgtgtctgcttttaaacttggctgggctatcagaccctattctcggctcaggttttgagaagccatcagcaaatgtgtacgtgcatgctgtagctgcagcctgcatcccttcgcctgcagcctactttggggaaataaagtgccttactgactgtagccattacagtatccaatgtcttttgacaggtgcctgtccttgaaaaacaaagtttctatttttatttttaattggtttagttcttaactgctggccaactcttacatccccagcaaatcatcgggccattggattttttccattatgttcatcacccttatatcatgtacctcagatctctctctctctcctctctctcagttatgtagtttcttgtcttggacttttttttttcttttctttttctttttttttttgctttaaaacaagtgtgatgccatatcaagtccatgttattctctcacagtgtactctataagaggtgtgggtgtctgtttggtcaggatgttagaaagtgctgataagtagcatgatcagtgtatgcgaaaaggtttttaggaagtatggcaaaaatgttgtattggctatgatggtgacatgatatagtcagctgccttttaagaggtcttatctgttcagtgttaagtgatttaaaaaaataataacctgttttctgactagtttaaagatggatttgaaaatggttttgaatgcaattaggttatgctatttggacaataaactcaccttgacctaaattaaaaaaaaaa

SEQ ID NO: 480 - DNA, 4287 bp, Homo sapiens
ctgcgcctgcgcgagggctacgcgcgctccggccggggcgcgggcgcgctctcaggcgggctccggcggcagcgacgcgagcgcggcgatggggagcggcggcgtggtccactgtaggtgtgccaagtgtttctgttatcctacaaagcgaagaataaggaggaggccccgaaacctgaccatcttgagtctccccgaagatgtgctctttcacatcctgaaatggctttctgtagaggacatcctggccgtccgagctgtacactcccagctgaaggacctggtggacaaccacgccagtgtgtgggcatgtgccagcttccaggagctgtggccgtctccagggaacctgaagctctttgaaagggctgctgaaaaggggaatttcgaagctgctgtgaagctgggcatagcctacctctacaatgaaggcctgtctgtgtctgatgaggcccgcgcagaagtgaatggcctgaaggcctctcgcttcttcagtctcgctgagcggctgaatgtgggtgccgcacctttcatctggctcttcatccgccctccgtggtcggtgagcggaagctgctgcaaggccgtggttcacgagagcctcagggcagagtgccagctgcagaggactcacaaagcatccatattgcactgcttgggcagagtgctgagtctgttcgaggatgaggagaagcagcagcaggcccatgacctgtttgaggaggctgctcatcagggatgtctgaccagctcctacctcctctgggaaagcgacaggaggacagatgtgtcagatcctgggcgatgcctccacagcttccgaaaactcagggactacgctgccaaaggctgctgggaagcgcagctgtctttagccaaagcctgtgcaaatgcaaaccagcttggactggaggtgagagcttccagtgagatcgtctgccagctatttcaggcttcccaggctgtcagtaaacaacaagtcttctccgtgcagaagggactcaatgacacaatgaggtacattctgatcgactggctggtggaagttgccaccatgaaggacttcacaagcctgtgcctgcacctgaccgtggagtgtgtggaccggtacctgcggaggaggctggtgccgcggtacaggctccagctgctgggcatcgcctgcatggtcatctgcacccggtttatcagtaaagagatcctgaccatccgggaggccgtatggctcacggacaacacttacaagtacgaggacctggtgagaatgatgggcgagatcgtctccgccttggaagggaagattcgagtccccactgtggtggattacaaggaggtcctgctgacgctagtccctgtggagctgagaacccagcacctgtgcagcttcctctgcgagctctccctgctgcacaccagcctgtccgcctacgccccagcccgcctggctgccgcagccctgctcctggccagactgacgcacgggcagacacagccctggaccactcagctgtgggacctcaccggattctcctatgaagacctcattccctgcgtcttgagcctccataagaagtgcttccatgatgacgcccccaaggactacaggcaagtctctctgaccgccgtgaagcagcggtttgaggacaagcgctatggagaaatcagccaggaagaggtgctgagctacagccagttgtgtgctgcattaggagtgacacaagacagccccgaccccccgactttcctcagcacaggggagatccacgccttcctcagctctccctcggggcggagaaccaaacggaagcgggagaacagcctccaggaagacagaggcagcttcgttaccacccccactgcggagctgtccagccaggaggagacgctgctgggcagcttcctcgactggagcctggactgctgctctggctatgaaggcgaccaggagagtgagggcgagaaggagggcgacgtgacagctcccagcggcatcctcgatgtcaccgtggtctacctgaacccagaacagcattgctgccaggaatccagtgatgaggaggcttgtccagaggacaagggaccccaggacccacaggcactggcgctggacacccagatccctgcaacccctggacccaaacccctggtccgcaccagccgggagccagggaaggacgtcacgacctcagggtactcctccgtcagcaccgcaagtcccacaagctccgtggacggtggcttgggggccctgccccaacctacctcagtgctgtccctggacagtgactcgcacacacagccctgccaccatcaggccaggaagtcatgtttacagtgtcgtcccccaagtcccccggagagcagtgttccccagcaacaggtgaagcggataaacctatgcatacacagtgaggaggaggacatgaacctgggccttgtgaggctgtaagtgtgtcagcacatttgccgcagtggatgtgtactgagggggctggaggcgaagggtgggagcatagcataggaacgctgcatagaccatggaggcctttgcgcagagagcagagaggatgacttgcggccaccaagtttctgtctccgcgggagtcccgtgcaagccatcagaatgttgaaatgagggtgaagagctcagatccctctctttggaaagtttagcctggaagcagttggccacactgtgtggagggcacctctctgtcccttccgtgtctcactgtctctggaagcttcagcccatgtgtgtcctggtgttcccagccccaccagagccccgtgccgggagctgacagctttcacgcttaaggcacgtgtgacctgggtagtcagacaccacttgagcccctgcccacatctgctggtttggggcttcagtggggagctgacagctgtgagcacaccactgtcccctcatccacctcggcctgcatggggcacccacttccttctgggtggggcttccatggtaagggggcctgcgtccctgcacactgcgaggactgccttggccacaggcccactccctacgacacgtgactcgttttagagctctgtcccagaggcgttcgtatgtgacccacagatggcgtcaatgtgaacacctctctttgtgctgaatttctgggccattcttttcctgtcttatttctaaatttccttcttccaagatgaaaacaaaagaaaaacttaaaacagaaggtattaaaaaaacaagagattcccaccattatttaggttcacctgcaaaacaaaaatcttactccagcccctcaatgccatcctgacacactttatgcaaaaagaattttcccagataggctagccagaaaaaacttcaagtcctctgtaacatctgaggtgaccaagaggcagaagagcagagcagtcgggggccgtgtcctggctgatcccaactgcagctctgctgtgggggcccgtgggagggaggcagacccctgggctttcctgctggccacggagactctgctcctgcatggaaagggagcctgggagccagcagcccacgcctggggagcctgcctggggccatgtgaccatggcctctccctgggaacgggctgaccacaacacaccctgctgccatccacttctgtttactctgcaaatgtaagaaagaaccacttggccagaagtgtcccccagatgcttttttttttttttttttggagacagttttgctcttgtctccccggctggagtgcagtggcatgatctcaactctcaactcactgtaacctccgcctcccggatactcctgcctcagcctcctgggtagctgggattacaagcacccaaccacgcccagctaatttttgtattttcggtagagacgggatttcaccatgttggccaggctagtctcgaactcatgacctcaagtgatccgcccacttcggtctcccaaagtgctgggattacaggcatgagccacggcgcctggcccccaaatgctcttgaaccggaaacccagggatgggagatgctcactgagctgctgcttttatgtgtgctggtgctatgtgtgttcatgtccgcggcagctgtctttttgctactataagggaattctggccaccctgggtggggtgtggtcggggtgagaacccaagcgttggaactgtagacccgtcctgtcgactgtgtgcccctgggcatgtgtgagcctcagtttcctcatctgtaaggggggcaatgatacctacctcacaggggtgttgtgaggattaaatgtgaggaggatagtggcagatg

SEQ ID NO: 481 - DNA, 3717 bp, Homo sapiens
gaacagcgaagacagcgtgagcctgggccgttgcctcgaggctctcgcccggcttctcttgccgacccgccacgtttgtttggatttaatcttcaggttgccggcgcccgcccgcccgctggcctcgcggtgtgagagggaagcacccgtgcctgtggctggtggctggcgcctggagggtccgcacacccgcccggccgcgccgcttgcccgcggcagccgcgtccctgaaccgcggagtcgtgtttgtgtttgacccgcgggcgccggtggcgcgcggccgaggccggtgtcggcggggcggggcggtcgcggcggaggcagaggaagagggagcgggagctctgcgaggccgggcgccgccatggaactgggcccggagcccccgcaccgccgccgcctgctcttcgcctgcagcccccctcccgcgtcgcagcccgtcgtgaaggcgctatttggcgcttcagccgccgggggactgtcgcctgtcaccaacctgaccgtcactatggaccagctgcagggtctgggcagtgattatgagcaaccactggaggtgaagaacaacagtaatctgcagagaatgggctcctccgagtcaacagattcaggtttctgtctagattctcctgggccattggacagtaaagaaaaccttgaaaatcctatgagaagaatacattccctacctcagaagctgttgggatgtagtccagctctgaagaggagccattctgattctcttgaccatgacatctttcagctcatcgacccagatgagaacaaggaaaatgaagcctttgagtttaagaagccagtaagacctgtatctcgtggctgcctgcactctcatggactccaggagggtaaagatctcttcacacagaggcagaactctgccccagctcggatgctttcctcaaatgaaagagatagcagtgaaccagggaatttcattcctctttttacaccccagtcacctgtgacagccactttgtctgatgaggatgatggcttcgtggaccttctcgatggagagaatctgaagaatgaggaggagaccccctcgtgcatggcaagcctctggacagctcctctcgtcatgagaactacaaaccttgacaaccgatgcaagctgtttgactccccttccctgtgtagctccagcactcggtcagtgttgaagagaccagaacgatctcaagaggagtctccacctggaagtacaaagaggaggaagagcatgtctggggccagccccaaagagtcaactaatccagagaaggcccatgagactcttcatcagtctttatccctggcatcttcccccaaaggaaccattgagaacattttggacaatgacccaagggaccttataggagacttctccaagggttatctctttcatacagttgctgggaaacatcaggatttaaaatacatctctccagaaattatggcatctgttttgaatggcaagtttgccaacctcattaaagagtttgttatcatcgactgtcgatacccatatgaatacgagggaggccacatcaagggtgcagtgaacttgcacatggaagaagaggttgaagacttcttattgaagaagcccattgtacctactgatggcaagcgtgtcattgttgtgtttcactgcgagttttcttctgagagaggtccccgcatgtgccggtatgtgagagagagagatcgcctgggtaatgaataccccaaactccactaccctgagctgtatgtcctgaaggggggatacaaggagttctttatgaaatgccagtcttactgtgagccccctagctaccggcccatgcaccacgaggactttaaagaagacctgaagaagttccgcaccaagagccggacctgggcaggggagaagagcaagagggagatgtacagtcgtctgaagaagctctgagggcggcaggaccagccagcagcagcccaagcttccctccatccccctttaccctctttgctgcagagaaacttaagcaaaggggacagctgtgtgacatttggagagggggcctgggacttccatgccttaaacctacctcccacactcccaaggttggagcccagggcatcttgctggctacgcctcttctgtccctgttagacgtcctccgtccatatcagaactgtgccacaatgcagttctgagcaccgtgtcaagctgctctgagccacagtgggatgaaccagccggggccttatcgggctccagccatctcatgaggggagaggagacggaggggagtagagaagttacacagaaatgctgctggccaaatagcaaagacaacctgggaaggaaaggtctttgtgggataatccatatgtttaatttattcaacttcatcaatcactttattttatttttttttctaactcctggagacttattttactgcttcattaggttgaaatactgccattctaggtagggttttattatcccagggactacctcggcttttaatttaaaaaaaaaaaagaagtgggtaagaaaatgcaaacctgttataagttatcggacagaaagctaggtgctctgtcacccccaggaggcgctgtggtactggggctgctgctatttaagccaagaactgaggtcctggtgagagcgttggacccaggcttggctgcctgacataagctaaatctcccagacccaccactggctaccgatatctatttggtgggaggtgtggccctgttcttcctcaccccagttccatgacattggctggtataggagccacagtcaggaaagcacttgaggcagcatctgttgggccacccccggctcagtgctggaatgttgcagtgtaggtttcccagggaaggggggtgggggtaggtgggctccacaggatgggggaggagcatgtccactgagtatcttccttatgttgctgtgatattgatagcttttattttctaatttttaaaaaatggtcatattatgagtcaaagagtatcaaatcagtgttggatggaccacccaagggtgaggagaggggctggaagccctgggcattaggagaagggagtgggtgctggcatggacatgactggatagaattttctcaggagggagcttggtggattttgaaggtaaaactttctgggtttatcatgttttaattttagagacagggagtgatgaatcatcaccggttgtccccttatctaactccataaaagtgggaatttcaaaagaacacctcatccaaggagctggggcagacttcattgattctagagagacctgtttcagtgcctactcatccctgccctctggtgccagcctccttaccatcacggcttcactgaggtgtaggtgggtttttcttaaacaggagacagtctctcccctcttacctcaacttcttggggtgggaatcagtgatactggagatggctagttgctgtgttacgggtttgagttacatttggctataaaacaatcttgttgggaaaaatgtgggggagaggacttcttcctacacgcgcattgagacagattccaactggttaatgatattgtttgtaagaaagagattctgttggttgactgcctaaagagaaaggtgggatggccttcagattataccagcttagctagcattactaaccaactgttggaagctctgaaaataaaagatcttgaacccataaaaaaaaaaa

SEQ ID NO: 482 - DNA, 2207 bp, Homo sapiens
cacttcctccccagacaggggtagtgcgaggccgggcacagccttcctgtgtggttttaccgcccagagagcgtcatggacctggggaaaccaatgaaaagcgtgctggtggtggctctccttgtcattttccaggtatgcctgtgtcaagatgaggtcacggacgattacatcggagacaacaccacagtggactacactttgttcgagtctttgtgctccaagaaggacgtgcggaactttaaagcctggttcctccctatcatgtactccatcatttgtttcgtgggcctactgggcaatgggctggtcgtgttgacctatatctatttcaagaggctcaagaccatgaccgatacctacctgctcaacctggcggtggcagacatcctcttcctcctgacccttcccttctgggcctacagcgcggccaagtcctgggtcttcggtgtccacttttgcaagctcatctttgccatctacaagatgagcttcttcagtggcatgctcctacttctttgcatcagcattgaccgctacgtggccatcgtccaggctgtctcagctcaccgccaccgtgcccgcgtccttctcatcagcaagctgtcctgtgtgggcatctggatactagccacagtgctctccatcccagagctcctgtacagtgacctccagaggagcagcagtgagcaagcgatgcgatgctctctcatcacagagcatgtggaggcctttatcaccatccaggtggcccagatggtgatcggctttctggtccccctgctggccatgagcttctgttaccttgtcatcatccgcaccctgctccaggcacgcaactttgagcgcaacaaggccatcaaggtgatcatcgctgtggtcgtggtcttcatagtcttccagctgccctacaatggggtggtcctggcccagacggtggccaacttcaacatcaccagtagcacctgtgagctcagtaagcaactcaacatcgcctacgacgtcacctacagcctggcctgcgtccgctgctgcgtcaaccctttcttgtacgccttcatcggcgtcaagttccgcaacgatctcttcaagctcttcaaggacctgggctgcctcagccaggagcagctccggcagtggtcttcctgtcggcacatccggcgctcctccatgagtgtggaggccgagaccaccaccaccttctccccataggcgactcttctgcctggactagagggacctctcccagggtccctggggtggggatagggagcagatgcaatgactcaggacatccccccgccaaaagctgctcagggaaaagcagctctcccctcagagtgcaagcccctgctccagaagatagcttcaccccaatcccagctacctcaaccaatgccaaaaaaagacagggctgataagctaacaccagacagacaacactgggaaacagaggctattgtcccctaaaccaaaaactgaaagtgaaagtccagaaactgttcccacctgctggagtgaaggggccaaggagggtgagtgcaaggggcgtgggagtggcctgaagagtcctctgaatgaaccttctggcctcccacagactcaaatgctcagaccagctcttccgaaaaccaggccttatctccaagaccagagatagtggggagacttcttggcttggtgaggaaaagcggacatcagctggtcaaacaaactctctgaacccctccctccatcgttttcttcactgtcctccaagccagcgggaatggcagctgccacgccgccctaaaagcacactcatcccctcacttgccgcgtcgccctcccaggctctcaacaggggagagtgtggtgtttcctgcaggccaggccagctgcctccgcgtgatcaaagccacactctgggctccagagtggggatgacatgcactcagctcttggctccactgggatgggaggagaggacaagggaaatgtcaggggcggggagggtgacagtggccgcccaaggcccacgagcttgttctttgttctttgtcacagggactgaaaacctctcctcatgttctgctttcgattcgttaagagagcaacattttacccacacacagataaagttttcccttgaggaaacaacagctttaaaagaaaaagaaaaaaaaagtctttggtaaatggcaaaaaaaaaaaaaaaaaaaaaaaaa

SEQ ID NO: 483 - DNA, 6549 bp, Homo sapiens
gcttggagccgccgcacccgggacggtgcgtagcgctggaagtccggccttccgagagctagctgtccgccgcggcccccgcacgccgggcagccgtccctcgccgcctcgggcgcgccaccatggggccccggctcagcgtctggctgctgctgctgcccgccgcccttctgctccacgaggagcacagccgggccgctgcgaagggtggctgtgctggctctggctgtggcaaatgtgactgccatggagtgaagggacaaaagggtgaaagaggcctcccggggttacaaggtgtcattgggtttcctggaatgcaaggacctgaggggccacagggaccaccaggacaaaagggtgatactggagaaccaggactacctggaacaaaagggacaagaggacctccgggagcatctggctaccctggaaacccaggacttcccggaattcctggccaagacggcccgccaggccccccaggtattccaggatgcaatggcacaaagggggagagagggccgctcgggcctcctggcttgcctggtttcgctggaaatcccggaccaccaggcttaccagggatgaagggtgatccaggtgagatacttggccatgtgcccgggatgctgttgaaaggtgaaagaggatttcccggaatcccagggactccaggcccaccaggactgccagggcttcaaggtcctgttgggcctccaggatttaccggaccaccaggtcccccaggccctcccggccctccaggtgaaaagggacaaatgggcttaagttttcaaggaccaaaaggtgacaagggtgaccaaggggtcagtgggcctccaggagtaccaggacaagctcaagttcaagaaaaaggagacttcgccaccaagggagaaaagggccaaaaaggtgaacctggatttcaggggatgccaggggtcggagagaaaggtgaacccggaaaaccaggacccagaggcaaacccggaaaagatggtgacaaaggggaaaaagggagtcccggttttcctggtgaacccgggtacccaggactcataggccgccagggcccgcagggagaaaagggtgaagcaggtcctcctggcccacctggaattgttataggcacaggacctttgggagaaaaaggagagaggggctaccctggaactccggggccaagaggagagccaggcccaaaaggtttcccaggactaccaggccaacccggacctccaggcctccctgtacctgggcaggctggtgcccctggcttccctggtgaaagaggagaaaaaggtgaccgaggatttcctggtacatctctgccaggaccaagtggaagagatgggctcccgggtcctcctggttcccctgggccccctgggcagcctggctacacaaatggaattgtggaatgtcagcccggacctccaggtgaccagggtcctcctggaattccagggcagccaggatttataggcgaaattggagagaaaggtcaaaaaggagagagttgcctcatctgtgatatagacggatatcgggggcctcccgggccacagggacccccgggagaaataggtttcccagggcagccaggggccaagggcgacagaggtttgcctggcagagatggtgttgcaggagtgccaggccctcaaggtacaccagggctgataggccagccaggagccaagggggagcctggtgagttttatttcgacttgcggctcaaaggtgacaaaggagacccaggctttccaggacagcccggcatgacagggagagcgggttctcctggaagagatggccatccgggtcttcctggccccaagggctcgccgggttctgtaggattgaaaggagagcgtggcccccctggaggagttggattcccaggcagtcgtggtgacaccggcccccctgggcctccaggatatggtcctgctggtcccattggtgacaaaggacaagcaggctttcctggaggccctggatccccaggcctgccaggtccaaagggtgaaccaggaaaaattgttcctttaccaggcccccctggagcagaaggactgccggggtccccaggcttcccaggtccccaaggagaccgaggctttcccggaaccccaggaaggccaggcctgccaggagagaagggcgctgtgggccagccaggcattggatttccagggccccccggccccaaaggtgttgacggcttacctggagacatggggccaccggggactccaggtcgcccgggatttaatggcttacctgggaacccaggtgtgcagggccagaagggagagcctggagttggtctaccgggactcaaaggtttgccaggtcttcccggcattcctggcacacccggggagaaggggagcattggggtaccaggcgttcctggagaacatggagcgatcggaccccctgggcttcaggggatcagaggtgaaccgggacctcctggattgccaggctccgtggggtctccaggagttccaggaataggcccccctggagctaggggtccccctggaggacagggaccaccggggttgtcaggccctcctggaataaaaggagagaagggtttccccggattccctggactggacatgccgggccctaaaggagataaaggggctcaaggactccctggcataacgggacagtcggggctccctggccttcctggacagcagggggctcctgggattcctgggtttccaggttccaagggagaaatgggcgtcatggggacccccgggcagccgggctcaccaggaccagtgggtgctcctggattaccgggtgaaaaaggggaccatggctttccgggctcctcaggacccaggggagaccctggcttgaaaggtgataagggggatgtcggtctccctggcaagcctggctccatggataaggtggacatgggcagcatgaagggccagaaaggagaccaaggagagaaaggacaaattggaccaattggtgagaagggatcccgaggagaccctgggaccccaggagtgcctggaaaggacgggcaggcaggacagcctgggcagccaggacctaaaggtgatccaggtataagtggaaccccaggtgctccaggacttccgggaccaaaaggatctgttggtggaatgggcttgccaggaacacctggagagaaaggtgtgcctggcatccctggcccacaaggttcacctggcttacctggagacaaaggtgcaaaaggagagaaagggcaggcaggcccacctggcataggcatcccagggctgcgaggtgaaaagggagatcaagggatagcgggtttcccaggaagccctggagagaagggagaaaaaggaagcattgggatcccaggaatgccagggtccccaggccttaaagggtctcccgggagtgttggctatccaggaagtcctgggctacctggagaaaaaggtgacaaaggcctcccaggattggatggcatccctggtgtcaaaggagaagcaggtcttcctgggactcctggccccacaggcccagctggccagaaaggggagccaggcagtgatggaatcccggggtcagcaggagagaagggtgaaccaggtctaccaggaagaggattcccagggtttccaggggccaaaggagacaaaggttcaaagggtgaggtgggtttcccaggattagccgggagcccaggaattcctggatccaaaggagagcaaggattcatgggtcctccggggccccagggacagccggggttaccgggatccccaggccatgccacggaggggcccaaaggagaccgcggacctcagggccagcctggcctgccaggacttccgggacccatggggcctccagggcttcctgggattgatggagttaaaggtgacaaaggaaatccaggctggccaggagcacccggtgtcccagggcccaagggagaccctggattccagggcatgcctggtattggtggctctccaggaatcacaggctctaagggtgatatggggcctccaggagttccaggatttcaaggtccaaaaggtcttcctggcctccagggaattaaaggtgatcaaggcgatcaaggcgtcccgggagctaaaggtctcccgggtcctcctggccccccaggtccttacgacatcatcaaaggggagcccgggctccctggtcctgagggccccccagggctgaaagggcttcagggactgccaggcccgaaaggccagcaaggtgttacaggattggtgggtatacctggacctccaggtattcctgggtttgacggtgcccctggccagaaaggagagatgggacctgccgggcctactggtccaagaggatttccaggtccaccaggccccgatgggttgccaggatccatggggcccccaggcaccccatctgttgatcacggcttccttgtgaccaggcatagtcaaacaatagatgacccacagtgtccttctgggaccaaaattctttaccacgggtactctttgctctacgtgcaaggcaatgaacgggcccatggccaggacttgggcacggccggcagctgcctgcgcaagttcagcacaatgcccttcctgttctgcaatattaacaacgtgtgcaactttgcatcacgaaatgactactcgtactggctgtccacccctgagcccatgcccatgtcaatggcacccatcacgggggaaaacataagaccatttattagtaggtgtgctgtgtgtgaggcgcctgccatggtgatggccgtgcacagccagaccattcagatcccaccgtgccccagcgggtggtcctcgctgtggatcggctactcttttgtgatgcacaccagcgctggtgcagaaggctctggccaagccctggcgtcccccggctcctgcctggaggagtttagaagtgcgccattcatcgagtgtcacggccgtgggacctgcaattactacgcaaacgcttacagcttttggctcgccaccatagagaggagcgagatgttcaagaagcctacgccgtccaccttgaaggcaggggagctgcgcacgcacgtcagccgctgccaagtctgtatgagaagaacataatgaagcctgactcagctaatgtcacaacatggtgctacttcttcttctttttgttaacagcaacgaaccctagaaatatatcctgtgtacctcactgtccaatatgaaaaccgtaaagtgccttataggaatttgcgtaactaacacaccctgcttcattgacctctacttgctgaaggagaaaaagacagcgataagctttcaatagtggcataccaaatggcacttttgatgaaataaaatatcaatattttctgcaatccaatgcactgatgtgtgaagtgagaactccatcagaaaaccaaagggtgctaggaggtgtgggtgccttccatactgtttgcccattttcattcttgtattataattaattttctacccccagagataaatgtttgtttatatcactgtctagctgtttcaaaatttaggtcccttggtctgtacaaataatagcaatgtaaaaatggttttttgaacctccaaatggaattacagactcagtagccatatcttccaaccccccagtataaatttctgtctttctgctatgtgtggtactttgcagctgcttttgcagaaatcacaattttcctgtggaataaagatggtccaaaaatagtcaaaaattaaatatatatatatattagtaatttatatagatgtcagcaattaggcagatcaaggtttagtttaacttccactgttaaaataaagcttacatagttttcttcctttgaaagactgtgctgtcctttaacataggtttttaaagactaggatattgaatgtgaaacatccgttttcattgttcacttctaaaccaaaaattatgtgttgccaaaaccaaacccaggttcatgaatatggtgtctattatagtgaaacatgtactttgagcttattgtttttattctgtattaaatattttcagggttttaaacactaatcacaaactgaatgacttgacttcaaaagcaacaaccttaaaggccgtcatttcattagtattcctcattctgcatcctggcttgaaaaacagctctgttgaatcacagtatcagtattttcacacgtaagcacattcgggccatttccgtggtttctcatgagctgtgttcacagacctcagcagggcatcgcatggaccgcaggagggcagattcggaccactaggcctgaaatgacatttcactaaaagtctccaaaacatttctaagactactaaggccttttatgtaatttctttaaatgtgtatttcttaagaattcaaatttgtaataaaactatttgtataaaaattaagcttttattaatttgttgctagtattgccacagacgcattaaaagaaacttactgcacaagctgctaataaatttgtaagctttgcataccttaaaaaaaaaaaaaaaaaa

SEQ ID NO: 484 - DNA, 6264 bp, Homo sapiens
gagtgtggctgcagtgcgccgggacaccagggctccgcgctccgcactcaagaggctcccgcgtcccaacccctcgcgcccgcgcgttcgcggatccaggccgaggaccgaaaggggccgcccgagcccccggggccggcgcccagagagcccagcaaggccggccgccctgccggtgtgccgccggcgggtgcttctggaagggccaatgcgttcgggcagcagcccctgaagccgagcccgaggctaagtgggactgaccggggcccagagtggacgaaccgccagcatggggagagaccagcgcgcggtggccggccctgccctacggcggtggctgctgctggggacagtgaccgtggggttcctcgcccagagcgtcttggcgggtgtgaagaagtttgatgtgccgtgtggaggaagagattgcagtgggggctgccagtgctaccctgagaaaggtggacgtggtcagcctgggccagtgggcccccaggggtacaatgggccaccaggattacaaggattcccgggactgcagggacgtaaaggagacaagggtgaaaggggagcccccggagtaacgggacccaagggcgacgtgggagcaagaggcgtttctggattccctggtgccgatggaattcctggacacccggggcaaggtgggcccaggggaaggccgggctacgatggctgcaacggaacccagggagactcaggtccacaggggccccccggctctgaggggttcaccgggcctcccgggccccaaggaccaaaagggcagaaaggtgagccttatgcactgcctaaagaggagcgcgacagatatcggggtgaacctggagagcctggattggtcggtttccagggacctcccggccgccctgggcatgtgggacagatgggtccagttggagctccagggagaccaggaccacctggaccccctggaccaaaaggacagcaaggcaacagaggacttggtttctacggagttaagggtgaaaagggtgacgtagggcagccgggacccaacgggattccatcagacaccctccaccccatcatcgcgcccacaggagtcaccttccacccagatcagtacaagggtgaaaaaggcagtgagggggaaccaggaataagaggcatttccttgaagggagaagaaggaatcatgggctttcctggactgaggggttaccctggcttgagtggtgaaaaaggatcaccaggacagaagggaagccgaggcctggatggctatcaagggcctgatggaccccggggacccaagggagaagccggagacccagggccccctggactacctgcctactcccctcacccttccctagcaaaaggtgccagaggtgacccgggattcccaggggcccaaggggagccaggaagccagggtgagccaggagacccgggcctcccaggtccccctggcctctccatcggagatggagatcagaggagaggcctgccgggtgagatgggacccaagggcttcatcggagaccccggcatccctgcgctctacgggggcccacctggacctgatggaaagcgagggcctccaggaccccccgggctccctggaccacctggacctgatggcttcctgtttgggctgaaaggagcaaaaggaagagcaggcttccctgggcttcccggctcccctggagcccgcggaccaaaggggtggaaaggtgacgctggggaatgcagatgtacagaaggcgacgaagctatcaaaggtcttccgggactgccaggacccaagggcttcgcaggcatcaacggggagccggggaggaaaggggacagaggagaccccggccaacacggcctccctgggttcccagggctcaagggagtgcctggcaacattggtgctcccggacccaaaggagcaaaaggagattccagaacaatcacaaccaaaggtgagcggggacagcccggcgtcccaggtgtgcccgggatgaaaggtgacgatggcagcccaggccgcgatgggctcgatggattccccggcctcccaggccctcccggtgatggcatcaagggccctccaggggacccaggctatccaggaatacctggaacgaagggtactccaggagaaatgggccccccaggactgggccttcccggcctcaaaggccaacgtggtttccctggagacgccggcttacctggaccaccaggcttcctgggccctcctggccccgcagggaccccaggacaaatagattgtgacacagatgtgaaaagggccgttggaggtgacagacaggaggccatccagccaggttgcataggagggcccaagggattgccaggcctgccaggacccccaggccccacaggtgccaaaggcctccgaggaatcccaggcttcgcaggagctgatggaggaccagggcccaggggcttgccaggagacgcaggtcgtgaagggttcccaggacccccagggttcataggaccccgaggatccaaaggtgcagtgggcctccctggcccagatggatccccaggtcccatcggcctgccagggccagatgggccccctggggaaaggggcctccctggagaagtcctgggagctcagcccgggccacggggagatgctggtgtgcctggacagcctgggcttaaaggccttcccggagacagaggcccccctggattcagaggaagccaagggatgcctgggatgccagggctgaagggccagccaggcctcccaggaccttccggccagccaggcctgtatgggcctccaggactgcatggattcccaggagctcctggccaagaggggcccttggggctgccaggaatcccaggccgtgaaggtctgcctggtgatagaggggaccctggggacacaggcgctcctggccctgtgggcatgaaaggtctctctggtgacagaggagatgctggcttcacaggggagcaaggccatccaggaagccctggatttaaaggaattgatggaatgcctgggacccccgggctaaaaggagatagaggctcacctgggatggatggtttccaaggcatgcctggactcaaagggagacccgggtttccagggagcaaaggcgaggctggatttttcggaatacccggtctgaagggtctggctggtgagccaggttttaaaggcagccgaggggaccctgggcccccaggaccacctcctgtcatcctgccaggaatgaaagacattaaaggagagaaaggagatgaagggcctatggggctgaaaggatacctgggcgcaaaaggtatccaaggaatgccaggcatcccagggctgtcaggaatccctgggctgcctgggaggcccggccacatcaaaggagtcaagggagacatcggagtccccggcatccccggtttgccaggattccctggggtggctggcccccctggaattacgggattcccaggattcataggaagccggggtgacaaaggtgccccagggagagcaggcctgtatggcgagattggcgcgactggtgatttcggtgacatcggggacactataaatttaccaggaagaccaggcctgaagggggagcggggcaccactggaataccaggtctgaagggattctttggagagaagggaacagaaggtgacatcggcttccctgggataacaggcgtgactggagtccaaggccctcctggacttaaaggacaaacaggctttccagggctgactgggcctccagggtcgcagggagagctggggcggattggactgcctggtggcaaaggagatgatggctggccgggagctccgggcttaccaggttttccgggactccgtgggatccgcggcttacacggcttgccaggcaccaagggctttccaggatccccaggttctgacatccacggagacccaggcttcccaggccctcctggggaaagaggtgacccaggagaggccaacacccttccaggccctgtgggagtcccaggacagaaaggagaccaaggagctccaggggaacgaggcccacctgggagcccaggacttcaggggttcccaggcatcacacccccttccaacatctctggggcacctggtgacaaaggggcgccagggatatttggcctgaaaggttatcggggcccaccagggccaccaggttctgctgctcttcctggaagcaaaggtgacacagggaacccaggagctccaggaaccccagggaccaaaggatgggccggggactccgggccccagggcaggcctggtgtgtttggtctcccaggagaaaaagggcccaggggtgaacaaggcttcatggggaacactggacccaccggggcggtgggcgacagaggccccaagggacccaagggagacccaggattccctggtgcccccgggactgtgggagcccccgggattgcaggaatcccccagaagattgccgtccaaccagggacagtgggtccccaggggaggcgaggcccccctggggcaccgggggagatggggccccagggcccccccggagaaccaggttttcgtggggctccagggaaagctgggccccaaggaagaggtggtgtgtctgctgttcccggcttccggggagatgaaggacccataggccaccaggggccgattggccaagaaggtgcaccaggccgtccagggagcccgggcctgccgggtatgccaggccgcagcgtcagcatcggctacctcctggtgaagcacagccagacggaccaggagcccatgtgcccagtgggcatgaacaaactctggagtggatacagcctgctgtacttcgagggccaggagaaggcgcacaaccaggacctggggctggcgggctcctgcctggcgcggttcagcaccatgcccttcctgtactgcaaccctggtgatgtctgctactatgccagccggaacgacaagtcctactggctctctaccactgcgccgctgcccatgatgcccgtggccgaggacgagatcaagccctacatcagccgctgttctgtgtgtgaggccccggccatcgccatcgcggtccacagtcaggatgtctccatcccacactgcccagctgggtggcggagtttgtggatcggatattccttcctcatgcacacggcggcgggagacgaaggcggtggccaatcactggtgtcaccgggcagctgtctagaggacttccgcgccacaccattcatcgaatgcaatggaggccgcggcacctgccactactacgccaacaagtacagcttctggctgaccaccattcccgagcagagcttccagggctcgccctccgccgacacgctcaaggccggcctcatccgcacacacatcagccgctgccaggtgtgcatgaagaacctgtgagccggcgcgtgccaggaagggccattttggtgcttattcttaacttattacctcaggtgccaacccaaaaattggttttatttttttcttaaaaaaaaaaaagtctaccaaaggaatttgcatccagcagcagcacttagacctgccagccactgtcaccgagcgggtgcaagcactcggggtccctggagggcaagccctgcccacagaaagccaggagcagccctggcccccatcagccctgctagacgcaccgcctgaaggcacagctaaccacttcgcacacacccatgtaaccactgcactttccaatgccacagacaactcacattgttcaactcccttctcggggtgggacagacgagacaacagcacacaggcagccagccgtggccagaggctcgaggggctcagggcctcaggcacccgtccccacacgagggccccgtgggtgggcctggccctgctttctacgccaatgttatgccagctccatgttctcccaaataccgttgatgtgaattattttaaaggcaaaaccgtgctctttattttaaaaaacactgataatcacactgcggtaggtcattcttttgccacatccctatagaccactgggtttggcaaaactcaggcagaagtggagacctttctagacatcattgtcagccttgctacttgaaggtacaccccatagggtcggaggtgctgtccccactgccccacgttgtccctgagatttaacccctccactgctgggggtgagctgtactcttctgactgccccctcctgtgtaacgactacaaaataaaacttggttctgaatatttttaaa

SEQ ID NO: 485 - DNA, 6595 bp, Homo sapiens
gctccctgggctgctggtcttctttaccttccagctgctcacagaacagagagtttctacatacaagcagaagatgtgaaaatattgggaataaataaagtatatgcttataaacaagttgtggctgctcctggttacgttgtgcctgaccgaggaactggcagcagcgggagagaagtcttatggaaagccatgtgggggccaggactgcagtgggagctgtcagtgttttcctgagaaaggagcgagaggacgacctggaccaattggaattcaaggcccaacaggtcctcaaggattcactggctctactggtttatcgggattgaaaggagaaaggggtttcccaggccttctgggaccttatggaccaaaaggagataagggtcccatgggagttcctggctttcttggcatcaatgggattccgggccaccctggacaaccaggccccagaggcccacctggtctggatggctgtaatggaactcaaggagctgttggatttccaggccctgatggctatcctgggcttctcggaccacccgggcttcctggtcagaaaggatcaaaaggtgaccctgtccttgctccaggtagtttcaaaggaatgaagggggatcctgggctgcctggactggatggaatcactggcccacaaggagcacccggatttcctggagctgtaggacctgcaggaccaccaggattacaaggtcctccagggcctcctggtcctcttggtcctgatgggaatatggggctaggttttcaaggagagaaaggagtcaagggggatgttggcctccctggcccagcaggacctccaccatctactggagagctggaattcatgggattccccaaagggaagaaaggatccaagggtgaaccagggcctaagggttttccaggcataagtggccctccaggcttcccgggccttggaactactggagaaaagggagaaaagggagaaaagggaatccctggtttgccaggacctaggggtcccatgggttcagaaggagtccaaggccctccagggcaacagggcaagaaagggaccctgggatttcctgggcttaatggattccaaggaattgagggtcaaaagggtgacattggcctgccaggcccagatgttttcatcgatatagatggtgctgtgatctcaggtaatcctggagatcctggtgtacctggcctcccaggccttaaaggagatgaaggcatccaaggcctacgtggcccttctggtgtccctggattgccagcattatcaggtgtcccaggagccctagggcctcagggatttccagggctgaagggggaccaaggaaacccaggccgtaccacaattggagcagctggcctccctggcagagatggtttgccaggcccaccaggtccaccaggcccacctagtccagaatttgagactgaaactctacacaacaaagagtcagggttccctggtctccgaggagaacaaggtccaaaaggaaacctaggcctcaaaggaataaaaggagactcaggtttctgtgcttgtgacggtggtgttcccaacactggaccacccggggaaccaggcccacctggtccatggggtctcataggccttccaggccttaaaggagccagaggagatcgaggctctgggggtgcacagggcccagcaggggctccaggcttagttgggcctctgggtccttcaggacccaaaggaaagaagggggaaccaattctcagtacaatccaaggaatgccaggagatcggggtgattctggctcccagggcttccgtggtgtaataggagaaccaggcaaggacggagtaccaggtttaccaggtctgccaggccttccgggtgatggtggacagggcttcccaggtgaaaaggggttacctggacttcctggtgaaaaaggccatcctggtccacctggcctcccaggaaatgggttaccaggacttcctggaccccgtgggcttcctggagataaaggcaaggatggattaccgggacaacaaggccttcccggatctaagggaatcaccctgccctgtattattcctgggtcatacggtccatcaggatttccaggcactcccggattcccaggccctaaagggtctcgaggcctccctgggaccccaggccagcctgggtcaagtggaagtaaaggagagccagggagtccaggattggttcatcttcctgaattaccaggatttcctggacctcgtggggagaagggcttgcctgggtttcctgggctccctggaaaagatggcttgcctgggatgattggcagtccaggcttacctggttccaagggagccactggtgacatctttggtgctgaaaatggtgctccgggggaacaaggcctacaaggattaacagggcacaaaggatttcttggagactctggccttccaggactcaagggtgtgcacgggaagcctggcttactaggccccaaaggtgagcggggcagccctgggacaccaggacaggtgggacagccaggcaccccaggatctagtggtccatatggcatcaagggcaaatctgggctcccaggagcaccaggcttcccaggcatctcaggacatcctggaaagaaaggaacaagaggcaagaaaggtcctcctggatcaattgtaaagaaagggctgccagggctaaaaggccttcctggaaatccaggcctagtaggactgaaaggaagcccaggctctccaggggtcgctgggttgccagccctctctggacccaagggagagaaggggtctgttggattcgtaggttttccaggaataccaggtctgcctggtattcctggaacaagaggattaaaaggaattccaggatcaactggaaaaatgggaccatctggacgtgctggtactcctggtgaaaagggagacagaggcaatccggggccagtcggaatacctagtccaagacgtccaatgtcaaacctttggctcaaaggagacaaaggctctcaaggctcagccggatccaatggatttcctgggccaagaggtgacaaaggagaggctggtcgacctggaccaccaggcctacctggagctcctggcctcccaggcattatcaaaggagttagtggaaagccagggccccctggcttcatgggaatccggggcttacctggcctgaaggggtcctctgggatcacaggtttcccaggaatgccaggagaaagtggttcacaaggtatcagagggtcgcctggactcccaggagcatctggtctcccaggcctgaaaggagacaacggccagacagttgaaatttccggtagcccaggacccaagggacagcctggcgaatctggttttaaaggcacaaaaggaagagatggactaataggcaatataggcttccctggaaacaaaggtgaagatggaaaagttggtgtttctggagatgttggccttcctggagctccaggatttccaggagttgccggcatgagaggagaaccaggacttccaggttcttctggtcaccaaggggcaattgggcctctaggatcccccggattaataggacccaaaggcttccctggatttcctggtttacatggactgaatgggcttccgggcaccaagggtacccatggcactccaggacctagtatcaccggtgtgcctgggcctgctggtctccctggacccaaaggagaaaaaggatatccaggaattggcatcggagctccagggaagccgggcctgagagggcaaaaaggtgatcgaggtttcccaggtctccagggccctgctggtctccccggtgccccaggcatctccttgccctcactcatagcaggacagcctggtgaccccgggcgaccaggcctagatggagaacgaggccgcccaggccccgctggacccccaggtccccctgggccatcctcgaatcaaggcgacaccggagaccctggcttccctggaattcctggacctaaagggcctaagggagaccaaggaattccaggtttttctggcctccctggagagctaggactgaaaggcatgagaggtgagcctggcttcatggggactccaggcaaggttgggccacctggagacccaggatttcccggaatgaaggggaaggcagggccaagaggctcttctggcctccaaggtgatcctggacaaacaccaactgcagaagctgtccaggttcctcctggacccttgggtctaccagggatcgatggcatccctggcctcactggggaccctggggctcaaggccctgtaggcctacaaggctccaaaggtttacctggcatccccggtaaagatggccccagtgggctcccaggcccacctggggctcttggtgatcctggtctgcctggactgcaaggccctccaggatttgaaggagctccagggcagcaaggccccttcgggatgcctggaatgcctggccagagcatgagagtgggctacacgttggtaaagcacagccagtcggaacaggtgcccccgtgtcccatcgggatgagccagctgtgggtggggtacagcttactgtttgtggaggggcaagagaaagcccacaaccaggacctgggctttgctggctcctgtctgccccgcttcagcaccatgcccttcatctactgcaacatcaacgaggtgtgccactatgccaggcgcaatgataaatcttactggctctccactaccgcccctatccccatgatgcccgtcagccagacccagattccccagtacatcagccgctgctctgtgtgtgaggcaccctcgcaagccattgctgtgcacagccaggacatcaccatcccgcagtgccccctgggctggcgcagcctctggattgggtactctttcctcatgcacactgccgctggtgccgagggtggaggccagtccctggtctcacctggctcctgcctagaggactttcgggccactcctttcatcgaatgcagtggtgcccgaggcacctgccactactttgcaaacaagtacagtttctggttgaccacagtggaggagaggcagcagtttggggagttgcctgtgtctgaaacgctgaaagctgggcagctccacactcgagtcagtcgctgccaggtgtgtatgaaaagcctgtagggtggcacctgccactctgccccttgccctcccctgcccctcacaacagtcacctcacaaacctgaatggtctgaagaaggaaggcctgagcccctttgcctgtcaagttgtacattggagtctcatttgggctagactaccggacactcgtcaccccagccctcgggtccatagagatgagcccaccctgctgagatctgctgtcctgtttctgtcaagctggtgctactgtttgatttggatgattgtgtgactattcatggctacctcagaaagatttgatgggccacaactgtcttagactgctagctttctccttaccgtcttgatcggaaagctcttcctaatcgctaatcagtcatttcttcatgtacagaggtcagcacacattatttggcttaaaccagaacccagtgtttccacacttaaattctctaaccgaatattcatggatggctcaagtctgcacagagcaagtcctcactcttcaaggaggcccactgtgtctaggcaggcaagagaattgaaatgaggtgccacccagtagcccagagtgagctttagctctctctagaatgagcaagactgggccccacatggcttagagaggcttgaaggccagcagctgggttgggggtggtggtcattaatggcatatggtcctagacaaaccatctcctccttgccggctccccctccagccagagacagaggatgtggcctggttcaaagtaaagcagaggatgcaacaaatgtggccaagcctatcaaaggaaatgagaatgacagccttttttcctgggccagaagtagaggggtgggtgcgtaaggatgtgtgagttttgcttttgactccaggaacaaaaaggtaaatcccacatcccagtttctcagaagtccctgtttattccaaatgccatccagatgtgtgcaatgtggcaaactgaagctgcacagtgttggtttccttgtattctgaggatgttaaagactttgttaaatggttatccaattgctctttcacaggtagcctattaaactattttaatatgtttttttaaacctcataaaaatctagcacactcttctcttgagcagttagcagacctaaagcaagcctgaattggctatgcagtacattgtattctgtttgggggaatttgttttagccattttctttaattaccagttttccagaacactcttagctatgttgacatgaggcagttccttccaggtgattctgtttccttaagtattatataaactgtgccaatacagacaaagcataatcaatataatctgaattattgttatctttacctcctgagtaataagcatggtgtcagttttgtacatagcaaataaaataaatgaaatctgaacatgtgaaaaaaaaaaaaaaaaaaaaaaaa

SEQ ID NO: 486 - DNA, 2485 bp, Homo sapiens
gccatggccgggccgcgcgcgtgcgccccgctcctgctcctgctcctgctcggggagcttctggcggccgccggggcgcagagagtgggactccccggcccccccggccccccagggccgcccgggaagcccggccaggacggcattgacggagaagctggtcctccaggtctgcctgggcccccgggaccaaagggggccccaggaaagccggggaaaccaggagaggctgggctgccgggactgccgggtgtggatggtctgactggacgagatggaccccctggacccaagggtgcccctggggaacggggaagtctgggacccccggggccgcccgggctggggggcaaaggcctccctggaccccccggagaggcaggagtgagcggccccccaggtgggatcggcctccgcggccccccgggaccttctggactccccggcctccctggtcccccaggacctcccggaccccctggacacccaggagtcctccctgaaggcgctactgaccttcagtgcccaagtatctgcccgccaggtcccccagggccccctggaatgccagggttcaagggacccactggctacaaaggcgagcagggggaagtcggcaaggacggcgagaagggtgaccctggcccccctgggcccgccggcctcccgggcagcgtggggctgcagggcccccggggattacgaggactgccagggccactcgggccccctggggaccggggtcccattgggttccgagggccgcctgggatcccaggagcgcctgggaaagcgggtgaccgaggcgagaggggcccagaagggttccgcggccccaagggtgacctcggcagacctggtcccaagggaacccccggagtggccgggccaagcggagagccgggcatgccgggcaaggacggccagaatggcgtgccaggactcgatggccagaagggagaggctggtcgcaacggtgctccgggagagaagggccccaacgggctgccgggcctccctggacgagcggggtccaaaggcgagaagggagaacggggcagagctggggagctgggtgaggccggcccctctggagagccaggcgtccctggagatgctggcatgcctggggagcgcggtgaggctggccaccggggctcagcgggggccctcggcccacaaggccctcccggagcccctggtgtccgaggcttccagggccagaagggcagcatgggagaccccggccttccaggcccccagggcctccgaggtgacgtgggcgaccggggtccgggaggtgccgcaggccctaagggagaccagggtattgcaggttccgacggtcttcctggggataaaggagaactgggtcccagcggcctggtcggacccaaaggagagtctggcagtcgaggggagctgggccccaaaggcacccagggtcccaacggcaccagcggtgttcagggtgtccccgggccccccggtcctctgggcctgcagggcgtcccgggtgttcctggcatcacggggaagccgggagttccggggaaggaggccagcgagcagcgcatcagggagctgtgtggggggatgatcagcgaacaaattgcacagttagccgcgcacctaaggaagcctttggcacccgggtccattggtcggcccggtccagctggcccccctgggcccccaggacccccaggctccattggtcaccctggcgctcgaggaccccctggataccgcggtcccactggggagctgggagaccccgggcccagaggaaaccagggtgacagaggagacaaaggcgcggcaggagcagggctggacgggcctgaaggagaccaggggccccaaggaccccaaggcgtgcccggcaccagcaaggacggccaggacggtgctcccggcgagcctgggcctcccggagatcctgggcttccaggtgccattggggcccaggggacaccggggatctgcgacacctcagcctgccaaggagccgtgttaggaggggtcggggagaaatcaggctctcgaagctcataaaattcaacgtgaggaagcaagtgacaaggacgcccgaagcacagtggacggtcatgaaggagcgggggtgtggcaggcgggtgacgtccaggagagggagcgcccctggctgcccctcggccgccgactggacgcgcgggccttgccagcgagcaccctcatcgggctgtcgcctgacagcatacctcaaaaggccctagctaataaacctgtaagcccagcatttgagagaaggtagggtgtgtatatataaaaggttgtgtacaactccacgaggtgaaaaatattcagtaacttgtttacatagcatttgtgtaaagactatgatctcatcccaataaaatgatatattaaaccttcagattaatgactggctacagagtaacaaaaaataaagaatttaatgtacagtaaattctctcccata

SEQ ID NO: 487 - DNA, 5422 bp, Homo sapiens
aggttacataaggcagccgcgggtggaggcagcagaggcgagcgcacgtccgtcgagggggaaaggggcgtggggaggcggccggggcggccggtatcccccgggcgtgagtgcgcagcgcgcgggggagcgcagggcgcggcggagtcgggtttcagagcgcgggtgactcggggcgcgggccgggagccgggattctgcccgccgccgccgctgccgagcgccgcctttgttccctgcaggaagggcgagcgcggcggccagcgctcagcgacccttcgtcctccgctaagctccaacgctctgctcgactagccgcgcgccttccggggctccgcagacccgcgagatggcaccaaggaggaacaacgggcagtgctggtgtctgctgatgctgctctcggtctccacgcccctccctgctgtcacccagacccgcggtgcgacagagactgcttcccagggtcacctggacctcacgcagctcatcggtgtcccgctgccctcgtccgtatcctttgtcacaggctatggtggcttcccggcctacagtttcgggcctggtgccaatgttggccgcccagccaggactctcatcccatccaccttcttcagggacttcgccatcagcgtcgtggtgaagcccagcagcacccgtggtggcgtgctcttcgccatcactgacgccttccagaaggtcatctacctgggcctgcggctctcaggtgtggaggacggccaccagcggatcatcctctactacacggagccaggctcccatgtgtcccaagaggctgctgccttctcggtgcctgtgatgacccacaggtggaaccgcttcgccatgattgtccagggtgaggaagtgaccctcctcgtgaactgtgaggagcacagccgcatccccttccagcggtcctcccaggctttggcttttgagtccagcgctggaatcttcatgggcaatgcaggagctacagggctcgagagattcactggctccctccagcagctcaccgtgcaccccgaccccaggactcccgaggagctgtgtgaccctgaagagtcctcggcatctggagagaccagtgggctgcaggaggcagacggagtagctgagatcttagaagccgtcacctacactcaagcctcgcccaaagaagcaaaagttgaacccataaacacacctccaactccatcctccccctttgaagacatggaactttctggtgaacctgtacccgaggggaccctggaaaccaccaacatgagcatcatccagcacagcagccccaaacaagggtctggtgagatcctgaatgacacactggagggggttcattctgtggatggtgaccccattactgacagcggctcaggggctggggccttccttgacattgctgaagaaaagaatttagcagcaacagcagcggggctggccgaggtgcccatcagcactgctggagaagcagaggccagcagtgtgcccaccgggggaccaaccctctctatgtccacggagaacccagaggaaggggtcactccaggtccagataatgaagagcgtttagcagcaacagcagcaggggaggccgaggcactcgccagcatgcctggggaagtggaggccagtggtgtggcccccggggagctggacctctccatgtccgcccagagcctcggggaagaggccactgtgggtccaagcagtgaagacagtttaacaacagctgcagctgcaaccgaagtgtccctcagtacttttgaggatgaggaagccagtggggtccccacagatggcctggctcccctcacagccaccatggcccctgagcgggcagtcacttctggtcctggtgatgaagaagacttggcagcagccacaacagaggagcccctcatcacagctgggggtgaagagtccggcagccctccccctgatgggccaccgctgcccctgcccacagtggctcctgaaagatggatcactccagctcaaagagaacatgtgggaatgaaaggacaggctgggcccaaaggagaaaagggtgatgctggggaggagcttcctggccctcctgaaccttctgggcctgttggacccacggcaggagcagaagcagagggctctggcctaggctggggctcggacgtcggctctggctctggtgacctggtgggcagtgagcagctgctgagaggtcctccaggacccccagggccacctggcttacctgggattccaggaaaaccaggaactgatgttttcatgggaccccctggatctcctggagaggatggacctgctggtgaacctgggcccccgggccctgagggacagcctggagttgatggagccaccggccttcccgggatgaaaggggagaagggagcaagagggcctaatggctcagttggtgaaaagggtgaccctggcaacagaggcttacctggacccccggggaaaaagggacaagctggccctcctggggtcatgggacccccagggcctcctggaccccctgggcccccaggccctggatgcacaatgggacttggattcgaggataccgaaggctctggaagcacccagctattgaatgaacccaaactctccagaccaacggctgcaattggtctcaaaggagagaaaggagaccggggacccaagggagaaagggggatggatggagccagtattgtgggaccccctgggccgagagggccacctgggcacatcaaggtcttgtctaattccttgatcaatatcacccatggattcatgaatttctcggacattcctgagctggtggggcctccggggccggacgggttgcctgggctgccaggatttccaggtcctagaggaccaaaaggtgacactggtttacctggctttccaggactaaaaggagaacagggcgagaagggagagccgggtgccatcctgacagaggacattcctctggaaaggctgatggggaaaaagggtgaacctggaatgcatggagccccaggaccaatggggcccaaaggaccaccaggacataaaggagaatttggccttcccgggcgacctggtcgcccaggactgaatggcctcaagggtaccaaaggagatccaggggtcattatgcagggcccacctggcttacctggccctccaggcccccctgggccacctggagctgtgattaacatcaaaggagccattttcccaatacccgtccgaccacactgcaaaatgccagttgatactgctcatcctgggagtccagagctcatcacttttcacggtgttaaaggagagaaaggatcctggggtcttcctggctcaaagggagaaaaaggcgaccagggagcccagggaccaccaggtcctccacttgatctagcttacctgagacactttctgaacaacttgaagggggagaatggagacaaggggttcaaaggtgaaaaaggagaaaaaggagacattaatggcagcttccttatgtctgggcctccaggcctgcccggaaatccaggcccggctggccaaaaaggggagacagtcgttgggccccaaggacccccaggtgctcctggtctgcctgggccacctggctttggaagacctggtgatcctgggccaccggggcccccggggccaccaggacctccagctatcctgggagcagctgtggcccttccaggtccccctggccctccaggacagccagggcttcccggatccagaaacctggtcacagcattcagcaacatggatgacatgctgcagaaagcgcatttggttatagaaggaacattcatctacctgagggacagcactgagtttttcattcgtgttagagatggctggaaaaaattacagctgggagaactgatccccattcctgccgacagccctccaccccctgcgctttccagcaacccacatcagcttctgcctccaccaaaccctatttcaagtgccaattatgagaagcctgctctgcatttggctgctctgaacatgccattttctggggacattcgagctgattttcagtgcttcaagcaggccagagctgcaggactgttgtccacctaccgagcattcttatcttcccatttgcaagatctgtccaccattgtgaggaaagcagagagatacagccttcccatagtgaacctcaagggccaagtactttttaataattgggactcaattttttctggccacggaggtcagttcaatatgcatattccaatatactcctttgatggtcgagacataatgacagatccttcttggccccagaaagtcatttggcatggctccagcccccatggcgtccgccttgtggataactactgtgaagcatggcgaaccgcggacacagcggtcacgggacttgcctccccgctgagcacggggaagattctggaccagaaagcatacagctgtgctaatcggctaattgtcctatgtatcgaaaacagtttcatgacagacgctaggaagtaatggccttctgatgattcttaaagagttttcaattttttcttatgtgaagagttgacactgaaatctaaaatgtttaattgttgtaaatattacagttttttttttttactacatattctttacaacagcaaccaaagaaaacatacctcaatacactcaaaactgaagacatagaggactcagatcaaagacaaaatctgatccatatattggtgctagattctgcaggaaaccccagcagtgtgaacgcatcccaacataggttaagagcaagttgaaaacaaaggccatggcattctgccactgcatccttcagacagttatatcctccttttaaaccattgttgttgagtgtaagatgtccttcatgttttcttataaagtcagtgtttagaaatgttaccctttctaagttatatacagatcaaatgcttttttctttcacgtacatccatcatttgcaactgctgttcgtacacagaaacaggactgctcaaatgatcctatttgtattttctgatgctatcagactctaatgtttttttccctaaaatattattgccatcatgctttaggaattttatatttttacacaatcatattttagtatggtgtctgtttatgtaactctgacttgctggaaaagttgaaactccaaataatctgaaactagaaaagaaatagcacataattactaccttccccttggcggctctcctccccaacccccaccccacaattttatgacttccatttggcaattgttgaattataactgcgactgaaacaaacaggttcatagagatgaattttctgagaaacatatatctacatgttgtataattggattttttttccatgtaagtgaacataaaaacatcttttccgggtgctttcttcatttga

SEQ ID NO: 488 - DNA, 4797 bp, Homo sapiens
ggcgggagggggcgggaaatcctcggcctcggtggcggtggtggacacgtcgagccgggtagaagtggaggggccgttcgaagagtcgtgagggggtgacgggttaagattcggagagagaggtgctagtggctggacttgacctggaaagaatcttctgctgactctcaacttttcctggaaaaaatggatcattcccaccatatggggatgagctatatggactccaacagtaccatgcaaccttctcaccatcacccaaccacttcagcctcacactcccatggtggaggagacagcagcatgatgatgatgcctatgaccttctactttggctttaagaatgtggaactactgttttccggtttggtgatcaatacagctggagaaatggctggagcttttgtggcagtgtttttactagcaatgttctatgaaggactcaagatagcccgagagagcctgctgcgtaagtcacaagtcagcattcgctacaattccatgcctgtcccaggaccaaatggaaccatccttatggagacacacaaaactgttgggcaacagatgctgagctttcctcacctcctgcaaacagtgctgcacatcatccaggtggtcataagctacttcctcatgctcatcttcatgacctacaacgggtacctctgcattgcagtagcagcaggggccggtacaggatacttcctcttcagctggaagaaggcagtggtagtggatatcacagagcattgccattgacatcaaactctatggcgtggccttatcgattgcagtgggaagttgttgaagacttgaagacgtgattcctgctccaatcatcccttcttgctcctctttgtgcacgtacacacacacacacacacacacacacacacacccctgctcaacagaggtttagtttacagtctctgaactaaagtagtaacctcccaaattgttttttctaataagctgagattcccatttctcttaaggagaagccacccatgagatgtcttttccttctccatcatcttagagccaagttatatgttcttgtctaatccatgtagctttttgttcaatgacttgatcatctgcttcctttttgaatttttaacagatagtaagtaaatttggtggttttttcccctgggtcagtgatggaaaggggttaacttcagccaggattgatggcagctgagggaaattcttgcccaactaaacccagaactcaaacttaacattagaaaataaggtccagggccggacacagtggcccatgcctgtaatcccagcactttggggggccaaggcaggctggatcacctgaggacaggagttcgagaccagtctggccaacatggggaaaccccgtctctactaaaaatacaaaaattagccgggcatggtggtgggcgcctgtaatcccagctactcagaaggctgaggcaggagaatcacttgaacctaggaggcggaggttgcagtgagccaagatggcgccattgcactccagcctgggtgacaagagtgaaactccatctcaaaaaaaaagaaaagaaggtccagcttttggattcaatgagtgggaaatacattgtgcctttctctagatgtgatacgttataccaaaatctttgtagtgtgcagagcggtggtttgagactaaatacaggcttagaacttgcagagtgtgtattcttggatggctgatgcatcgacttgcattcccacttaacactttgattagcatgaacttgccaatcaaaaaatgacaatcaatttgagaaaatagaaatagatatttttaaataaaaccattcacagtttactttgtcttgataccttggtttgtcccagctgaagtgaagcaagagagtttgaattaatttttccattataatgttttcgcatgtctgcctctaaaactgtgattttcaagctttagcgtgcatcagaatcacctgtagggcttgttaaaacactaattgctgggcctcaacccaaaagcccccaaagtggcacttctgagttcctgctgatgttacaagggaccacacttttgagaatctgtgctttaagctaaggaaatattgcctggtgggttggctgcctggtattgggcatggaaatttgaattgctgattggtagatggtgtgtctggacttaactcacgtagtaaatactgctgatcaatacctaatcattccacatttattgagctccacctgtgtgtatgtgtacccaagcacacatgtgtgaagggctatagccaaagtatttttactagcctgtatgaaatcactagtccttatttttaaaggtctatggtttcttggaagtagtttgattgttgagagagacctttgatctgcagtgtaaatctaccagtcatgggccagaagggcaaaagcccagctttctctttggaaagactcaggctgtggtttgttgatggccaggttttcctcaggctccaacaactgtgcttataccaagcagatcctcatcctccatataatcatctttgttattcgtgggggtttaattacattacaagtggccaaaacccctgttctcagtgaagaaccacattggatttgtattctgttcagttgtagtctacactgcagtcttattcctggttcaaactacctctttaaattgatttgtcttgtgctggtctgttaaatcctgccctccttggtgctagatccagttgtgcctcagggcagaggaaacaaaacacagctatcctgttggcctgtgttgtggttttgaagtttgtactttctctgtgggtgccagttaaatattggagagcaaggaatgtggacttgtatggctttgaaccaagagagggttatgagcctactggattgaggttaaaatccaagaaccaacatttagagctttgtgcttttctctcattccatcactttgtaatgatgatacttaacatgagcagggtgaatgacaggtactgacgaagtccaacacaaaggtataatacagcctgttgtctaaagccaaggagtcataaaaccatgagaaataaataggaatcaatagttagtagtgacattggtgctctctagaaatctcagcatgagctgctatagaataccctcccagcaacaaaacctaatcagtaaggccagctagacccaatggctcatgcctgtaatcccaacactttgggaggccaaggtgggaggatggcttgtgtccagaagttcgagaccagcctggacaacatagtgagatcctatctctataaaaaatcaaaaattagccaggcatggtggtgcatacctatagtcctggctatttgggaggctgaggcaggaggattgctttagccctggaggtcgaggctgcagtaagccatgattgcgccactgcactcagcccgggtgacaaagcaagaccctgtctcagaaaaaaagaaaattcaaggccagttaagacaaaatgctatgactttgaaattcacagaaagaaataacagtttagattaggtcttcaggtattcaggatagagataatctcctgaaaaacctgaatttcagagattcttagactggctgccaaaggatgaagctagtgaaggagaaaaagcttaaattccatcttgagctcttggattgtgataatacaatgatttcattaacttttcatttctgtatacctgttcatttggaatttaatgcttgacttctttgttcattttggatctaaacttctcttttcttccttccccattcacatctattagaagactgcatcaccatttctttggcccccttactctgttgtcctttcccttttctttcagtttttttaatcgcatgtctagtatattaagtctccatagccctcctgatgcagtagacagtgctatgctgtggatataataccaaccagaaattggcatttataaacctgttaagagactttaagcatgcttcaagaggcagttgacccactggaatttctataaggctggtacccttcccagagttacagaatcttaggtgccgtctctagtctgtgagggaggaactcccagcatccccattgcccacaaatggaatcctcactgtatccactaggagattagaaattaaggtttcttcactacttctatggtagggttgtctgaaattccctttcaggctgtgggtactggtcttgggttctagtcataaggggttccttataaggagcaggcggaggggagtacactttcatgtgatttaattttgatcctgccctctccagctgctccttcaaaagatacatcaaaagatagaaactctgggctgggcacagtggctcacacactttgggaggccaagcgggggtgcagatcacctgaggtcaggagtttgagaccagcctggccaatgtggtgaaaccccatctctactaaaaatacaaaaattagctgggcgtggtggtgcatgcctgtaatcccagctactcgggaggctgaggcaggagaatcgcttgaacccaggaggcggaggttgcagtgagccaagatggcgccattgcactccagcctgggcgacaagagcaaaactccgtctcaaaaaaaaaaaaaagatacaaagtctgcatttgatataatgccttaattactgggtctacaattaatgttgactgttttagattgtaagctcctggagagcagtattgctgtagtaggaatgttttaacagtgtcatatgaaaaagaacaaaataaatattttgattttgtgattctaaaaaaaaaaaaaaaaaaaa

SEQ ID NO: 489 - DNA, 1791 bp, Homo sapiens
gatccgtgcggccagggtagctatcgcggcggcggcggcggcggcggttgaactgactcggagcgaggagacccgagcgagcagacgcggccctggcgcccgccctgcgcactcaccatggcgatgcatttcatcttctcagatacagcggtgcttctgtttgatttctggagtgtccacagtcctgctggcatggccctttcggtgttggtgctcctgcttctggctgtactgtatgaaggcatcaaggttggcaaagccaagctgctcaaccaggtactggtgaacctgccaacctccatcagccagcagaccatcgcagagacagacggggactctgcaggctcagattcattccctgttggcagaacccaccacaggtggtatttgtgtcactttggccagtctctaatccatgtcatccaggtggtcatcggctacttcatcatgctggccgtaatgtcctacaacacctggattttccttggtgtggtcttgggctctgctgtgggctactacctagcttacccacttctcagcacagcttagctggtgaggaacgtgcaggcactgaggctggagggacatggagccccctcttccagacactatacttccaactgccctttcttctgatggctattcctccaccttattcccagcccctggaaactttgagctgaagccagcacttgctccctggagttcggaagccattgcagcaaccttccttctcagccagcctacgtagggcccaggcatggtcttgtgtcttaagacagctgctgtgaccaaagggagaatggagataacaggggtggcagggttactgagcccatgacaatgcttctctgtgactcaaaccaggaatttccaaagatttcaagccagggagaagggttcttggtgatgcagggcatggaacctggacaccctcagctctcctgctttgtgccttatctacaggagcatcgcccattggacttcctgacctcttctgtctttgagggacagagaccaagctagatcctttttctcacctttctgcctttggaacacatgaagatcatctcgtctatggatcatgttgacaaactaagttttttttatttttcccattgaactcctagttggcaattttgcacattcatacaaaaaaatttttaatgaaatgatttcattgattcatgatggatggcagaaactgctgagacctatttccctttcttggggagagaataagtgacagctgattaaaggcagagacacaggactgctttcaggctcctggtttattctctgatagactgagctccttccaccagaaggcactgcctgcaggaagaagatgatctgatggccgtgggtgtctgggaagctcttcgtggcctcaatgccctcctttatcctcatctttcttctatgcagaacaaaaagctgcatctaataatgttcaatacttaatattctctatttattacttactgcttactcgtaatgatctagtggggaaacatgattcattcacttaaaatactgattaagccatgggcaggtactgactgaagatgcaatccaaccaaagccattacattttttgagttagatgggactctctggatagttgaacctcttcactttataaaaaaggaaagagagaaaatcactgctgtatactaaatacctcacagattagatgaaaagatggttgtaagctttgggaattaaaaacaaacaaatacattttagtaaatatatatttttaaatagtctaaaaaaaaaaaaaaaaaa

SEQ ID NO: 490 - DNA, 6476 bp, Homo sapiens
acacacagagtgatacaaatacctgcttgagcccctcagttattttctctcaagggctgaagtcagccacacaggataaaggagggaagggaaggagcagatcttttcggtaggaagacagattttgttgtcaggttcctgggagtgcaagagcaagtcaaaggagagagagaggagagaggaaaagccagagggagagagggggagaggggatctgttgcaggcaggggaaggcgtgacctgaatggagaatgccagccaattccagagacacacagggacctcagaacaaagataaggcatcacggacaccacaccgggcacgagctcacaggcaagtcaagctgggaggaccaaggccgggcagccgggagcacccaaggcaggaaaatgaggtggctgcttctctattatgctctgtgcttctccctgtcaaaggcttcagcccacaccgtggagctaaacaatatgtttggccagatccagtcgcctggttatccagactcctatcccagtgattcagaggtgacttggaatatcactgtcccagatgggtttcggatcaagctttacttcatgcacttcaacttggaatcctcctacctttgtgaatatgactatgtgaaggtagaaactgaggaccaggtgctggcaaccttctgtggcagggagaccacagacacagagcagactcccggccaggaggtggtcctctcccctggctccttcatgtccatcactttccggtcagatttctccaatgaggagcgtttcacaggctttgatgcccactacatggctgtggatgtggacgagtgcaaggagagggaggacgaggagctgtcctgtgaccactactgccacaactacattggcggctactactgctcctgccgcttcggctacatcctccacacagacaacaggacctgccgagtggagtgcagtgacaacctcttcactcaaaggactggggtgatcaccagccctgacttcccaaacccttaccccaagagctctgaatgcctgtataccatcgagctggaggagggtttcatggtcaacctgcagtttgaggacatatttgacattgaggaccatcctgaggtgccctgcccctatgactacatcaagatcaaagttggtccaaaagttttggggcctttctgtggagagaaagccccagaacccatcagcacccagagccacagtgtcctgatcctgttccatagtgacaactcgggagagaaccggggctggaggctctcatacagggctgcaggaaatgagtgcccagagctacagcctcctgtccatgggaaaatcgagccctcccaagccaagtatttcttcaaagaccaagtgctcgtcagctgtgacacaggctacaaagtgctgaaggataatgtggagatggacacattccagattgagtgtctgaaggatgggacgtggagtaacaagattcccacctgtaaaattgtagactgtagagccccaggagagctggaacacgggctgatcaccttctctacaaggaacaacctcaccacatacaagtctgagatcaaatactcctgtcaggagccctattacaagatgctcaacaataacacaggtatatatacctgttctgcccaaggagtctggatgaataaagtattggggagaagcctacccacctgccttccagtgtgtgggctccccaagttctcccggaagctgatggccaggatcttcaatggacgcccagcccagaaaggcaccactccctggattgccatgctgtcacacctgaatgggcagcccttctgcggaggctcccttctaggctccagctggatcgtgaccgccgcacactgcctccaccagtcactcgatccggaagatccgaccctacgtgattcagacttgctcagcccttctgacttcaaaatcatcctgggcaagcattggaggctccggtcagatgaaaatgaacagcatctcggcgtcaaacacaccactctccacccccagtatgatcccaacacattcgagaatgacgtggctctggtggagctgttggagagcccagtgctgaatgccttcgtgatgcccatctgtctgcctgagggaccccagcaggaaggagccatggtcatcgtcagcggctgggggaagcagttcttgcaaaggttcccagagaccctgatggagattgaaatcccgattgttgaccacagcacctgccagaaggcttatgccccgctgaagaagaaagtgaccagggacatgatctgtgctggggagaaggaagggggaaaggacgcctgtgcgggtgactctggaggccccatggtgaccctgaatagagaaagaggccagtggtacctggtgggcactgtgtcctggggtgatgactgtgggaagaaggaccgctacggagtatactcttacatccaccacaacaaggactggatccagagggtcaccggagtgaggaactgaatttggctcctcagccccagcaccaccagctgtgggcagtcagtagcagaggacgatcctccgatgaaagcagccatttctcctttccttcctcccatcccccctccttcggcctatccattactgggcaatagagcaggtatcttcacccccttttcactctctttaaagagatggagcaagagagtggtcagaacacaggccgaatccaggctctatcacttactagtttgcagtgctgggcaggtgacttcatctcttcgaacttcagtttcttcataagatggaaatgctataccttacctacctcgtaaaagtctgatgaggaaaagattaactaatagatgcatagcacttaacagagtgcatagcatacactgttttcaataaatgcaccttagcagaaggtcgatgtgtctaccaggcagacgaagctctcttacaaacccctgcctgggtcttagcattgatcagtgacacacctctcccctcaaccttgaccatctccatctgcccttaaatgctgtatgcttttttgccaccgtgcaacttgcccaacatcaatcttcaccctcatccctaaaaaagtaaaacagacaaggttctgagtcctgtggtatgtcccctagcaaatgtaactaggaacatgcactagatgacagattgcgggagggcctgagagaagcagggacaggagggagcctggggattgtggtttgggaaggcagacacctggttctagaactagctctgcccttagccccctgtatgaccctatgcaagtcctcctccctcatctcaaagggtcctcaaagctctgacgatctaagatacaatgaagccattttccccctgataagatgaggtaaagccaatgtaaccaaaaggcaaaaattacaatcggttcaaaggaactttgatgcagacaaaatgctgctgctgctgctcctgaaatacccacccctttccactacgggtgggttcccaaggacatgggacaggcaaagtgtgagccaaaggatccttccttattcctaagcagagcatctgctctgggccctggcctccttcccttcttgggaaactgggctgcatgaggtgggccctggtagtttgtaccccaggcccctatactcttccttcctatgtccacagctgaccccaagcagccgttccccgactcctcacccctgagcctcaccctgaactccctcatcttgcaaggccataagtgttttccaagcaaaatgcctctcccatcctctctcaggaagcttctagagactttatgccctccagagctccaagatataagccctccaagggatcagaagctccaagttcctgtcttctgttttatagaaattgatcttccctgggggactttaactcttgacctgtatgcagctgttggagtaattccaggtctcttgaaaaaaaagaggaagataatggagaatgagaacatatatatatatatattaagccccaggctgaatactcagggacagcaattcacagcctgcctctggttctataaacaagtcattctacctctttgtgccctgctgtttattctgtaaggggaaggtggcaatgggacccagctccatcagacacttgtcaagctagcagaaactccattttcaatgccaaagaagaactgtaatgctgttttggaatcatcccaaggcatcccaagacaccatatcttcccatttcaagcactgcctgggcacaccccaacatcccaggctgtggtggctcctgtgggaactacctagatgaagagagtatcatttataccttctaggagctcctattgggagacatgaaacatatgtaattgactaccatgtaatagaacaaaccctgccaagtgctgctttggaaagtcatggaggtaaaagaaagaccattctggtatgaaggttttgggggaggagatatcaatcaagaaggcttcccagaagaggtgactggaccagagccttgtccacaggtaagacggaggaggccttccacatggagggagaacaatagtaaatgtccactcaagatgtcctttattataccagctcctcccacaaaaacacatgtccagtggactctttttctgggatcagaaccaacaccaaaaagagcttttctccttaaagttagaattctaaacaggacttgaaatggcctcaaggtttgtgcacaaatactgacttctggctggacccagcttattctgtttatttctccaattgcaatttcatccttatcctgagaaaatgtctaaataggccatggaacccaggcttccccgtgacctacaagcacttattagctgtgccagctcctgcactgctgctaaggtccaagaaacccagatctctcacagagccatagaagcagagggctggagtatctgtgaggacaacaaccttgtctaacttcgcgacctcattcttgagcatttctactgatgagaaactcactacccccaattgcagctcattcaactttaaaattgctgctttttgaatcactgattgtgaatattaatttaaaaaaataagtaagaaaatgttttaaatgtgctgcctctttaaaaggtctcctctttgtgcaaccaaaacccacctctctagaatacagtttgtataactgaagctataatttcataccatgagtgctgctgttagcaataataatcatgcccggattttattaacaacagaagctgttgctcgtatgaaaaaacaaacattagttctaataaacatctgcattgagtcaaagctccctgtttgtttgtatgtcttttatgcactgatgattatagtgagttgctttcatttaccaacattttgttgtattcgtgtaggatcactgtaccatgaagggagagagactatgatgggaagattgttgtagatacaaaagcatgtcttaggtttttgggtcagttctgtttaaatacctgtcctattattcctgtaaattatcaaaatatcccagaatgtcaatgtttctgcatccacattacaattattaaatgccactcatttattaaatttactattatcagtggcatttaataaatttgaatcatatgttcagtgtttggtttagaaaatatggtgccatgtctatgagtggcctgttctggattggagtacatgccttctttctgccttgagttaatcttactcaatggagaacaagaatcaaagaaacaccaccaccaagaagcccttcaagctagagttgggcaagagtcagggaggggaatgtagaccactcatatgacagaggtggaaaccaatcttggtctagaataagtctcaaaatcaaaagacttgaattctagtgcagcgtaggttgactcccttatttatttaattttcccatctctacaccgctagaataacctctctcctgaggctgttgaatctgatgaattagcagataggaaagaacttagaaaattataagttcactcaaatgtaaaaggttatatgggaaataatcaccactaacatttttgagtacttactatctgcttgttatacacattctctaatttaattttcacaagaaaattcatgaaaggactatacttatcccccttttacaggtgagcaacctggagtgcagtgaagtgtaaaatgtgggccgacttaggagcacaaataccccagcaacaatgagcactcttagtacacaggtcttggtttctaaaatatcatcatccgataaaaggaacacaggctctttgaagaaatgactgattccgggattggggcaagaaacacacaagctgagactggagcatcttgcagtcccagaaagtgaagaaacgctgaggatatgtcaaagggacacaggagccaaatgaaagagcttccactggccaaagctggaatgttgagcaacaaagcaacatagcattggataataacccaaagtataaaataaatattcatgagtacata

SEQ ID NO: 491 - DNA, 3217 bp, Homo sapiens
tccctcgcccggaggcagagatgcgctggcgcatcaccgccaggagcccacagtgaaagaccatcggatggaaggcgacgcccagaactccaggagaccgctgtgggaggacgcgaggccaggtgacgaataggccaggcgtgagttcccaaacagcctcctccccttcaagagagtaagcttgggccacaggctgggacggaagcagaggggcagacacgccaccacccgcccggcctcgaacctacggcggcacagttcagcggaggcggcccagcggtcctgtcccgcgcctgcgcactccaggccccgccccgccccgcgccctccaggcccggcccgccctccaacctctgcgtgcgcacagcctagagcccgcctccgtgaaagactgccgggcgcatgcggtcggggttgttcactggctgtccggggctccgcgcgcgtcgccggcccagctctgtcgctgacgggaggatctgaagccggccgcaggtcaaagagtaaaatgaagtacattctggttactggtggtgttatatcaggaattggaaaaggaatcattgccagcagtgtgggcacaatactcaagtcatgtggtttacatgtaacttcaatcaaaattgacccctacattaacattgatgcaggaacattctctccttatgagcatggtgaggtttttgtgctggatgatggtggggaagtagaccttgacctgggtaactatgagcggttccttgacatccgcctcaccaaggacaataatctgaccactggaaagatataccagtatgtcattaacaaggaacggaaaggagattacttggggaaaactgtccaagttgtccctcatatcacagatgcaatccaggagtgggtgatgagacaggcgttaatacctgtagatgaagatggcctggaacctcaagtgtgtgttattgagcttggtggaaccgtgggggacatagaaagcatgccctttattgaggccttccgtcagttccaattcaaggtcaaaagagagaacttttgtaacatccacgtcagtctagttccccagccaagttcaacaggggaacagaagactaaacctacccagaatagtgttcgggaacttagaggacttgggctttccccagatctggttgtatgcaggtgctcaaatccacttgacacatcagtgaaggagaaaatatcaatgttctgccatgttgagcctgaacaagtgatctgtgtccacgatgtctcatccatctaccgagtccccttgttgttagaggagcaaggggttgtagattattttcttcgaagacttgaccttcctattgagaggcagccaagaaaaatgctgatgaaatggaaagagatggctgacagatatgatcgcttgctggagacctgctctattgcccttgtgggcaaatacacgaagttctcagactcctatgcctctgtcattaaggctctggagcattctgcactggccatcaaccacaaattggaaatcaagtacatagattctgcggacttggagcccatcacctcgcaagaagagcccgtgcgctaccacgaagcttggcagaagctctgtagtgctcatggagtgctggttccaggaggatttggtgttcgaggaacagaaggaaaaatccaagcaattgcctgggctcggaatcagaaaaagccttttttgggcgtgtgcttagggatgcagttggcagtggttgaattctcaagaaacgtgctgggatggcaagatgccaattctacagagtttgaccctacgaccagtcatcccgtggtcgtagacatgccagaacacaacccagggcagatgggcggaaccatgaggctgggcaagaggagaaccctgttccagaccaagaactcagtcatgaggaaactctatggagacgcagactacttggaagagaggcaccgccaccgatttgaggtgaatccagtctggaaaaagtgtttggaagaacaaggcttgaagtttgttggccaagatgttgaaggagagagaatggaaattgtggagttagaagatcatcccttttttgttggggttcagtaccaccctgagttcctgtccaggcctatcaagccctccccaccatactttggcctcctcctggcctctgtggggcggctctcacattacctccagaaaggctgcaggctctcacccagggacacctatagtgacaggagtggaagcagctcccctgactctgaaatcaccgaactgaagtttccatcaataaatcatgactgatcttgtagcggatgattcttcaagagacccttcaaacttgggtagagtttacagctctgactttacactcggctttggagactttctttaaattatgtttttattaagattattttattatgcggaaaggtatttgggaaacttgtcacttgcatgtcccatcacgtgtactggctcctctgtggtgtctgcctgttgcgtgacactctccttgcagttcttgagttgcggcagaacatcgcgatgggaaccgatggtgggtggggctgcagagtgccccatcggtcaccttgtttctcaactacctcgcatcattgcagatgctagcgcgttgcctgtcgctttcccttggatacctagaccgttataaagtgtgccacatggacttaccgagcatggagagaggattttagctaggatttgaacacttggtgctgggaacctcagggtattgcttgccactaagccatgaaaccagagacaaaatctctatactgccctgagttggggggaattctcagtgccaactgtggctggtcctcattcaaagggacggtcagtttggtgtcaacatgaaacaccaagatgtctgtctctgaagcgtgattttaaaatccccatgcctgtggctgcgcttcctatttctagggctgggaaacactccttgcatcaaggggtcacttacagaacaaagaatcttttgggggaaacttcctctaaaaccctctcatatatagacagctttgactggagggtccatttttcttccaggatggtgttactgcagttgaaagggcaatatgaagttactttcttaatgtgacctagcaataggcatagctacgtggcactatattctggccagactcgatgtgtactctaacttaagaaataaatcagtaaggcagaacaagaaaaaaaaaaaaaaaaaaa

SEQ ID NO: 492 - DNA, 2857 bp, Homo sapiens
ccacttccggttgttgtccggccctatatccggtgtccgcccgccctcggctcctccgccgtgatgctgtcccgatcccgctgtgtgtctcgggcgttcagccgctcgctctccgccttccagaaggggaactgccctctagggagacgttccctgcctggggtctccttatgccagggaccaggttaccctaacagcaggaaggttgtcattaacaacagtgtcttcagtgttcgctttttcagaactacagctgtatgcaaggatgacttggttacagtcaaaaccccagcgtttgcagaatctgtcacagagggagatgtcaggtgggagaaagctgttggagacacagttgcagaagatgaagtggtttgtgagattgaaactgacaagacatctgtgcaggttccatcaccagcaaatggcgtgattgaagctcttttggtacctgatgggggaaaagtcgaaggaggcactccacttttcacactcaggaaaactggtgctgctcctgctaaggccaagccggctgaagctcctgctgctgcagccccaaaagcagaacctacagcagcggcagttcctccccctgcagcacccatacccactcagatgccaccggtgccctcgccctcacagcctccttctggcaaacctgtgtctgcagtaaaacccactgttgccccaccactagctgagccaggagctggcaaaggtctgcgttcagaacatcgggagaaaatgaacaggatgcggcagcgcattgctcagcgtctgaaggaggcccagaatacatgtgcaatgctgacaacttttaatgagattgacatgagtaacatccaggagatgagggctcggcacaaagaggcttttttgaagaaacataacctcaaactaggcttcatgtcggcatttgtgaaggcctcagcctttgccttgcaggaacagcctgttgtaaatgcagtgattgacgacacaaccaaagaggtggtgtatagggattatattgacatcagtgttgcagtggccaccccacggggtctggtggttccagtcatcaggaatgtggaagctatgaattttgcagatattgaacggaccatcactgaactgggagagaaggcccgaaagaatgaacttgccattgaagatatggatggcggtaccttcaccattagcaatggaggcgtttttggctcgctctttggaacacccattatcaacccccctcagtctgccatcctggggatgcatggcatctttgacaggccagtggctataggaggcaaggtagaggtgcggcccatgatgtacgtggcactgacctatgatcaccggctgattgatggcagagaggctgtgactttcctccgcaaaatcaaggcagcggtagaggatcccagagtcctcctcctggatctttaggaggaacccacacaccctacaagttgatcatgcaggaactgaaaaccagtcttctccctgtcccctcatgggtcccgggttagcctggtgacaggcagacacatgctgttggcctcaagcaaggaagcagagcactgtgtaaccagcagtcacaggtcttttcttggcgttcctgccaggctctccctctctgcacctgtctcatagcctcgaatatcttaattccttaggcttaagagagagagccttaatggatgctcattcatattcctgcctttcttccatcagctctctgcaaagatgattttgcttttccctagtgctggtatactatagagaaacccctggggaccatgtgattaagttcctatcttttgaaagtttgttctgcagagacttctaggaggatgctgtgcctcccaagctcagagcagcctctgtcctggctgtgcacattctcccttgattccacttgtgtggagggattgaacacaggcaaagaggtgctgctttgcttcttcaatggcaccttcattctccgttgtcattgacttcaagatgcctcttctacctcttccaggaagcacaggccaggggatctgggtgtgtgagtgggaggagagggcagaggtcccctgaggtcatgcattgtaatcatcatagaaggagagcccaggcctgccctcacgctctccatcataggctgacaccaagaagactcgtcttggcacaatctcacacagctggggctgtagcaaccctttccaacccctttgctggttgctgggcctcattctagcaccttgttcttagagcagattctagcacatcatggcagtgggaccaagcgtggtcccgaggaagggccagagcctggtagagactagggaagggaggtctcctctagactgactcacattgccttgagcttttcagttaagttgctgtaagcacctgggctgaggaggcagtttttgttccttcctgcgttatagcggggccttgtctcttcctctgcaggacacagatctggaggacgtggactggggtaggaaaccaccctgagggtgttagtacctagtggtgaaacggatgaggtcatttctaaggtgtgttgcccgtggatctgggcacaatcattggaattccttggagccactgggattcatggctttgtatccaactgcatccaggcctgaggctgctgacgtttgacaccagggccagtagagagtgcccttttgtatcttaagccaagaagtgaggcctgggggtgggggaggggggaaggggtgggagccaatactgagtgcctgcagcatctactactctgtcttcactattcagaacttgtaactaaagtatttaaagaaactgattttaaatgcaaattaaagggcagatattctcaaacaggaaaaaaaaaaaaaaa

SEQ ID NO: 493 - DNA, 5561 bp, Homo sapiens
aaagcagcagagacgctgcagagggcttttcttagacatcaactgcagacggctggcaggatagaagcagcggctcacttggactttttcaccagggaaatcagagacaatgatggggctcttccccagaactacaggggctctggccatcttcgtggtggtcatattggttcatggagaattgcgaatagagactaaaggtcaatatgatgaagaagagatgactatgcaacaagctaaaagaaggcaaaaacgtgaatgggtgaaatttgccaaaccctgcagagaaggagaagataactcaaaaagaaacccaattgccaagattacttcagattaccaagcaacccagaaaatcacctaccgaatctctggagtgggaatcgatcagccgccttttggaatctttgttgttgacaaaaacactggagatattaacataacagctatagtcgaccgggaggaaactccaagcttcctgatcacatgtcgggctctaaatgcccaaggactagatgtagagaaaccacttatactaacggttaaaattttggatattaatgataatcctccagtattttcacaacaaattttcatgggtgaaattgaagaaaatagtgcctcaaactcactggtgatgatactaaatgccacagatgcagatgaaccaaaccacttgaattctaaaattgccttcaaaattgtctctcaggaaccagcaggcacacccatgttcctcctaagcagaaacactggggaagtccgtactttgaccaattctcttgaccgagagcaagctagcagctatcgtctggttgtgagtggtgcagacaaagatggagaaggactatcaactcaatgtgaatgtaatattaaagtgaaagatgtcaacgataacttcccaatgtttagagactctcagtattcagcacgtattgaagaaaatattttaagttctgaattacttcgatttcaagtaacagatttggatgaagagtacacagataattggcttgcagtatatttctttacctctgggaatgaaggaaattggtttgaaatacaaactgatcctagaactaatgaaggcatcctgaaagtggtgaaggctctagattatgaacaactacaaagcgtgaaacttagtattgctgtcaaaaacaaagctgaatttcaccaatcagttatctctcgataccgagttcagtcaaccccagtcacaattcaggtaataaatgtaagagaaggaattgcattccgtcctgcttccaagacatttactgtgcaaaaaggcataagtagcaaaaaattggtggattatatcctgggaacatatcaagccatcgatgaggacactaacaaagctgcctcaaatgtcaaatatgtcatgggacgtaacgatggtggatacctaatgattgattcaaaaactgctgaaatcaaatttgtcaaaaatatgaaccgagattctactttcatagttaacaaaacaatcacagctgaggttctggccatagatgaatacacgggtaaaacttctacaggcacggtatatgttagagtacccgatttcaatgacaattgtccaacagctgtcctcgaaaaagatgcagtttgcagttcttcaccttccgtggttgtctccgctagaacactgaataatagatacactggcccctatacatttgcactggaagatcaacctgtaaagttgcctgccgtatggagtatcacaaccctcaatgctacctcggccctcctcagagcccaggaacagatacctcctggagtataccacatctccctggtacttacagacagtcagaacaatcggtgtgagatgccacgcagcttgacactggaagtctgtcagtgtgacaacaggggcatctgtggaacttcttacccaaccacaagccctgggaccaggtatggcaggccgcactcagggaggctggggcctgccgccatcggcctgctgctccttggtctcctgctgctgctgttggccccccttctgctgttgacctgtgactgtggggcaggttctactgggggagtgacaggtggttttatcccagttcctgatggctcagaaggaacaattcatcagtggggaattgaaggagcccatcctgaagacaaggaaatcacaaatatttgtgtgcctcctgtaacagccaatggagccgatttcatggaaagttctgaagtttgtacaaatacgtatgccagaggcacagcggtggaaggcacttcaggaatggaaatgaccactaagcttggagcagccactgaatctggaggtgctgcaggctttgcaacagggacagtgtcaggagctgcttcaggattcggagcagccactggagttggcatctgttcctcagggcagtctggaaccatgagaacaaggcattccactggaggaaccaataaggactacgctgatggggcgataagcatgaattttctggactcctacttttctcagaaagcatttgcctgtgcggaggaagacgatggccaggaagcaaatgactgcttgttgatctatgataatgaaggcgcagatgccactggttctcctgtgggctccgtgggttgttgcagttttattgctgatgacctggatgacagcttcttggactcacttggacccaaatttaaaaaacttgcagagataagccttggtgttgatggtgaaggcaaagaagttcagccaccctctaaagacagcggttatgggattgaatcctgtggccatcccatagaagtccagcagacaggatttgttaagtgccagactttgtcaggaagtcaaggagcttctgctttgtccacctctgggtctgtccagccagctgtttccatccctgaccctctgcagcatggtaactatttagtaacggagacttactcggcttctggttccctcgtgcaaccttccactgcaggctttgatccacttctcacacaaaatgtgatagtgacagaaagggtgatctgtcccatttccagtgttcctggcaacctagctggcccaacgcagctacgagggtcacatactatgctctgtacagaggatccttgctcccgtctaatatgaccagaatgagctggaataccacactgaccaaatctggatctttggactaaagtattcaaaatagcatagcaaagctcactgtattgggctaataatttggcacttattagcttctctcataaactgatcacgattataaattaaatgtttgggttcataccccaaaagcaatatgttgtcactcctaattctcaagtactattcaaattgtagtaaatcttaaagtttttcaaaaccctaaaatcatattcgccaggaaattttcctaaacattcttaagcttctatttttcccctgccaaaggaaggtgtttatcattttaaaatgcaatgtgatttagtggattaagcaggagcgctggttcttgtctccattgccttttcttatatcattgataatgatgtaagaatcacaaggggccgggcgcggtggctcacgcctgtaatcccagcactttgggaggccgaggcaggtggatcatgaggtcaggagatcgagaccatcctggctaacaaggtgaaaccccgtctctactaaaaatacaaaaaattagccgggcgcagtggcgggcgcctgtagtcccagctactcgggaggctgaggcaggagaatggcatgaacccgggaagcggagcttgcagtgagccgagattgcgccactgcagtccgcagtccggcctgggcgacagagcgagactccgtctcaaaaaaaaaaaaaaaaaaagaatcacaaggtatttgctaaagcattttgagctgcttggaaaaagggaagtagttgcagtagagtttcttccatcttcttggtgctgggaagccatatatgtgtcttttactcaagctaaggggtataagcttatgtgttgaatttgctacatctatatttcacatattctcacaataagagaattttgaaatagaaatatcatagaacatttaagaaagtttagtataaataatattttgtgtgttttaatccctttgaagggatctatccaaagaaaatattttacactgagctccttcctacacgtctcagtaacagatcctgtgttagtctttgaaaatagctcattttttaaatgtcagtgagtagatgtagcatacatatgatgtataatgacgtgtattatgttaacaatgtctgcagattttgtaggaatacaaaacatggccttttttataagcaaaacgggccaatgactagaataacacatagggcaatctgtgaatatgtattataagcagcattccagaaaagtagttggtgaaataattttcaagtcaaaaagggatatggaaagggaattatgagtaacctctattttttaagccttgcttttaaattaaacagctacagccatttaagccttgaggataataaagcttgagagtaataatgttaggttagcaaaggtttagatgtatcacttcatgcatgctaccatgatagtaatgcagctcttcgagtcatttctggtcattcaagatattcacccttttgcccatagaaagcaccctacctcacctgcttactgacattgtcttagctgatcacaagatcattatcagcctccattattccttactgtatataaaatacagagttttatattttcctttcttcgtttttcaccatattcaaaacctaaatttgtttttgcagatggaatgcaaagtaatcaagtgtttgtgctttcacctagaagggtgtggtcctgaaggaaagaggtcccctaaatatcccccaccctggtgctcctccctctccctggtaccctgactaccaggaagtcaggtgctagagcagctggagaagtgcaggcagcctgtgcttccacagatgggggtgctgctgcaacaaggctttcaatgtgcccatcttaggtgggagaagctagatcctgtgcagcagcctggtaagtcctgaggaggttccattgctcttcctgctgctgtcctttgcttctcaacggtggctcgctctacagtctagagcacatgcagctaacttgtgcctctgcttatgcatgagggttaaattaacaaccataaccttcatttgaagttcaaaggtgtattcaggatcctcaaagcattttaaccttgccgcttaaaacccaatttaccgtgaaatgggaattttgctgcattgttaaactgtagtggaaaccatgctatagtaataaaggttatataagagagaaattgaaattaaatgtgtttttaaatttcaaaaaaaaatcaatctttaggatgacttaaaaattgatttgccatgtaaaatgtatctgcattttttacacaaaacttgttttaagcataaaattttaaaactgtactacttgatgtattatacattttgaaccatatgtattaaaccataaacagtataatgttgttataataaaacaggcaataaatttataaataaaagctgaaaaaaaaaaaa

SEQ ID NO: 494 - DNA, 2381 bp, Homo sapiens
attcggccgaaggagctacgcgggccacgctgctggctggcctgacctaggcgcgcggggtcgggcggccgcgcgggcgggctgagtgagcaagacaagacactcaagaagagcgagctgcgcctgggtcccggccaggcttgcacgcagaggcgggcggcagacggtgcccggcggaatctcctgagctccgccgcccagctctggtgccagcgcccagtggccgccgcttcgaaagtgactggtgcctcgccgcctcctctcggtgcgggaccatgaagctgctgccgtcggtggtgctgaagctctttctggctgcagttctctcggcactggtgactggcgagagcctggagcggcttcggagagggctagctgctggaaccagcaacccggaccctcccactgtatccacggaccagctgctacccctaggaggcggccgggaccggaaagtccgtgacttgcaagaggcagatctggaccttttgagagtcactttatcctccaagccacaagcactggccacaccaaacaaggaggagcacgggaaaagaaagaagaaaggcaaggggctagggaagaagagggacccatgtcttcggaaatacaaggacttctgcatccatggagaatgcaaatatgtgaaggagctccgggctccctcctgcatctgccacccgggttaccatggagagaggtgtcatgggctgagcctcccagtggaaaatcgcttatatacctatgaccacacaaccatcctggccgtggtggctgtggtgctgtcatctgtctgtctgctggtcatcgtggggcttctcatgtttaggtaccataggagaggaggttatgatgtggaaaatgaagagaaagtgaagttgggcatgactaattcccactgagagagacttgtgctcaaggaatcggctggggactgctacctctgagaagacacaaggtgatttcagactgcagaggggaaagacttccatctagtcacaaagactccttcgtccccagttgccgtctaggattgggcctcccataattgctttgccaaaataccagagccttcaagtgccaaacagagtatgtccgatggtatctgggtaagaagaaagcaaaagcaagggaccttcatgcccttctgattcccctccaccaaaccccacttcccctcataagtttgtttaaacacttatcttctggattagaatgccggttaaattccatatgctccaggatctttgactgaaaaaaaaaaagaagaagaagaaggagagcaagaaggaaagatttgtgaactggaagaaagcaacaaagattgagaagccatgtactcaagtaccaccaagggatctgccattgggaccctccagtgctggatttgatgagttaactgtgaaataccacaagcctgagaactgaattttgggacttctacccagatggaaaaataacaactatttttgttgttgttgtttgtaaatgcctcttaaattatatatttattttattctatgtatgttaatttatttagtttttaacaatctaacaataatatttcaagtgcctagactgttactttggcaatttcctggccctccactcctcatccccacaatctggcttagtgccacccacctttgccacaaagctaggatggttctgtgacccatctgtagtaatttattgtctgtctacatttctgcagatcttccgtggtcagagtgccactgcgggagctctgtatggtcaggatgtaggggttaacttggtcagagccactctatgagttggacttcagtcttgcctaggcgattttgtctaccatttgtgttttgaaagcccaaggtgctgatgtcaaagtgtaacagatatcagtgtctccccgtgtcctctccctgccaagtctcagaagaggttgggcttccatgcctgtagctttcctggtccctcacccccatggccccaggcccacagcgtgggaactcactttcccttgtgtcaagacatttctctaactcctgccattcttctggtgctactccatgcaggggtcagtgcagcagaggacagtctggagaaggtattagcaaagcaaaaggctgagaaggaacagggaacattggagctgactgttcttggtaactgattacctgccaattgctaccgagaaggttggaggtggggaaggctttgtataatcccacccacctcaccaaaacgatgaagttatgctgtcatggtcctttctggaagtttctggtgccatttctgaactgttacaacttgtatttccaaacctggttcatatttatactttgcaatccaaataaagataacccttattccataaaaaaaaaaaaaaaaaaaaaaaa

SEQ ID NO: 495 - DNA, 3248 bp, Homo sapiens
gcggctggggcccgcgcggccggggcgccgtcccagggcagggctgcccggccccggccccgggccgcccgcgctccccatgaaaaaccagctccgcggccccccagcgcgggcgcacatgtcgacttcgggggcggcggcggctgggggcacccgggcggggtccgagcccggtgcggggtcggggtccggcgcaggcaccggggcgggcgcggcgacgggggcaggggccatgccctgcaagagcgccgagtggctgcaggaggagctggaggcgcgcggcggcgcgtccttgctgctgctcgactgccggccgcacgagctcttcgagtcgtcgcacatcgagacggccatcaacctggccatcccgggcctcatgttgcgccgcctgcgcaagggcaacctgcccatccgctccatcatccccaaccacgccgacaaggagcgcttcgccacgcgctgcaaggcggccaccgtgctgctctacgacgaggccacggccgagtggcagcccgagcccggcgctcccgcctccgtgctcggcctgctcctacagaagctgcgcgacgacggctgccaggcctactacctccaaggtggtttcaacaagtttcaaacagagtactctgagcactgcgagaccaacgtggacagctcttcctcgccgagcagctcgccacccacctcagtgctgggcctggggggcctgcgcatcagctctgactgctccgacggcgagtcggaccgagagctgcccagcagtgccaccgagtcagacggcagccctgtgccatccagccaaccagccttccctgtccagatcctgccctacctctacctcggctgcgccaaggactccaccaacctggacgtgctcggcaagtatggcatcaagtatatcctcaatgtcacacccaacctacccaacgccttcgagcacggcggcgagttcacctacaagcagatccccatctctgaccactggagccagaacctctcccagttcttccctgaggccatcagcttcattgacgaagcccgctccaagaagtgtggtgtcctggtgcactgcctggcaggcatcagccgctcagtgacggtcactgtggcctatctgatgcagaagatgaacctgtcactcaacgacgcctacgactttgtcaagaggaaaaagtccaacatctcgcccaacttcaacttcatggggcagctgctggactttgagcggacgctggggctaagcagcccgtgcgacaaccacgcgtcgagtgagcagctctacttttccacgcccaccaaccacaacctgttcccactcaatacgctggagtccacgtgaggcctggtgcacggggggcatggcaccaggcccctgctcggctctccacagggctaggtgggagagcccaagcccgccacctctggcctgaggaacccccagatgtcacctgtgcccagaggcccaggctgatcggtgtcggagcgcccctcaccatccttgggggcagggcccgcaggcaaggtctcccactgcagggcttgctggagaggcctcggctcttggacacgtggctttgggcgtccaccagggcctcatcctgtccaggacgctcctttctgctgacagcccagccagtttggctgttttttaaagacacatccacggacctgagtttactttttacttttggcaggtaaatccaagctccctggagcacaaagagtgtttgagctcttcttgatttttcttttttttttttttttttaacaaaaagtgttattttcaggctacatgcaacagtggattgtataacccagtatttcatccctttcctgatcctgcaagagagagaaatgttcagttttgtttttcgttcaatttcaaaaagcaagtatcgtgtttgtttttgtttttgttttttaatggaaaagacagacgccatgttgaccttgaccaaatgcgttttgcacatgtgtgaagcctctgtttcctcagcgggcccttcttgaaggggtggcttactgctcttcaggtattgggacccccagtcgtgccgcctcccacccttggcccagtctgacttagctctgcattcgcctgtgatgactgctgcaagttgtgattggtgggctggatggtggtctttgcattttctgccgtctcatccatccctctggtggtccctgcagacctccctgaggcagaaggtggggaccctggggccctgccgctgtcccccaggaggtgggccgcagggggctgccaggcagtagcattagccctctggggtcagcccctaagaaggcctgggctctgagcccttttatatacttagccactacttctgtctgtctgtctgtctctctctcttcctctccctctctctctttctctctctccctctctctctctttctttctctctccccccctccctctctcttcctttcctctctcttgttgtaactgggagtggaggcccagtggctggggagacattaggtggtggggcccagcccgacctccaggttcttccttctccctagctgttgctttggtctggccactcccagcccccttgtccccttggaagcttgccctgccctcatcttgcccatgccttctactgccaggagacttgcacccatttcaaccctagggcgggggcaagtggggcaaggatggaccagcagaaggggggtaaggctctgttcacttccccctgcctccacagaacgaagccacggattccgttatcttcctccagttttgttccttctccagcctcagttccaccaggtgtcaggactgcatgggggcctggggcaggcagaggagtcaggccagggtccctgacggagcagcactcagcatgtgagtgaggccacagaaaaactctgccccactgcttcttacctcacgggggtggctttcagggattctttagcgcagcagattaaaatcttgccacagtcgagaaattgacaacaagcttccatgctgtacatggttctctttttctctcttttatttttaaaaagaaaacccagaaagatgtaccagatttgtgtaaatgagggtatgccagaaggtggccagttttgctttatgatcttatgaaggaagatttgtgaccctacgtatatatatacacacacatacatatatatatatatcccgaaccaacaacgggactttgtttatattgcaaataaatattattttttctttaaaaaaaaaaaaaaaaa

SEQ ID NO: 496 - DNA, 11170 bp, Homo sapiens
tttcttgttaaacaaacacctaatttatttcttggaggttttgttcagctgtcctaatttatgactttacattccttctggtgctaaactgctcaagtagcctcttgtatcaagtgtgacctgattccttaagaattttacttaatgagaacctctaagctagaaactcttgctaggtgtttcatgcaccttattttctttaatcattacaacaactctaagattgggttctctccaccttataaatgatgactgttttagagaggttaaggttgcttaaaattggtgagttagtgaggggtagagccacgaatggatttctggtcgctgcctccatcgtcagggcaagcttttcccacgactccagcgcttccatttgtcagtccccaggctagaaagccacagtgctaatttagtatttatcaagcgtttgtagtgtcctgggatctggcacttcgatgagaaagctgtgacggccccaacttctaacagcgagtggtaaggaggacgagggacacaggagggaggagactctccccaaagcttagcaccaacagaagtggtcccccgcaggttgctctgcgagcgccacctcttccctccaaccgaggagaaagtggcgcgcctttgaggagtccgaggtcccggcccaggcggcagcttgggtcctggcgggttccggacgggcgcctcagggacctggaagcaaccgcaccgaacgcgacggagagcggcgagacgactccaggaggcgcccgagctacatcccccggccacaccaaacccgggtttgctggcagacgcggctcacgacaccccttagggtcgcagcccctcccccggaagtgacgtgtagcgactacggcgtctgggagggacccaggagcagtcggggggtttgagagtggcggcggccgcggagggcctggcaggccccgccgctgcaaggaacgccccgaacgcgcgcgcccggcgtgtagcggccccaagacccgcgccgccgctgccgcgtgcgggggcggggagggcggggcgccaggagccgcggcggcgggagatgcgggcggctgcgggcacccggcgggctcggcttggccgccgccgccttctacggctccgccgcgggggtcgcagcggctgccgcgccgtcctcgagtttccagcgtgaggaggaggctgagggcggagaggcgcatcgtgttcgaggcggagaccgagggggagccccgcgcgcggcgtcgctcattgctatggacagtgctatcaccctgtggcagttccttcttcagctcctgcagaagcctcagaacaagcacatgatctgttggacctctaatgatgggcagtttaagcttttgcaggcagaagaggtggctcgtctctgggggattcgcaagaacaagcctaacatgaattatgacaaactcagccgagccctcagatactattatgtaaagaatatcatcaaaaaagtgaatggtcagaagtttgtgtacaagtttgtctcttatccagagattttgaacatggatccaatgacagtgggcaggattgagggtgactgtgaaagtttaaacttcagtgaagtcagcagcagttccaaagatgtggagaatggagggaaagataaaccacctcagcctggtgccaagacctctagccgcaatgactacatacactctggcttatattcttcatttactctcaactctttgaactcctccaatgtaaagcttttcaaattgataaagactgagaatccagccgagaaactggcagagaaaaaatctcctcaggagcccacaccatctgtcatcaaatttgtcacgacaccttccaaaaagccaccggttgaacctgttgctgccaccatttcaattggcccaagtatttctccatcttcagaagaaactatccaagctttggagacattggtttccccaaaactgccttccctggaagccccaacctctgcctctaacgtaatgactgcttttgccaccacaccacccatttcgtccataccccctttgcaggaacctcccagaacaccttcaccaccactgagttctcacccagacatcgacacagacattgattcagtggcttctcagccaatggaacttccagagaatttgtcactggagcctaaagaccaggattcagtcttgctagaaaaggacaaagtaaataattcatcaagatccaagaaacccaaagggttagaactggcacccacccttgtgatcacgagcagtgatccaagcccactgggaatactgagcccatctctccctacagcttctcttacaccagcatttttttcacagacacccatcatactgactccaagccccttgctctccagtatccacttctggagtactctcagtcctgttgctcccctaagtccagccagactgcaaggtgctaacacacttttccagtttccttctgtactgaacagtcatgggccattcactctgtctgggctggatggaccttccacccctggcccattttccccagacctacagaagacataacctatgcacttgtggaatgagagaaccgaggaacgaagaaacagacattcaacatgattgcatttgaagtgagcaattgatagttctacaatgctgataatagactattgtgatttttgccattccccattgaaaacatctttttaggattctctttgaataggactcaagttggactatatgtataaaaatgccttaattggagtctaaactccacctccctctgtcttttccttttctttttctttccttccttccttttcttttctcctttaaaaatattttgagctttgtgctgaagaagtttttggtgggctttagtgactgtgctttgcaaaagcaattaagaacaaagttactccttctggctattgggaccctttggccaggaaaaattatgcttagaatctattatttaaagaaatatttgtgaaatgaattggcatctttaggactaagtgtgctctgttgaatgacttaaagtgagctgttcctaagcagtggaagaagaagaatcattcctattcatacaaagtaagattggagcagtcatactggggagattgttttgtgtgaactataacgtgtaagcaactccatgaaaaggcatcttgtttacctttattcagggtggatctcttagccatatgtatgatcctgtctgaacctgtcaacagagcatggagctagtctatttcactatagaaagatttttagacctggggtttaagacagtttttggaacacctagtaagaatatgggacctcacatctagcacagaaatgctctttgccctctgggtggtatgattatatgcccatggaatacagcatgggaaatgatcacttttaggaggatgaacttggattttgaatatttgaaacatctctgagtaaaagattcgatcagataacttgaaacaacatgtagtggttttctcaattagaagataaccaagtgaaggacctgtctttttcctgttcattttacctcattttctactatacatttatcacctttcctttatgtttaaggttgttagaggttatgatagttttaaagatgcagttaggaaggtagaattcaaagtgaagcctccccagtcaggagcgaagatgtgcttatttcctttttttttttttttttttttttttgagacagagtcttgctctatcacccaggctggagtgcagtggcgcgatctcagctcactgtaagctccgcctcccgggttcaagcaattctcctgcctcagcctcctgagtagctgggactacaggcatgcgccactacgcctggctaatttttgtatttttagtagagacggggtttcaccatgttggccaggatggtcttgatctcttgaccttgtgatccgcccacctcagcctcccaaaggcgcaggctcagatgtgcttatttctttcaactttttttttttaaatggggaagagcagagttcatttgggaatgcttatacatagggattggattgttcatattagtagtaaaaaatgtaggccttattctctacattaccaaatttttaaaatattactatatggtaatcaatgccaggtacagatttgttggttccccaaactgaattgatatcagtatcacagtggagtcttttgaaaattaaagtccaggattaaattatatgttgtcaccattcaccaccactaccaccctcccccaccaatctctcccaccggttaaactcgtcttctaatcctgtagaatcacatgaactaaatgaagaagtaagaacttgaaggctcagactgacactgttacaaactagcatcttcagatgcatggtatttactttaaatgtgcttatatacagtgtagagaagctcttgtataagaagacatctatgctagctaacttagtagtagtagagggaacatattcagtgagctgcctttatatctgtagtgtcggagacttgttactggttcatttgtggttatcagttgaaggttctgttcctgagatgtgcaatagtagtgttgaaaggtattgtttaatagtgatggggaacagacatattggacttttttttccatattaaattatttagtttgcatgcctgtttgaaattggacctctcagcagcactttgaaatagttttaattaggttaacattttgtacattaaataagtagatatagatggttgatttaactagatgtgttaaattttgaaagcacaaaggtattttatctttttgaattaaaggagaaaagccattgatttgttttcacagacagtatttttaataattaactgtctcagcacagaggtaccttggaaccaagggcaccattgaaactcagttgaagcaacttcctagtaaaccattttagtgagtcctttttgcataaatctatagcctctcagaggtgtgaggctgtcacagattggtgatctgctatctctttgagatcaactaatttggagaagtgtgtgtgtgcgtatccttttttaagtcaaagtttacaaccttactgcaggtgtatgaggcagacagttctgtttatagactacctccttcctggaaaagtctcagcttcatattctgttgaatatatgcagaattcttagtgtgaaaggtgatgtaccacttcagatcagttttcactggagagacttgtaattggtagctgtagctcgtatccatccctagtcactttgccaggatgaatgctgttgggcagcagtagcctaagttacggaaggggagcagattgaatggggttttgagacatcttctctgataccttagctttccttctgctctggtcgctatccactcagtcgtgtgctagaaatgtttaacaaccaggatctctggggtgggggtgggggggagcgctgaatttgtagcatttgctgcaaatataaattataaataaaattctaatataaattagaattttatatcaaattctttgatataaattagttactcctcctgtggctgatttcaagctaccaccttagagttcagaaaggatgtgcacagttggctcagagccagtgctggcaaaccattgcatttactccacccaagagtggattttcacataatttctaaaataattttttcttatttatatactgacttttcaaaatacaaaattaaaatatcatgtctgacttcagtgatctttttctttttctttttttagaaatgagatctttcagtaatcctttaatttaattttttagagatggagtcttggtgtgttacccagggtggactcaaactcccgggctcaagtgatcctcctgcctcagcctcctgcatagctgggctacaggcatgcaccaccacacctggcttagtaatccttctttattaatggtttgtcacagtacgtttgtgatgttatattgctcatggcatactttatgtgttcgaacaaaggtggaaatttccattgatttttttttttttaaatgtatgcacaaacaatctggattttgaggagtacggtcaggaaaaaaaaaaaagaattagaggcccttgaaaggtcaaccgtaagcttcttagagttaaaatatgagtttaattttttcccacattttgacagttgaaattttgatagggacagtaaacctatgagcctctattaggctactggattttttttaactggaaaattccttgaagatttacatactatattacagattttaaaagtcaagactgacttaagtaaatcagaggtttggaattctggagctgtaactccaggctgttgatagtatcacttcagttccattcacccctgcattgtgtgacgtccagtctgacaacattgtttcatcctgatctgactttctactatgattcttaagttcttaaaggtgtccttttatgtttttggtgaatgtaagcacatttagagccactcagtaccacttctcaatacctctgaagcagtggttcagaaaaggagtgtccagcctttttgaacacacaaattgatcagtaagagttattgaacataaaaactttccctattaaaaattcatatgggtatatgttaaattatataccgctataccaaagtaatatgtgtgttataaaaaaatacacaaaaattgaagtgaaggatggcataaaaagtaattcttgagtagcagttatagtattttcttcccacaccccagttggttgtcttgtgcaccctccagaagcacacgcttttcctaaagactgctgactcaggatattctcattctaatctccaaacatatatgatgctctcttatgatatatggagaaatcctagagatttggagtttttcaggagagcttattgtcaacttttgaaatttcacattaattctttttgataaattcccaaataataatccattaccacatgttttccacagctttattcctattactttcgtcagcctgttgtctcttatcttcatgttaggtatgactctatttttattttactagtctgctcacagacttctttgggacttatgttatattttaccaacaaatttagaattatttcaagttgctttatgttaaaatatataacaagttacattttcttgctgcattaataagtttttgatttttaaaatctgatatttcagcaactaaaggaatacttttctttataggtctgttctgtttttaacctcattgactgtatatgttttatttacccgtgccaggagtctagaatcgtgcttaggtgccattcttaggtatgaaaacaagtttggagaccaatgcaggtctctgtgcagaaatctggggctctaaatgaattaccaaaccaataggaaagttaaaatactactcatgatgtagtgtgtcatctgaagctatgatagaatatattatttctaaaatagtattgagaagttaattgttcagtccatagtagtgtaagtgaagtgtggaggtcagccatagttgtctttcttcagcaggtactctaaccagagactgggttctgtggaaaatagaattatattcttggtttgggatcaacaaatgttttgttattgttttaatgttgctggcattgcctgaaacaaagtgccctgttattcctcttatgtcatcagaactctgcttactgaagttgaagtttaatcttaggatctagaattcttgtggttggtcgtgtattaagaaaagaaggtggtttgattttatttcttgtacttggtggaacctgttactatacaagtcatgttttgacctgtaagccgagcaaatctgaaaggtgaatcgttaatggtagtataattgtttcatttgaaactgtcagtttcttcaagtcacttctctgaaaaaaattatgatagattgatagcctgccagaaaatagcaatttctaaggtgctgccatccacacttacttattgtgaaatatgaaaatccagagtggtttgtatgagaggggaaatactggctctaagctttctacagaaaacaggaaattcatgctgttgttgacataattttaaaggaaacttttaacaagaaaattcatgagggatacaatcaaacatagttaatctcttgagtgctaatcatttgagtatagtccacatcaggaagttttatgaggttgaaaactttactttgaaatatttaattgggagactagaccatttctttttccaagtcattctgatttattgtcctagtaaatgtatgtgtatgcatatatactgatgtattgactgaatgtgtgtgtgtgtgtgtgtgcgcgtgtaaatctgttttcatagggaacatacattgatggctcctagtctattttatactaaaacttaaaaaaatttgctgcactttgcagttgccactttttaaaagattaatgctttgcacatttcagtaggccttaaagatgaattgctcaccaacattttagaaatacactgcttacatgtgacatactctaaacaaagtcatagtaaactgttctcttaggttcatgtattattgagcaaataaggatgtcctttcttaaaatttctacatttatgtttgcttttgtgtaaaatctttattagtttgtaagtttctcaaagaggaggtttatactggaagcagtatttctaaagtacagagattcgaccatggattgaatacagtagtggaggaatgctggtattgtggcctaatttatccttttaaactgtatgtcattagtattagccaaaacctcagagtggagtgtcttgggctgaatgatcttctcaactttgccttgtttcccatctcataaaggctccttctggttcttttcccttccaaggattgtgagtcatgctcacataggcctgggatcttctggatggggtcggggaggaggtgggggtttcctgtggctggcccagagttctagccaatggaatcattcaagaatgcctaaagttcaggggtgggaatgccatatattggtgttaatcacttggcactttcttgggcaccaatattagcactgtttcatttttaataactggaagcacttaatgattattttgtttgtttaatttcaacttaaggatattgagggtcagagaagtaaggtttatttcttgtttatgttttctggaatttatagggtgtttgtagaagggataaatgggttacctaatgagccattcttctaggctctgtaaggtatgcccttttggctaggatattttaaaataatttgcaagcttttaatattgtgctttgtagaaatttacgatttttaaaaataatttgcaattgatagattacacttaaatttataaagtatccaattttaagtttcttttctgtttggtcattgttgcttattgtctattgtgtaggggacacaatcctgacatttcattgttttgttacttggggcagtattaaccagtggcctttgtatgtacattcattgcttacatttattgtttaagtggtagagtagcatttttatgaacttccctgttcagtattagtgaaattgacagatgcgtatatgtaaagatagaaaagaaacgaatacaattaattttttattccttgaggcctatttatttgttttggccctggatcttttctaatcacaattatatttctttatttttgcctttgagcagtttcatttatctttgtgggcagggaagattaaatatgaaattcagtccagtcattttgctactggttagctttagtttgaggcaagtaaaaatttttgattaaaattagtttcttaaaattatgcccttgctttaccaaataatcaaattggctaaaaaataagggtatgtaactttgcattttgaagaacaaaccaataatttttcatgagccctactcgatcttctttaaagaagaccttcctaagagacaattagggatgagtttgattaatgggaaatagctctaggttagattattttaaattccatacaccaagtgatttaaccacagtggcagtggcagtttctgaaccgtcaagtatgaacatcacttaaaaattaaaagatgcttaataataaactcttaattttcattaagccaatctgtaattcagaagaaaagcatatgtctgccatgggactattgcagtgcgtctccatcagtgttaacacaggagagatatgttattttatgtgtatgtcttagtttgggatatgtggtagtaagaacatgtcaagagtgctttcttcaaacctgtcagctcaactgagaagacagttacttcattgcttattttttcccttgttttattgaaatctgtatctcatatccagtatctaacactttgtagagatacttacatataatgtaagtgcacacctacccagaggaatggataactgttaaagtgttaataatagctcgtcttagttgatttcagcataatttacattagggagacctaaaaagcaccttcaaagtattaaaagcaccttttttttttctttttcctaaaaaagcaattaaaatggtcactgctaacatttattaaacttcatgttagttgatgaaacagctggagggaagctgccacatctcctagctaagcagtctgacttacctgttgggaaacaaagggatattgctctaagattgattaggatgattgtagctagagtcttgaattctatctgtatacggcagagaaactttatagagtgtagagaggtgagcgaaaggatgcaaaagcactttgagggctttataataatatgctgcttgaaaaaaaaaatgtgtagttgatactcagtgcatctccagacatagtaaggggttgctctgaccaatcaggtgatcattttttctatcacttcccaggttttatgcaaaaattttgttaaattctataatggtgatatgcatcttttaggaaagatatacatttttaaaaatctattttatgtaagaactgacagaggaatttgctttgtataatgcaggctggctttacaaaagcactgtagcaaatttactacaagtctaaaagtatacatatatgttaatagatatatgtgcaactagatatggacagcagttgtatttttttaaataaatatttttaacaaaatgaaaaaaaaaaaaaaaaaaaaaa

SEQ ID NO: 497 - DNA, 4654 bp, Homo sapiens
gcgcatgcgtcctagcagcgggacccgcggctcgggatggaggctggacacctgttctgctgttgtgtcctgccattctcctgaagaacagaggcacactgtaaaacccaacacttccccttgcattctataagattacagcaagatggaaataccaaatccccctacctccaaatgtatcacttactggaaaagaaaagtgaaatctgaatacatgcgacttcgacaacttaaacggcttcaggcaaatatgggtgcaaaggctttgtatgtggcaaattttgcaaaggttcaagaaaaaacccagatcctcaatgaagaatggaagaagcttcgtgtccaacctgttcagtcaatgaagcctgtgagtggacacccttttctcaaaaagtgtaccatagagagcattttcccgggatttgcaagccaacatatgttaatgaggtcactgaacacagttgcattggttcccatcatgtattcctggtcccctctccaacagaactttatggtagaagatgagacggttttgtgcaatattccctacatgggagatgaagtgaaagaagaagatgagacttttattgaggagctgatcaataactatgatgggaaagtccatggtgaagaagagatgatccctggatccgttctgattagtgatgctgtttttctggagttggtcgatgccctgaatcagtactcagatgaggaggaggaagggcacaatgacacctcagatggaaagcaggatgacagcaaagaagatctgccagtaacaagaaagagaaagcgacatgctattgaaggcaacaaaaagagttccaagaaacagttcccaaatgacatgatcttcagtgcaattgcctcaatgttccctgagaatggtgtcccagatgacatgaaggagaggtatcgagaactaacagagatgtcagaccccaatgcacttccccctcagtgcacacccaacatcgatggccccaatgccaagtctgtgcagcgggagcaatctctgcactccttccacacacttttttgccggcgctgctttaaatacgactgcttccttcacccttttcatgccacccctaatgtatataaacgcaagaataaagaaatcaagattgaaccagaaccatgtggcacagactgcttccttttgctggaaggagcaaaggagtatgccatgctccacaacccccgctccaagtgctctggtcgtcgccggagaaggcaccacatagtcagtgcttcctgctccaatgcctcagcctctgctgtggctgagactaaagaaggagacagtgacagggacacaggcaatgactgggcctccagttcttcagaggctaactctcgctgtcagactcccacaaaacagaaggctagtccagccccacctcaactctgcgtagtggaagcaccctcggagcctgtggaatggactggggctgaagaatctctttttcgagtcttccatggcacctacttcaacaacttctgttcaatagccaggcttctggggaccaagacgtgcaagcaggtctttcagtttgcagtcaaagaatcacttatcctgaagctgccaacagatgagctcatgaacccctcacagaagaagaaaagaaagcacagattgtgggctgcacactgcaggaagattcagctgaagaaagataactcttccacacaagtgtacaactaccaaccctgcgaccacccagaccgcccctgtgacagcacctgcccctgcatcatgactcagaatttctgtgagaagttctgccagtgcaacccagactgtcagaatcgtttccctggctgtcgctgtaagacccagtgcaataccaagcaatgtccttgctatctggcagtgcgagaatgtgaccctgacctgtgtctcacctgtggggcctcagagcactgggactgcaaggtggtttcctgtaaaaactgcagcatccagcgtggacttaagaagcacctgctgctggccccctctgatgtggccggatggggcaccttcataaaggagtctgtgcagaagaacgaattcatttctgaatactgtggtgagctcatctctcaggatgaggctgatcgacgcggaaaggtctatgacaaatacatgtccagcttcctcttcaacctcaataatgattttgtagtggatgctactcggaaaggaaacaaaattcgatttgcaaatcattcagtgaatcccaactgttatgccaaagtggtcatggtgaatggagaccatcggattgggatctttgccaagagggcaattcaagctggcgaagagctcttctttgattacaggtacagccaagctgatgctctcaagtacgtggggatcgagagggagaccgacgtcctttagccctcccaggccccacggcagcacttatggtagcggcactgtcttggctttcgtgctcacaccactgctgctcgagtctcctgcactgtgtctcccacactgagaaaccccccaacccactccctctgtagtgaggcctctgccatgtccagagggcacaaaactgtctcaatgagaggggagacagaggcagctagggcttggtctcccaggacagagagttacagaaatgggagactgtttctctggcctcagaagaagcgagcacaggctggggtggatgacttatgcgtgatttcgtgtcggctccccaggctgtggcctcaggaatcaacttaggcagttcccaacaagcgctagcctgtaattgtagctttccacatcaagagtccttatgttattgggatgcaggcaaacctctgtggtcctaagacctggagaggacaggctaagtgaagtgtggtccctggagcctacaagtggtctgggttagaggcgagcctggcaggcagcacagactgaactcagaggtagacaggtcaccttactacctcctccctcgtggcagggctcaaactgaaagagtgtgggttctaagtacaggcattcaaggctgggggaaggaaagctacgccatccttccttagccagagagggagaaccagccagatgatagtagttaaactgctaagcttgggcccaggaggctttgagaaagccttctctgtgtactctggagatagatggagaagtgttttcagattcctgggaacagacaccagtgctccagctcctccaaagttctggcttagcagctgcaggcaagcattatgctgctattgaagaagcattaggggtatgcctggcaggtgtgagcatcctggctcgctggatttgtgggtgttttcaggccttccattccccatagaggcaaggcccaatggccagtgttgcttatcgcttcagggtaggtgggcacaggcttggactagagaggagaaagattggtgtaatctgctttcctgtctgtagtgcctgctgtttggaaagggtgagttagaatatgttccaaggttggtgaggggctaaattgcacgcgtttaggctggcaccccgtgtgcagggcacactggcagagggtatctgaagtgggagaagaagcaggtagaccacctgtcccaggctgtggtgccaccctctctggcattcatgcagagcaaagcactttaaccatttcttttaaaaggtctatagattggggtagagtttggcctaaggtctctagggtccctgcctaaatcccactcctgagggagggggaagaagagagggtgggagattctcctccagtcctgtctcatctcctgggagaggcagacgagtgagtttcacacagaagaatttcatgtgaatggggccagcaagagctgccctgtgtccatggtgggtgtgccgggctggctgggaacaaggagcagtatgttgagtagaaagggtgtgggcgggtatagattggcctgggagtgttacagtagggagcaggcttctcccttctttctgggactcagagccccgcttcttcccactccacttgttgtcccatgaaggaagaagtggggttcctcctgacccagctgcctcttacggtttggtatgggacatgcacacacactcacatgctctcactcaccacactggagggcacacacgtaccccgcacccagcaactcctgacagaaagctcctcccacccaaatgggccaggccccagcatgatcctgaaatctgcatccgccgtggtttgtattcattgtgcatatcagggataccctcaagctggactgtgggttccaaattactcatagaggagaaaaccagagaaagatgaagaggaggagttaggtctatttgaaatgccaggggctcgctgtgaggaataggtgaaaaaaaacttttcaccagcctttgagagactagactgaccccacccttccttcagtgagcagaatcactgtggtcagtctcctgtcccagcttcagttcatgaatactcctgttcctccagtttcccatcctttgtccctgctgtcccccacttttaaagatgggtctcaacccctccccaccacgtcatgatggatggggcaaggtggtggggactaggggagcctggtatacatgcggcttcattgccaataaatttcatgcactttaaagtcctgtggcttgtgacctcttaataaagtgttagaatccaaaaaaaaa

SEQ ID NO: 498 - DNA, 1661 bp, Homo sapiens
attgcattcctgggcattgctaactagtgaagtataccagatggaaatgtcttcgaagctgtccctttaaaactcgagcaagctaccaggcaaactccgcctccagggaggttccttattaaataggagccaactggctgggtcggggctcaataccccaagcaatacctgcaactgaggattcttcccggggagaccgcagcccatcggcatggctcaagagtttgtgaactgcaaaatccagcctgggaaggtggttgtgttcatcaagcccacctgcccgtactgcaggagggcccaagagatcctcagtcaattgcccatcaaacaagggcttctggaatttgtcgatatcacagccaccaaccacactaacgagattcaagattatttgcaacagctcacgggagcaagaacggtgcctcgagtctttattggtaaagattgtataggcggatgcagtgatctagtctctttgcaacagagtggggaactgctgacgcggctaaagcagattggagctctgcagtaaccacagaacaggccccatgctgacgtccctcctcaagagctggatggcattgcaaatgatgacagcacttctggtggatgaatttgggggcacaaacagcttttttcctcttttggctcagtatttaaaagtggaccaacttgctcttaatcacagggccaagaaggttgacgggccatcttggttttcttctggatgtgctctttggttttcagaagactgtgacaagttctggcccaggattcgctcactgaccctcaattgtcctctttggcatgcgtttcttactgttctccatgtgtcggcatgtctctacctctaagccagtgtttttcaactatgtttatccagactccttctccacaatgatgaatccacagttggttatctgctactgcccattagctaaaatcattttgctgcttgactttatggagtttgtattatgaaatcagtgggtattttgaatgtgttctttctaactacatgcatctctccactcaactccaccccatcccatcccaccttgaaaatcactgctctgaaccagtgttctccaccttgtcctccacagatctcataggaaatgttcaacaattctgtgaaaggtcacaggacccaattggagaaatcatatgaaaagcatagttggtcttggtgtcatatggatcagaggcacaagtgcagaggctgtggtcatgcggaacactctgttatttaagatggctatccagataatcctgaacactgtgtatttattttatttagactaccagcaaagattaaagcatgaaatgtaaaacatctgataaaacttacagccccctacaccaagagtgtatctgtgaaagagctcctacactttgaaaacttaagaatcccttatcatgaagtttgcctgttctagaattgtaagattgttaatttccttcaatctctagtgacaacacttaatttcttttctaataaaaaaaacctatagatgattcagtgatttttgtccaattcatttgcatgttctcaagacattaaggaatgttatgcgaaatacactaacttaaaactgtgtttatatttggccctgccattataaataaagacacgtgctgctgtcaaaaaaaaaaaaaaa

SEQ ID NO: 499 - DNA, 5144 bp, Homo sapiens
ccctgtccctggctcacgtgatcgcgcctagggagaaaacgtctgactccagccaccggccttcaaggcacggctttttattccttcggctggtcggcctctcgcccttcagctacctgtgcgtccctccgtcccgtcccgtcccggggtcaccccggagcctgtccgctatgcggctcctgcctctagccccaggtcggctccggcggggcagcccccgccacctgccctcctgcagcccagcgctgctactgctggtgctgggcggctgcctgggggtcttcggggtggctgcgggaacccggaggcccaacgtggtgctgctcctcacggacgaccaggacgaagtgctcggcggcatgacaccgctaaagaaaaccaaagctctcatcggagagatggggatgactttttccagtgcttatgtgccaagtgctctctgctgccccagcagagccagtatcctgacaggaaagtacccacataatcatcacgttgtgaacaacactctggaggggaactgcagtagtaagtcctggcagaagatccaagaaccaaatactttcccagcaattctcagatcaatgtgtggttatcagaccttttttgcagggaaatatttaaatgagtacggagccccagatgcaggtggactagaacacgttcctctgggttggagttactggtatgccttggaaaagaattctaagtattataattacaccctgtctatcaatgggaaggcacggaagcatggtgaaaactatagtgtggactacctgacagatgttttggctaatgtctccttggactttctggactacaagtccaactttgagcccttcttcatgatgatcgccactccagcgcctcattcgccttggacagctgcacctcagtaccagaaggctttccagaatgtctttgcaccaagaaacaagaacttcaacatccatggaacgaacaagcactggttaattaggcaagccaagactccaatgactaattcttcaatacagtttttagataatgcatttaggaaaaggtggcaaactctcctctcagttgatgaccttgtggagaaactggtcaagaggctggagttcactggggagctcaacaacacttacatcttctatacctcagacaatggctatcacacaggacagttttccttgccaatagacaagagacagctgtatgagtttgatatcaaagttccactgttggttcgaggacctgggatcaaaccaaatcagacaagcaagatgctggttgccaacattgacttgggtcctactattttggacattgctggctacgacctaaataagacacagatggatgggatgtccttattgcccattttgagaggtgccagtaacttgacctggcgatcagatgtcctggtggaataccaaggagaaggccgtaacgtcactgacccaacatgcccttccctgagtcctggcgtatctcaatgcttcccagactgtgtatgtgaagatgcttataacaatacctatgcctgtgtgaggacaatgtcagcattgtggaatttgcagtattgcgagtttgatgaccaggaggtgtttgtagaagtctataatctgactgcagacccagaccagatcactaacattgctaaaaccatagacccagagcttttaggaaagatgaactatcggttaatgatgttacagtcctgttctgggccaacctgtcgcactccaggggtttttgaccccggatacaggtttgacccccgtctcatgttcagcaatcgcggcagtgtcaggactcgaagattttccaaacatcttctgtagcgacctcacacagcctctgcagatggatccctgcacgcctctttctgatgaagtgattgtagtaggtgtctgtagctagtcttcaagaccacacctggaagagtttctgggctggctttaagtcctgtttgaaaaagcaacccagtcagctgacttcctcgtgcaatgtgttaaactgtgaactctgcccatgtgtcaggagtggctgtctctggtctcttcctttagctgacaaggacactcctgaggtctttgttctcactgtattctttttatcctggggccacagttcttgattattcctcttgtggttaaagactgaatttgtaaacccattcagataaatggcagtactttaggacacacacaaacacacagacacaccttttgatatgtaagcttgacctaaagtcaaaggacctgtgtagcatttcagattgagcacttcactatcaaaaatactaacatcacatggcttgaagagtaaccatcagagctgaatcatccaagtaagaacaagtaccattgttgattgataagtagagatacattttttatgatgttcatcacagtgtggtaaggttgcaaattcaaaacatgtcacccaagctctgttcatgtttttgtgaattctaggctggtgctgcactgaaatagagcagtaagcttgtgataaaggccaattccaggtagctcttgaaggtgatagccatctactttccagtggctgccaaccacagggagtgccagttaacactggaaggattaaggcaaggtcccttctcttgagactcccctctgagatctgaaaaatgaagtggcttaggaacatcagcagtgaagaactgccaagagttggtgaaggttgtctcttccgagggccttctgaagacagggctcttgaacagacaagtggaagggctgtaccagggataaaggaaagaagtgcctgtccagcagggagcttgaatttaagttccatgtatgaagtcattggctctatctgcatttttctgtcattctcttcatttgttttaaggtggaaaattttcttacagttgatgcaaagtatcaactactttaccctaccttctccccttttagatgggttcttcctgagttttggagtcttgtatgattatcagtattcccctgtcaaaatcaaatctattcaggtttcttcactgttgagaacacctaaatgtttttatttttgagaagtggggacagagtctcactatgtcacccaggctggagtgcaatggcatgatctcagctcactgcaaccttcgcctcctgggttcaagcgattctcctgcctccgcctcctgagtagctgggattataggcacgcaccaccacgcccagctaattttttgtatttttagtagagacagagtttcaccatgttggccaggctggtcttgaactcctgaccttgtgatccacccacctcggcctcccagagtgctgggattacaggcatgagccaccacgcttggctaagaacacctaaatttttatgtttcttggctcaaaaaccagttccatttctaatgttgtcctcacaagaaggctaattggtggtgagacagcaggggaggaggaagagctgtggtttgtaacttgttcaactcaggcaataagcgattttagctttatttaaagtcttctgtccagctttaagcactttgtaagacatggctgaaagtagcttttctatcagaattgcagatagtcatgttgggctaacagtcaattggatatattcctttacctcacatgaccccagcaactgtggtggtatctagaggtgaaacaggcaagtgaaatggacacctctgctgtgaatgttttagagaaggaaattcaaaaaatgttgtaactgaaagcactgttgaatatgggtatcggctttctttttcactttgactcttaacattatcagtcaacttccacattaatgaaagttgaccatagttatttccaaataaaaagaaaccaactcttaccaggtcttggactgtgatgtcatattattcagttttatgcttgttcctgagcagaactcataagagtgacatagtcagctgctgacggcacctcagccacgccactcttactcagttcagtgggtgtgcttgcgtggtaggatgtggtgcagccctctctacgctcttctatttttggtatatttcctatctaaccttcaaatagcttccaattctttttttcttggactggcttcattctgaatttgtgctaaaataatctttcataaagagacctcagtttatagcgtaacagactacacaatgcactgatgttttcataatgtttaagggacccactgcaagaagcttgctgcctccttttaattgtattcatttagattttgattttccatgttaagaaggtgaggtccatgttggtgcccttcagagtagagaaccatgtaaacattaggaatgaacagaggccttaggaatgaatagagagtttgccttatacaatttcctgttacaaagctctccctctcatgcaaagtagggaacaccttttgagcatctttgaatttgacaaatggtgctgttgcaaacactttttttttgagatgaagtctcgcggttgtcacccgggctggagtgcagtggcgtgatctcggctcactgcaacttccacctcctgggttccagcagttctcctgcctcagcctcccaagtagctgagattacaggcgcctgccaccccacctggctgatttttgtaattttagtagagacggggtttcaccatgttggccaggctgattaactcctgacctcaggtgatccacctttctcggcctcccaaagtgctgggattacgggtgtgagccaccgtgcccggcctgcaaacacattttaattgacaacactagggctgttgtacaaaatagtaatgatagccatggaagttttaccttattctgtgagaagtgttcttaaacttattaagtgtctaaactaaggtttagtgcttttttaaaggaaagttgtcccaggattcatcctaaagaaagcaaaagttaattcaactgatccaccaatggaattagatgggtagagttgggttcttgagttttaccaccacttagttcccactgaattttgtaacttcctgtgtttgcatcctctgttcctattctgcccttgctctgtgtcatctcagtcatttgacttagaaagtgcccttcaaaaggaccctgttcactgctgcacttttcaatgaattaaaatttatttctgttctagtgggaaaaaaaaaaaaaaaaaa

SEQ ID NO: 500 - DNA, 5607 bp, Homo sapiens
actcttgtcagggccgcggcacatgggcggccggatgcgctgagcccggcgctgcggggccgcggagcgctggggagcagcggccgccggcgcggggaggggggtggggtgggacggcgcaccgcctccggtgctggcactaggggctggggtcggcgcggtgtcttctgcccttctgcagccgtcgacatttttttttctttctttttttcaattttgaacattttgcaaaacgaggggttcgaggcaggtgagagcatcctgcacgtcgccggggagcccgcgggcacttggcgcgctctcctgggaccgtctgcactggaaacccgaaagtttttttttaatatatatttttatgcagatgtatttataaagatataagtaatttttttcttcccttttctccaccgccttgagagcgagtacttttggcaaaggacggaggaaaagctcagcaacattttagggggcggttgtttctttcttatttctttttttaaggggaaaaaatttgagtgcatcgcgatggagaaaatgtcccgaccgctccccctgaatcccacctttatcccgcctccctacggcgtgctcaggtccctgctggagaacccgctgaagctcccccttcaccacgaagacgcatttagtaaagataaagacaaggaaaagaagctggatgatgagagtaacagcccgacggtcccccagtcggcattcctggggcctaccttatgggacaaaacccttccctatgacggagatactttccagttggaatacatggacctggaggagtttttgtcagaaaatggcattccccccagcccatctcagcatgaccacagccctcaccctcctgggctgcagccagcttcctcggctgccccctcggtcatggacctcagcagccgggcctctgcaccccttcaccctggcatcccatctccgaactgtatgcagagccccatcagaccaggtcagctgttgccagcaaaccgcaatacaccaagtcccattgatcctgacaccatccaggtcccagtgggttatgagccagacccagcagatcttgccctttccagcatccctggccaggaaatgtttgaccctcgcaaacgcaagttctctgaggaagaactgaagccacagcccatgatcaagaaagctcgcaaagtcttcatccctgatgacctgaaggatgacaagtactgggcaaggcgcagaaagaacaacatggcagccaagcgctcccgcgacgcccggaggctgaaagagaaccagatcgccatccgggcctcgttcctggagaaggagaactcggccctccgccaggaggtggctgacttgaggaaggagctgggcaaatgcaagaacatacttgccaagtatgaggccaggcacgggcccctgtaggatggcatttttgcaggctggctttggaatagatggacagtttgtttcctgtctgatagcaccacacgcaaaccaacctttctgacatcagcactttaccagaggcataaacacaactgactcccattttggtgtgcatctgtgtgtgtgtgcgtgtatatgtgcttgtgctcatgtgtgtggtcagcggtatgtgcgtgtgcgtgttcctttgctcttgccattttaaggtagccctctcatcgtcttttagttccaacaaagaaaggtgccatgtctttactagactgaggagccctctcgcgggtctcccatcccctccctccttcactcctgcctcctcagctttgcttcatgttcgagcttacctactcttccaggactctctgcttggattcactaaaaagggccctggtaaaatagtggatctcagtttttaagagtacaagctcttgtttctgtttagtccgtaagttaccatgctaatgaggtgcacacaataacttagcactactccgcagctctagtcctttataagttgctttcctcttactttcagttttggtgataatcgtcttcaaattaaagtgctgtttagatttattagatcccatatttacttactgctatctactaagtttccttttaattctaccaaccccagataagtaagagtactattaatagaacacagagtgtgtttttgcactgtctgtacctaaagcaataatcctattgtacgctagagcatgctgcctgagtattactagtggacgtaggatattttccctacctaagaatttcactgtcttttaaaaaacaaaaagtaaagtaatgcatttgagcatggccagactattccctaggacaaggaagcagagggaaatgggaggtctaaggatgaggggttaatttatcagtacatgagccaaaaactgcgtcttggattagcctttgacattgatgtgttcggttttgttgttccccttccctcacaccctgcctcgcccccacttttctagttaactttttccatatccctcttgacattcaaaacagttacttaagattcagttttcccactttttggtaatatatatatttttgtgaattatactttgttgtttttaaaaagaaaatcagttgattaagttaataagttgatgttttctaaggccctttttcctagtggtgtcatttttgaatgcctcataaattaatgattctgaagcttatgtttcttattctctgtttgcttttgaacgtatgtgctcttataaagtggacttctgaaaaatgaatgtaaaagacactggtgtatctcagaaggggatggtgttgtcacaaactgtggttaatccaatcaatttaaatgtttactatagaccaaaaggagagattattaaatcgtttaatgtttatacagagtaattataggaagttcttttttgtacagtatttttcagatataaatactgacaatgtattttggaagacatatattatatatagaaaagaggagaggaaaactattccatgttttaaaattatatagcaaagatatatattcaccaatgttgtacagagaagaagtgcttgggggtttttgaagtctttaatattttaagccctatcactgacacatcagcatgttttctgctttaaattaaaattttatgacagtatcgaggcttgtgatgacgaatcctgctctaaaatacacaaggagctttcttgtttcttattaggcctcagaaagaagtcagttaacgtcacccaaaagcacaaaatggattttagtcaaatatttattggatgatacagtgttttttaggaaaagcatctgccacaaaaatgttcacttcgaaattctgagttcctggaatggcacgttgctgccagtgccccagacagttcttttctaccctgcgggcccgcacgttttatgaggttgatatcggtgctatgtgtttggtttataatttgatagatgtttgactttaaagatgattgttcttttgtttcattaagttgtaaaatgtcaagaaattctgctgttacgacaaagaaacattttacgctagattaaaatatcctttcatcaatgggattttctagtttcctgccttcagagtatctaatcctttaatgatctggtggtctcctcgtcaatccatcagcaatgcttctctcatagtgtcatagacttgggaaacccaaccagtaggatatttctacaaggtgttcattttgtcacaagctgtagataacagcaagagatgggggtgtattggaattgcaatacattgttcaggtgaataataaaatcaaaaacttttgcaatcttaagcagagataaataaaagatagcaatatgagacacaggtggacgtagagttggcctttttacaggcaaagaggcgaattgtagaattgttagatggcaatagtcattaaaaacatagaaaaatgatgtctttaagtggagaattgtggaaggattgtaacatggaccatccaaatttatggccgtatcaaatggtagctgaaaaaactatatttgagcactggtctctcttggaattagatgtttatatcaaatgagcatctcaaatgttttctgcagaaaaaaataaaaagattctaataaaatgtattctcttgtgtgccaggagaggtttcagaaacctacctcgtcttacaaatttaaacactttggagtctgtacaggtgccttatatgtaggtcattgtcacgatacacacacacgaacactccctctggactggctgcctctccatccagggcagttaactagcaaacaaggcagatctgcttcatggagcgggaggccatggcttgactctgagtgatttgggtcaaccggagtcagacgcatgtctgcacgctgcagctattatgagagtccctttgtcatttttcaccttttcatcctaagcatctttcagagattaattatttggccattaacaatgaatccaaatcatatcatactgacatcatctagacatgatttggaaggaacagcttaggacctcctgatgaggtcacattgttgtttcttttaactagacttggcaaagaaaggcaaaaattgaccagcctatctttctgctggtgctgccttaaggaggtagtttgttgaggggagggctgtagatcattacttctttctcttcaggaagtggccactttgaaccattcaaataccacattaggcaagactgtgataggccttttgtcttcaaatacaacaggcctccactgacccatccctcaaagcagaaggaccctttgaggagagtacagatgggattccacagtggggtgggtggaatggaaacctgtactagaccacccagaggttccttctaacccactggtttggtggggaactcacagtaattccaaatgtacaatcagatgtctagggtctgttttcggaagaagcaagaattatcagtggcaccctccccactgcccccagtgtaaaacaatagacattctgtgaaatgcaaagctattctttggtttttctagtagtttatctcattttaccctattcttcctttaaggaaaactcaatctttatcacagtcaattagagcgatcccaaggcatgggaccaggcctgcttgcctatgtgtgatggcaattggagatctggatttagcactggggtctcagcaccctgcaggtgtctgagactaagtgatctgccctccaggtggcgatcaccttctgctcctaggtacccccactggcaaggccaaggtctcctccacgttttttctgcaattaataatgtcatttaaaaaatgagcaaagccttatccgaatcggatatagcaactaaagtcaatacattttgcaggaggctaagtgtaagagtgtgtgtgtgtgtgtgtgcgtgcatgtgtgtgtgtgtgtatgtgtgtgaataagtcgacataaagtctttaattttgagcaccttaccaaacataacaataatccattatccttttggcaacaccacaaagatcgcatctgttaaacaggtacaagttgacatgaggttagtttaattgtacaccatgatattggtggtatttatgctgttaagtccaaacctttatctgtctgttattcttaatgttgaataaactttgaattttttcctttcaaaaaaaa

SEQ ID NO: 501 - DNA, 1998 bp, Homo sapiens
catttgcatggccccgccccctgagtgacacggctggcgcgggcgggcccgtcccccctgcccctgggtcgctctttttaagctcccctgagccggtgctgcgctcctctaattgggactccgagccggggctatttctggcgctggcgcggctccaagaaggcatccgcatttgctaccagcggcggccgcggcggagccaggccggtcctcagcgcccagcaccgccgctcccggcaacccggagcgcgcaccgcaggccggcggccgagctcgcgcatcccagccatcactcttccacctgctccttagagaagggaagatgagtgagtcgagctcgaagtccagccagcccttggcctccaagcaggaaaaggacggcactgagaagcggggccggggcaggccgcgcaagcagcctccgaaggagcccagcgaagtgccaacacctaagagacctcggggccgaccaaagggaagcaaaaacaagggtgctgccaagacccggaaaaccaccacaactccaggaaggaaaccaaggggcagacccaaaaaactggagaaggaggaagaggagggcatctcgcaggagtcctcggaggaggagcagtgacccatgcgtgccgcctgctcctcactggaggagcagcttccttctgggactggacagctttgctccgctcccaccgcccccaccccttccccaggcccaccatcaccaccgcctctggccgccacccccatcttccacctgtgccctcaccaccacactacacagcacaccagccgctgcagggctcccatgggctgagtggggagcagttttcccctggcctcagttcccagctccccccgcccacccacgcatacacacatgccctcctggacaaggctaacatcccacttagccgcaccctgcacctgctgcgtccccactcccttggtggtggggacattgctctctgggcttttggtttgggggcgccctctctgctccttcactgttccctctggcttcccatagtggggcctgggagggttcccctggccttaaaaggggcccaagccccatctcatcctggcacgccctactccactgccctggcagcagcaggtgtggccaatggaggggggtgctggcccccaggattcccccagccaaactgtctttgtcaccacgtggggctcacttttcatccttccccaacttccctagtccccgtactaggttggacagcccccttcggttacaggaaggcaggaggggtgagtcccctactccctcttcactgtggccacagcccccttgccctccgcctgggatctgagtacatattgtggtgatggagatgcagtcacttattgtccaggtgaggcccaagagccctgtggccgccacctgaggtgggctggggctgctcccctaaccctactttgcttccgccactcagccatttccccctcctcagatggggcaccaataacaaggagctcaccctgcccgctcccaacccccctcctgctcctccctgccccccaaggttctggttccatttttcctctgttcacaaactacctctggacagttgtgttgttttttgttcaatgttccattcttcgacatccgtcattgctgctgctaccagcgccaaatgttcatcctcattgcctcctgttctgcccacgatcccctcccccaagatactctttgtggggaagaggggctggggcatggcaggctgggtgaccgactaccccagtcccagggaaggtggggccctgcccctaggatgctgcagcagagtgagcaagggggcccaaatcgaccataaagggtgtaggggccacctcctccccctgttctgttggggaggggtagccatgatttgtcccagcctggggctccctctctggtttcctatttgcagttacttgaataaaaaaaatatccttttctggaaaaaaaaaaaaaaaaaaaaaaaaaaaaaaaaaaaaaaa

SEQ ID NO: 502 - DNA, 1740 bp, Homo sapiens
ccagcgttagcccgcggccaggcagccgggaggagcggcgcgcgctcggacctctcccgccctgctcgttcgctctccagcttgggatggccggctacctgcgggtcgtgcgctcgctctgcagagcctcaggctcgcggccggcctgggcgccggcggccctgacagcccccacctcgcaagagcagccgcggcgccactatgccgacaaaaggatcaaggtggcgaagcccgtggtggagatggatggtgatgagatgacccgtattatctggcagttcatcaaggagaagctcatcctgccccacgtggacatccagctaaagtattttgacctcgggctcccaaaccgtgaccagactgatgaccaggtcaccattgactctgcactggccacccagaagtacagtgtggctgtcaagtgtgccaccatcacccctgatgaggcccgtgtggaagagttcaagctgaagaagatgtggaaaagtcccaatggaactatccggaacatcctgggggggactgtcttccgggagcccatcatctgcaaaaacatcccacgcctagtccctggctggaccaagcccatcaccattggcaggcacgcccatggcgaccagtacaaggccacagactttgtggcagaccgggccggcactttcaaaatggtcttcaccccaaaagatggcagtggtgtcaaggagtgggaagtgtacaacttccccgcaggcggcgtgggcatgggcatgtacaacaccgacgagtccatctcaggttttgcgcacagctgcttccagtatgccatccagaagaaatggccgctgtacatgagcaccaagaacaccatactgaaagcctacgatgggcgtttcaaggacatcttccaggagatctttgacaagcactataagaccgacttcgacaagaataagatctggtatgagcaccggctcattgatgacatggtggctcaggtcctcaagtcttcgggtggctttgtgtgggcctgcaagaactatgacggagatgtgcagtcagacatcctggcccagggctttggctcccttggcctgatgacgtccgtcctggtctgccctgatgggaagacgattgaggctgaggccgctcatgggaccgtcacccgccactatcgggagcaccagaagggccggcccaccagcaccaaccccatcgccagcatctttgcctggacacgtggcctggagcaccgggggaagctggatgggaaccaagacctcatcaggtttgcccagatgctggagaaggtgtgcgtggagacggtggagagtggagccatgaccaaggacctggcgggctgcattcacggcctcagcaatgtgaagctgaacgagcacttcctgaacaccacggacttcctcgacaccatcaagagcaacctggacagagccctgggcaggcagtagggggaggcgccacccatggctgcagtggaggggccagggctgagccggcgggtcctcctgagcgcggcagagggtgagcctcacagcccctctctggaggcctttctaggggatgtttttttataagccagatgtttttaaaagcatatgtgtgtttcccctcatggtgacgtgaggcaggagcagtgcgttttacctcagccagtcagtatgttttgcatactgtaatttatattgcccttggaacacatggtgccatatttagctactaaaaagctcttcacaaaaaaaaaaa

SEQ ID NO: 503 - DNA, 1282 bp, Homo sapiens
aagccacccagcctatgcatccgctcctcaatcctctcctgttggcactgggcctcatggcgcttttgttgaccacggtcattgctctcacttgccttggcggctttgcctccccaggccctgtgcctccctctacagccctcagggagctcattgaggagctggtcaacatcacccagaaccagaaggctccgctctgcaatggcagcatggtatggagcatcaacctgacagctggcatgtactgtgcagccctggaatccctgatcaacgtgtcaggctgcagtgccatcgagaagacccagaggatgctgagcggattctgcccgcacaaggtctcagctgggcagttttccagcttgcatgtccgagacaccaaaatcgaggtggcccagtttgtaaaggacctgctcttacatttaaagaaactttttcgcgagggacagttcaactgaaacttcgaaagcatcattatttgcagagacaggacctgactattgaagttgcagattcatttttctttctgatgtcaaaaatgtcttgggtaggcgggaaggagggttagggaggggtaaaattccttagcttagacctcagcctgtgctgcccgtcttcagcctagccgacctcagccttccccttgcccagggctcagcctggtgggcctcctctgtccagggccctgagctcggtggacccagggatgacatgtccctacacccctcccctgccctagagcacactgtagcattacagtgggtgccccccttgccagacatgtggtgggacagggacccacttcacacacaggcaactgaggcagacagcagctcaggcacacttcttcttggtcttatttattattgtgtgttatttaaatgagtgtgtttgtcaccgttggggattggggaagactgtggctgctagcacttggagccaagggttcagagactcagggccccagcactaaagcagtggacaccaggagtccctggtaataagtactgtgtacagaattctgctacctcactggggtcctggggcctcggagcctcatccgaggcagggtcaggagaggggcagaacagccgctcctgtctgccagccagcagccagctctcagccaacgagtaatttattgtttttccttgtatttaaatattaaatatgttagcaaagagttaatatatagaagggtaccttgaacactgggggaggggacattgaacaagttgtttcattgactatcaaactgaagccagaaataaagttggtgacagat

SEQ ID NO: 504 - DNA, 8787 bp, Homo sapiens
ggcgggtgcttctagggcgctcccagagccgcctccccctgttgctggcatcccgagcttcctcccttgccagccaggacgctgccgacttgtctttgcccgctgctccgcagacggggctgcaaagctgcaactaatggtgttggcctccctgcccacctgtggaagcaactgcgctgattgatgcgccacagacttttttcccctcgacctcgccggcgtcccctcccacagatccagcatcacccagtgaatgtacattagggtggtttcccccccagcttcgggctttgtttgggtttgattgtgtttggctcttcgctaagctgatttatgcagcagaagccccaccggctggagagaaacaaaagctcttttctttgtcccggagcaggctgcggagcccttgcagagccctctctccagtcgccgccggggcccttggccgtcgaaggaggtgcttctcgcggagaccgcgggacccgccgtgccgagccgggagggccgcaggggccctgagatgccgagcggtgcccgggcccgcttacctgcaccgcttgctccgagccgcggggtccgcctgctaggcctgcggaaaacgtcctagcgacactcggcccgcgggccccgaggtgcgcccgggaggcgcgagcccgcgtccggaaggcagtcaggcggcgggcgcggggcgggctgttttgcattatgtgcggctcggccctggctttttttaccgctgcatttgtctgcctgcaaaacgaccggcgaggtcccgcctcgttcctctgggcagcctgggtgttttcacttgttcttggactgggccaaggtgaagacaatagatgtgcatcttcaaatgcagcatcctgtgccaggtgccttgcgctgggtccagaatgtggatggtgtgttcaagaggatttcatttcaggtggatcaagaagtgaacgttgtgatattgtttccaatttaataagcaaaggctgctcagttgattcaatagaatacccatctgtgcatgttataatacccactgaaaatgaaattaatacccaggtgacaccaggagaagtgtctatccagctgcgtccaggagccgaagctaattttatgctgaaagttcatcctctgaagaaatatcctgtggatctttattatcttgttgatgtctcagcatcaatgcacaataatatagaaaaattaaattccgttggaaacgatttatctagaaaaatggcatttttctcccgtgactttcgtcttggatttggctcatacgttgataaaacagtttcaccatacattagcatccaccccgaaaggattcataatcaatgcagtgactacaatttagactgcatgcctccccatggatacatccatgtgctgtctttgacagagaacatcactgagtttgagaaagcagttcatagacagaagatctctggaaacatagatacaccagaaggaggttttgacgccatgcttcaggcagctgtctgtgaaagtcatatcggatggcgaaaagaggctaaaagattgctgctggtgatgacagatcagacgtctcatctcgctcttgatagcaaattggcaggcatagtggtgcccaatgacggaaactgtcatctgaaaaacaacgtctatgtcaaatcgacaaccatggaacacccctcactaggccaactttcagagaaattaatagacaacaacattaatgtcatctttgcagttcaaggaaaacaatttcattggtataaggatcttctacccctcttgccaggcaccattgctggtgaaatagaatcaaaggctgcaaacctcaataatttggtagtggaagcctatcagaagctcatttcagaagtgaaagttcaggtggaaaaccaggtacaaggcatctattttaacattaccgccatctgtccagatgggtccagaaagccaggcatggaaggatgcagaaacgtgacgagcaatgatgaagttcttttcaatgtaacagttacaatgaaaaaatgtgatgtcacaggaggaaaaaactatgcaataatcaaacctattggttttaatgaaaccgctaaaattcatatacacagaaactgcagctgtcagtgtgaggacaacagaggacctaaaggaaagtgtgtagatgaaacttttctagattccaagtgtttccagtgtgatgagaataaatgtcattttgatgaagatcagttttcttctgagagttgcaagtcacacaaggatcagcctgtttgcagtggtcgaggagtttgtgtttgtgggaaatgttcatgtcacaaaattaagcttggaaaagtgtatggaaaatactgtgaaaaggatgacttttcttgtccatatcaccatggaaatctgtgtgctgggcatggagagtgtgaagcaggcagatgccaatgcttcagtggctgggaaggtgatcgatgccagtgcccttcagcagcagcccagcactgtgtcaattcaaagggccaagtgtgcagtggaagaggcacgtgtgtgtgtggaaggtgtgagtgcaccgatcccaggagcatcggccgcttctgtgaacactgccccacctgttatacagcctgcaaggaaaactggaattgtatgcaatgccttcaccctcacaatttgtctcaggctatacttgatcagtgcaaaacctcatgtgctctcatggaacaacagcattatgtcgaccaaacttcagaatgtttctccagcccaagctacttgagaatatttttcatcattttcatagttacattcttgattgggttgcttaaagtcctgatcattagacaggtgatactacaatggaatagtaataaaattaagtcctcatcagattacagagtgtcagcctcaaaaaaggataagttgattctgcaaagtgtttgcacaagagcagtcacctaccgacgtgagaagcctgaagaaataaaaatggatatcagcaaattaaatgctcatgaaactttcaggtgcaacttctaaaaaaagatttttaaacacttaatgggaaactggaattgttaataattgctcctaaagattataattttaaaagtcacaggaggagacaaattgctcacggtcatgccagttgctggttgtacactcgaacgaagactgacaagtatcctcatcatgatgtgactcacatagctgctgactttttcagagaaaaatgtgtcttactactgtttgagactagtgtcgttgtagcactttactgtaatatataacttatttagatcagcatagaatgtagatcctctgaagagcactgattacactttacaggtacctgttatccctacgcttcccagagagaacaatgctgtgagagagtttagcattgtgtcactacaagggtacagtaatccctgcactggacatgtgaggaaaaaaataatctggcaagtatattctaaggttgccaaacacttcaacagttggtggttgaatagacaagaacagctagatgaataaatgattcgtgtttcactctttcaagaggtgaacagatacaaccttaatcttaaaagattattgctttttaaagtgtgtagttttatgcatgtgtgtttatggtttgcttatttttgcaagatggatactaattccagcattctctcctctttgcctttatgttttgttttcttttttacaggataagtttatgtatgtcacagatgactggattaattaagtgctaagttactactgccataaaaaactaataatacaatgtcactttatcagaatactagttttaaaagctgaatgttaataggggacactgtaaagtatcatcaaaacctgaatagcttcattgtgcacaagtgtggagttttgtatcctcttacctggtaaactgaagggattgtttggccatttcatttatcttatcattaattcacaagatagttagaaattctgcctcaagcaaagtaccacattttgaatgttttcttagattttgattgcaagtagatatcagcattttttaaatgaaaagctatattatcttctcccttcaaggcagcctaaggatgttctttcccagaatcactccaacccttcttgccagaattcataaaagtacaaaattggagaatagatgatatcttagaaataagctttttttttttttttttttttttttgagacggagtttcactcttgtcacccaggctgaagtgcaatggcgcaattagggttcactgcaacctctgcctcccgggttcaagcagttctcctgcctcagcctcctgagtagctgggattacaggcatccaccaccgtgcccagctaatttttgtatttttagtagagacggggttttgccatgttggacaggttgatctcaaactcctgacctcaggtgatctaccctcctcggcctcccagagtgttgggattacaggcatgagccaccatgccaggctgctaattctcctttttagtgagttagggaactgagcctcagaaaacttaaacgatttctcagaaaacactcaagtgataaagtggccacattggaaaggagtttttatcttctcattgtcaggccagtgttcattgcacaatatcatgctacctcttgaatctttaaaatattcaattggcaaatgtttttcaatgtgatttactcatgtcttaagtgtatgaggaaagttcaaagcaaaatagaaaggaataattcaaactgaattgtccataatcagcttccagtctttcatgctaatcagcttcttaagagactgaagtatggcatacctacaggggaattccttcgcaccatagcctgtatgaacagtgttccctggagttctccagtgctcagcttgagaccttgatacacgggccatgagccctgtcttccccaatggaaatttatttacacttaccttatccctatggacttagtctgattttattggctaggagtctaacagtcctgtgtggatatacagttttgcccatgacaacaaaggaatctatccgaaatatctttttttttataataaacttccaagatttgctgtcttccagcacttgagttaaagtactagatactgcattttgatgaagactaaccccatctcatattctaccctaaagagaactgaaaaacctataataagttgttctggagccaataaacacagcagctctgttagatgtcctctacagccaagcactttcaatgctaacttgaactgcatttccttcctcaaatgagagattgacataattcagtactgtgagtcacttgtataagaaacctttgatcactaaaaataatgtaaaaattgggtttagtagcctaatacacataacgttcttcttaaaaaggaaaatggatggatgcctgacaaccctccaaaagaaaaaagtgtaagatagccattaagatgatgacaatttttgaaatgaacattatgatatttatgaacaataaacaaatttccgtatggaatgaattatccaaaaagagtataacaaaatgaaatccttaaaaatccagagtttatattttttttataccctcacttgtttgcactaactttatagtggaccaaggctgttaccataggaagggacaaacttccttgtaggcaactcagtgttagacgatgattgtggttatgcttgcaaagtcttgtgcttatcttttttgtttttacttaaaaagctaatttttaaagattgtagggcttgtattttacttgaataattgatatcttcctgtgtaatgatttgtgagatgagaattaatatttgactagttagaattaattaaatggtaagggaacacagggtactcttaggttaaataatgtatgcaaatagagtctattttcaactaatatggccacaggagccttttgagattcattgatattaaacacaattaatgaaattttaaattgttaacagaattgagaacttgaacaacacttttagtactgcagcatttttgtgccctaaagtatgtaatgatttataaatgtgccatacatacactacaacataacatttgctttgttatgcattttatttctctggggacaccattgcactgcagtgcacacgtatttataaacatttgttatatttttggaaacttgctaatatttattaagtcatagacttttctggaggacttaaaaattcactaaaaatctgattatgtcttaaatgttcagtttatctttggtttattaaaataaaaaaaaaatctaagattaaacacagtagatatctctggaggcaattttccaaaactcaacattaaaatttgtggatgcatgagatgcaatccttcaaagaatgaatctgaaatatatttttaatatttacttaatatccactgaagatatctttatgcaagacaagagtcagccatcagacactgaaatatattatgatagattatgaagaattttctctgtagaattatattcttcctggaacctggtagagtagattagactcaaaggctttttcttccttttcttactcctgttttttccactcactcttcccaagagatttcctaaagcttcaagcttaataagcctaatagtgaaaaataactgaatttaatggtataatgaagttcttcatttccagacatctttaattgatcttaaagctcatttgagtctttgcccctgaacaaagacagacccattaaaatctaagaattctaaattttcacaactgtttgagcttcttttcattttgaaggatttggaatatatatgttttcataaaagtatcaagtgaaatatagttacatgggagctcaatcatgtgcagattgcattctgttatgttgactcaatatttaatttacaactatccttatttatattgacctcaagaactccattttatgcaatgcagaccactgagatatagctaacattctttcaaataattttccttttcttttataattcctctatagcaaatttttatgtataactgattatacatatccatatttatatttcattgattccaagacatcactttttcaatttaacatctctgaaattgtgacatttcttgcaactgttggcacttcagatgcagtgtttaaaattatgcttgaataaatattacactaatccaactttacctaaatgtttatgcatctaggcaaattttgttttcttataaagatttgagagcccatttatgacaaaatatgaaggcgaaatttaaggacaactgagtcacgcacaactcaacatggagcctaactgattatcagctcagatcccgcatatcttgagtttacaaaagctctttcaggtccccatttatactttacgtgagtgcgaatgatttcagcaaaccctaacttaactaacaagaatgggtaggtatgtctacgtttcattaacaaatttttattatttttattctattatatgagatccttttatattatcatctcacttttaaacaaaattaactggaaaaatattacatggaactgtcatagttaggttttgcagcatcttacatgtcttgtatcaatggcaggagaaaaatatgataaaaacaatcagtgctgtgaaaaacaactttcttctagagtcctcttactttttattcttctttatcatttgtgggtttttcccccttggctctgatcactttaacttcaagcttatgtaacgactgttataaaactgcatatttaaattatttgaattatatgaaataattgttcagctatctgggcagctgttaatgtaaacctgagagtaataacactactcttttatctacctggaatacttttctgcataaaatttatctttgtaagctaactctattaatcaggtttcttctagcctctgcaacctacttcagttagaattgtctaatactgctctattaatcaggtttctagcctctacaacctacttcagttaaaattgtctaatacagcaatatttaaaaaaaaaacactgcaattgtcaaggatggaaaatgtgtgatttgtgtaaacaatttttaccaactttacattttcctacagataaatgtgaaattttgataagaagtctacgcaatgacaagtatggtacataaattttattaagaatattgagtataaagtactttaattctaaattataagaaaatatacatttgcacatattaatatagaaattcattttgtgtatatttaacatagcttttaaactattttacattagctacttcattatggtttcttgaacttctgaaaaaaattagaaatgtattaaacttatcagtaacataaaaacttattttgtttcacctaacgaatactgcgtttgtaaaaataaatttaatatagaatatatttttaaattaaatatttgaatataaaatagctctaagaaagaagcaaattatcactgaacatatttcttattatttctggctttgaattatacgtaacttaaattgtcttaaatgatacagaatattggagaatatgatactttcacataatatactatgaacctgttcatataactctgattgactactaacttctgttttatgtatttattaaagagctgacactgtagtttgtggtgagatgtttatttttctaacagagcttataacagttaggacaaggcatttaattaatgcatcattctgtttagtagtaggtgttaatcaatatgaaattctctgttttaaaataaaaatgtaaaaatctaagaataaaaaaaaaaa

SEQ ID NO: 505 - DNA, 5982 bp, Homo sapiens
aagcttactggtgaggcaagtgtgcgtctatttccatggcgccctggctcgcggcagcccctggctgggcgaggggtgtgatgtgggagtggggtgggagggggcagcaggcggggcctgccacgtcacttggagagtgtgtgttgggaaggaagggcagagcggagagccgagccgctgcagctgcggcggcggcagcgaagccttgagccgtggggaggtgggtccccgcgctcgggcgccggggcagccccgggccctctgcgaggcctgcggcgcggctcctagggaggaggtggcggctgtggcggccggaaccgcgaccttggccggacccagccccgcggtggacgcagggcggaggccgagccccgccaggagtctttgccgagccggagggaggcgcatctggcgcttcggtaccagcggcagccgggggtccggagcggctggaggagcgcagtgggaactgggaagagctagcccggctggagggcggacctctgcgtccgggagccgggtctcaggcaccgctgggggcgaagccacgcgtcttttcgggcagccaatttcacacgcgcctgtgtgcggttccgggcatcccagtaagctctagcacccgggcgcgggtaacgggaagcgcagaaccaaatccccagcgcccaggtcacctccccagacccagccttgcagggaccagggctttagggctcacggacccaacggccaggtcagaccgcgaaccgggaggagcgcgggccccaccctaaagagggcgcagccgggagctggggagcgggtgccgcgctccagagattgtgtcgtgggcgccgtcctagtggcggggagcgcacctccgagggggcatgagatcggagaaatcccttacgctggcggcgccgggggaggtccgtgggccggagggagagcaacaggatgcgggagacttcccggaggccggcgggggcgggggctgctgtagtagcgagcggctggtgatcaatatctccgggctgcgctttgagacacaattgcgcaccctgtcgctgtttccggacacgctgctcggagaccctggccggcgagtccgcttcttcgaccccctgaggaacgagtacttcttcgaccgcaaccggcccagcttcgacgccatcctctactactaccagtctgggggccgcctgcggaggccggtcaacgtgcccctggacattttcctggaggagatccgcttctaccagctgggggacgaggccctggcggccttccgggaggacgagggctgcctgcccgaaggtggcgaggacgagaagccgctgccctcccagcccttccagcgccaggtgtggctgctctttgagtacccagagagctctgggccggccaggggcatcgccatcgtctccgtgttggtcattctcatctccatagtcatcttttgcctggagaccttaccccagttccgtgtagatggtcgaggtggaaacaatggtggtgtgagtcgagtctccccagtttccagggggagtcaggaggaagaggaggatgaagacgattcctacacatttcatcatggcatcacccctggggaaatggggaccgggggctcctcctcactcagtactcttgggggctccttctttacagaccccttctttctggtggagacgctgtgcattgtctggttcacttttgagctcctggtgcgcttctccgcctgccctagcaagccggccttcttccggaacatcatgaacatcattgacttggtggctatcttcccctacttcatcaccctgggcactgagctggtgcagcagcaggagcagcaaccagccagtggaggaggcggccagaatgggcagcaggccatgtccctggccatcctccgagtcatccgcctggtccgggtgttccgcatcttcaagctctcccgccactccaaggggctgcagatcctgggcaagaccttgcaggcctccatgagggagctggggctgctcatcttcttcctcttcatcggggtcatcctcttctccagtgccgtctacttcgcagaggctgacgatgacgattcgctttttcccagcatcccggatgccttctggtgggcagtggttacaatgaccacggtaggttacggggacatgtaccccatgactgtggggggaaagatcgtgggctcgctgtgtgccatcgctggggtcctcaccattgccctgcctgtgcccgtcatcgtctccaacttcaactacttctaccaccgggagacggagcaggaggagcaaggccagtatacccacgtcacttgtgggcagcctgcgccggacctgagggcaactgacaacggacttggcaagcctgacttccccgaggctaaccgggaacggagacccagctaccttcctacaccacatcgggcctatgcagagaaaagaatgctcacggaggtctgacccatgcaggcagggcctgcaggaggggagcactgagctaacagtctcttaggcttccttctcatttccactactcactctagcttcagttgacttcttgactctctcccctacacccactacctggcatccaggaccaaatacctggactatcaaccttgttgcttaatccctgcagcattcaaggttaatccatctaagtgacatttttgaaattccagcggtgccacccaatcatgcccagcttctgtcatatgaatgagatatacatttatgtctgaccttccctcaagactgatttttcatgtctgggacttacaatatctcaaggaacagcaatgtcaacaggatggaaaccagccctatctgagtcttcgctccctccttagtgttctttgctttgggtcatgtgcgtttcctagcttcaggctacttggtaactggaagaagctggaggacagaagcagtactcaacttgctgttattccagtgccctgtaacaatcactggtcctcctgcagatgacccttggtagagtctttatttgcatagcctcaaaataggttattcgtttctaaacttggatggaattagagaatacaatcaaactttaccacttggaggacacggggttagtccaggaccaaagaggccaatggatttttcaaagtgtgccccagcacaagaggcactggtgttcggtctacatttagttctccccactctgatcccctgactctccagcttccaggaaggttccttctcagagccaaatactctttgtgcaagtgccttcctgagcagaagaactggagaaagggaaccacagagccaggaggaatgtctgagcagagtcaagcaactggcttgaccacagtctgaagcaaggtgccacttaaacagatactgttttctcaaaggggcagaggaatcgtgttgcagatggcagccttttctccttcattttccccacattttctctggccctctaccttgcttcctgggagtttgatttaggattgctgttgaaggcttcctcaggcaaactccagcttaaagccctagacaggtaaaagcacacattggatggcagcatgggtttcttcccattttatgggcatgaaatatgtggtttagaataaggaacaagcattattcctttgccaacagcctcactctaagaggcttttttgctgagtcaagcaaacacttgcctgctctgccccttggagctgcatttgacctgctctcactggtaaggtgacttggtggcgttcccacttgatttagccattttcttccattgtgagaccactgccatctatccacctgcccacctccccttttgtttctcagtaacattgccatttgttttttgcctttgataaactgtgatgtactgttctgagatcttttgggtgcagttctgaaactgaaaggactgttaacatgtttttaattttatatctatgctttcagactctttgatgataattttttttttaaaaattattctctcgaagagcaacttacgagaggacagccttatgagggtttgcttgagaggcagtgtggcttctgtgactgccagctctaaatctcgatcttgccataactttacagggtaacttgggtccacagtcactctttgtgcctcagtttacccacccattaaatgggaacattactgtcttcccctccctacctcatggggaatgtctgggaagctggggacattgctatgcaaatgtgtgaatcttagtcatggatttgatttttagttatccccatacccccataggcaaggccttcccccagagttcctgctttggatccaaagcctgagaataggccattatggaccattggctccctaaatccctccttggcctcttggactgagcccctcagcctttcttcttacccttcagaaaggagagttctctttagatatgttcagggggatccttccatggctggaggtcaccttgactgggggcttggcttctccaaacctgaaacacagtagaagatagagatgtttatgatgcaaaaacctgctctgaggtcagaaagtgctagttttccaaatctctcccattgctgctggctatctggggaaagaagagaaaagcccattccagaggcagaagggaagctcccagccgagggtaaaagttgagacctgtatgcatgtatctctgtatatgtgtatgtaatcaccctcatcaccatccctgagaaaacattttcttttcaagtcagagcacgcctgaaagggtttgtggagagcccagctcaccagggactctggttgccgtagcaaccttccagactgttctctctatcttctgctttgggcatcaagggagaccaggggactacatcttcccagcttctcaaatgggagcacctcccacatcgtggcttaggggctgggagtgccagggcacggatgtgggacttttggaaaatgtggaggaagcagggcctcaaagcttcctgtctggacttttcttcctagtttccccacccagtcattgaagctgcctcatcttactcctgattcttcagaaatttgaatgttaagcaaccagttaaaccaacgtcagtattaattttttcaagctgtcgaggggagcccttagaggggacaacttcttggagtggcggccaagctgggccttaccaggtgtgatcatagtcttaggtatcatggagttcccatctccgcagaggcaggctcttcccagctccacgagaggcggagaattgcaacttcttcctctctgggaacggcctatctagctcctgggaggaatctcaaagatctttcttcttaagacatcgaagaaaaactgagaggctgtagctcgacctagtttctgtgaagaattttgtcaagtgatccctctcggaccctgagcctctttatttggattttgtgccttgagcaccaagagaatatgcactctgggttgcctggacagctggggtggtgattcacaggaagggtccaagccatcactacacctgactcaagccggaaagagctcccagaggacttcctggagctgccagcctcagcctgagatgcgggatattcgtccccaaggagcgaggagggacagctcgccttctttgcaggaaaaatgctggcaggtggtgcaagcaaggacatctatgcatagaattctgacagcagctggaccctcaacttcttcagaagacgagaaccctgcctggcaccgctggcaggcatctggcctgacaccgctctggaggcctcccacaagcagcaaccaagccagaaaaagttgagaccagacccgttgtccctaaagatggggcccagaatgttggggtgaagctgtaggaacagggtgaaagctggtggtgtgagcaaagagaccagctatggggtggtcaggggattccgggaggtgcatgggtatgttgcagacccccccaggacaagggtggctgtggaagaatggcaaataaacacaaggcaaagtctcaaaaa

SEQ ID NO: 506 - DNA, 6889 bp, Homo sapiens
gcactgcgaacgccggctgagctgagtctcgctgctcggtgcgaggcggcggagagcgaggcctggtgagcaccgccgaggcgcgggccagctcttcgaggttgtgcgcgggagtggcacggcgggcgggcgagcgaggggctaacttcagcggtggcaccgggatcggttgccttgagcctgaaatcatgaccaccccaggaaaagagaactttcgcctgaaaagttacaagaacaaatctctgaatcccgatgagatgcgcaggaggagggaggaagaaggactgcagttacgaaagcagaaaagagaagagcagttattcaagcggagaaatgttgctacagcagaagaagaaacagaagaagaagttatgtcagatggaggctttcatgaggctcagattagtaacatggagatggcaccaggtggtgtcatcacttctgacatgattgaaatgatattttccaaaagcccagagcaacagctttcagcaacacagaaattcaggaagctgctttcaaaagaacctaaccctcctattgatgaagttatcagcacaccaggagtagtggccaggtttgtggagttcctcaaacgaaaagagaattgtacactgcagtttgaatcagcttgggtactgacaaatattgcttcaggaaattctcttcagacccgaattgtgattcaggcaggagctgtgcccatcttcatagagttgctcagctcagagtttgaagatgtccaggaacaggcagtctgggctcttggcaacattgctggagatagtaccatgtgcagggactatgtcttagactgcaatatccttccccctcttttgcagttattttcaaagcaaaaccgcctgaccatgacccggaatgcagtatgggctttgtctaatctctgtagagggaaaagtccacctccagaatttgcaaaggtttctccatgtctgaatgtgctttcctggttgctgtttgtcagtgacactgatgtactggctgatgcctgctgggccctctcatatctatcagatggacccaatgataaaattcaagcggtcatcgatgcgggagtatgtaggagacttgtggaactgctgatgcataatgattataaagtggtttctcctgctttgcgagctgtgggaaacattgtcacaggggatgatattcagacacaggtaattctgaattgctcagctctgcagagtttattgcatttgctgagtagcccaaaggaatctatcaaaaaggaagcatgttggacgatatctaatattacagctggaaatagggcacagatccagactgtgatagatgccaacattttcccagccctcattagtattttacaaactgctgaatttcggacaagaaaagaagcagcttgggccatcacaaatgcaacttctggaggatcagctgaacagatcaagtacctagtagaactgggttgtatcaagccgctctgtgatctcctcacggtcatggactctaagattgtacaggttgccctaaatggcttggaaaatatcctgaggcttggagaacaggaagccaaaaggaatggcactggcattaacccttactgtgctttgattgaagaagcttatggtctggataaaattgagttcttacagagtcatgaaaaccaggagatctaccaaaaggcctttgatcttattgagcattacttcgggaccgaagatgaagacagcagcattgcaccccaggttgaccttaaccagcagcagtacatcttccaacagtgtgaggctcctatggaaggtttccagctttgaagcaatactctgctttcacgtacctgtgtcagaccaggctacccagtcgagtcctcttgtggagcccacagtcctcatggagctaacttctcaaatgttttccataatactgtttgcgctcatttgcttgccttgcgcacctgctctcttacacacatctggaaaacctccggctctctgtggtggaatacccttctaataaaagggtaaccagaacggcccactctcttttacggaaaaatccctaggctttggagatccgcacttacattagagttatgggaatatacacatattaatgtggctccctttttcttgtgggggaataaaagaggactcctcctcattccctttaacatgggggaaaaaactgacattaaaagatgagactaaatctttatcttgaattttacacaactacttacgacaagggagatgtttagacctgttgtgtatacttcagagtacttttcatgagttcttccacagtgaacccttggattacctggtggctttttctagccagatttgcattaatccttactgagattggatggttttctttcctctattggcgccattcttcagatattaaagttaaaccatccactccctcaccttcagccttcagtgaatgtgctttctagttgtcaggaatgctgaagaattaacactttgactcctaaatgtgatactggtttgtagattcccttagagcagaaaggagaggggcacatattaatttgtatcgcttttgcttctctttggtcttttgtgtcttagaatttggaagtggttcatttctgttgctggtatgaggatttcgaatacttagtaatcgaaaaccatatcctgtaatttaataaaaaaaactaaggacgaaaaaaccctccaattttcccaaatgcaatcagtgtaactaggggctgtgtttctgcattaaaataaatgtttcaggctttgtggtcctgatcaaggtcctcattaaaaaattggagttcaccctaggtgcttttcccctctgtgactggcagataacacatacttttgaaagtaactttgggatttttttcttaggtgcagctcgattctaatcttttcatgctgcacacgattcctttaatgtagcatccttatctgaaagaaataaccatcttctcaacatgacctgcttaacccaaataagaacagtgatcttataacctcattgtttcctaatcattttatttcatctcctgctagtactgtgccgcttccccctccccccacacaaaataaaaacagtatctgccttctggctcatttaatgatgactgcaatctgtacctgcaaatggcgcttccagtactgtgttcagtgatccacatttgtgcttggactggaatgaaaaaatacgcttaattgccaagacaactgcaaatgagttcaatacgacttctcggtgctagttggccatcttgactcaatgttgggatacactaccagagaagatttttttgttgatgtgctgttcaaagtgaattctgaaggaaaaggttgctcacctctgtttcagagcatacccttttaaacctttttagacttgtcctcttctagaattcattataaccccaaagtgtaaaaactatttggaagttgcccctgacaagctattatacatctctggtaaatcctgctgaatgtaagggatattcagagcttttcatacctcatcatgatgttatttaagcagccaacttatgtgacctgatttaaacttttaaaaaatccacttcattcaaactagaaagagtcaaagacaaaggacatttatcagccaagagtgtgacgcattcttcgcatctagtctgtagtagtgtctgtgctctgggatggataccgtctgatgtctgtttgttattgatggcgcagccactgcaaaactagtcaactcccatctataactgttactttttctagtgctgctttgtgctgagagaacattttagtttactgcacttgacctgtaaaagactgattctttgtaattttagggataaattaggtggttaatttaaagaagaaatttcaatgttgcctttacatcacattaaaatataacttctttcagaaggataatagaagcactgattcatagtaaaaatcttgtttttagctttgacttttttgtggctgttttttaaaattgtaaattactagtaacatgtcatttctataggatgttttaaattatgtaccttccattggatagttaaaataatttcattttataagccaatttgagtgggaaagatacaaagcacacagttgtctccccacattaggaagagtagtgtgcattcagacattcggaatttttgctagtagttggagatgtttcagtgagtgaattaaaacaaagtctatttaactgacgtgatctattttgtgtctaaaacagaggaatttatcttgtcctagaagttcatgaactataagatctaagtttttttttcttttttaacaataaaatgattttttcttaaagtatcaaagttggaattggctaaaagtgaagtagcataactcagatatgttggaacttggtactgaagcaggctttttggtaacagaaatgacattttaaggggtaactgtatatcctgtttttagttctttgcctctcagattctgttaacttagtttaaattcactgaataccctaccactaaggcgttgctcattacaaaagcatgttaatttcaatacaggaaaactcttttgtagttttatatatggattggggaaagtgactttgttttacttttcctttttattcccctccatcctccaaacttccaatctatattatttgtaatgagaactttggtgggggaaaaaaagcattaagagaattttggatgtaaaggcatctggtatctgatggaccagcaggtagatgtggttggattgagaaattttgggtaaggtagatgatagaagaaagagattttaggagacacagttctctgtggaacactttctttcatgttcctgtaactaattgatcaagacccttttaaacgcttatctttgtcagttccgcttttgaaaaaactattgccctaggattgtttcttccatatgacagatgaaggttattggctctgagtcatttttggcattatcgtcacagataaaaagattggcaattaatctcataaaaaatctgaattattccagattgctgccgatttttgcctaagaaacaatatgtaagtatattttataaaccaaactttgtcaaccaattctattgtacgtctacccacaggcaactttgaatttacttctctagtgctaaataaacatttcagcgatttaatcccccaacttgggggatgcattatgaaaaggttttcctggagtcaaggggtttttctttctcgctagttttgtgaaaatttttatatcaataggcaaatcattataactttttaggggttgatggtttttaagtatattggaaattgtggtgtctaaggatgatgttcagtgaagaaaagggatccacttttagaaaccagcattgtttgctttcaactttcatactgtatgctaactcctacgttccaaaatgtgctcatttgcagacacaggtatgcctatatacatggaagtctcaaatctgaatttttatccatctcaatatgaccatttctctctgttgtgagctgaacagattaagtatatatctgccaggttgggaaatattttggtctatcttttcctgtcatcagaacttaatttaaaaaaattatcaaaggtcagatgtgactactacagtaagttggctatcataaagaatattccataaaatgttttatctgccatacaaaattactgggtttatggccggatgtggtggctcatgcctgtaatcccagcagttcaggattacaggttatatacaggttataacaatggataccaggacatcagaatatctgataaagcaaatatttatatgctaatttaaaatatcaaattgctactggacataaaatacatctggaagcttggggtaagaagaaagaaaagaagtgttccgttctgttttcaactaagggtaaacgaagtcccagagtgttttccctgtaggtcaaattaaggtaacatgtctttatttgatcatctattgtacaccagatacctggctaagggctttccttttttctcatgtagtcttccaaatgttctttgataattgtcactatattatagatgacaaagtgaagacttacgagaaattactttgccccaaggttacaacacttagatggctgtccaagggcggggaagagccctgcaaattctgtgtcttgaagaaagcagtggccacgcagtagttccgtgcccaggatctcccagaactagacttggcaaccacagctgggccagccttttttgttagaccattcttcctgactcctgcttaccatcagcacccttaaaatgacgaaatcaggcttaagttgcttttaggttacacagactggagtgtaggccctctcaggccaaacatctttcctcttctgtggtgctaaaattctgtatgaccagacaagtatggtaataggttttttttttttttttttttgtgcaaatgattttgtgtttagtaaaataatggctaaacacatggatccattcaaacgcacaaatgtggaaagtattgacacggaaggaaaggctttgaagaattactgcctcaggaagcagtgccatggatgcgaatttaacacagtctacttcttcctaaaggaatatcatcccaaggaatgtcaaaaattaaaatcaccttttaatgtactggttgttgagtgtttctgctttacctcaagtcattctgaccactctacatcctgcttcaaagtgttctgacacttagatttggaatggctctaatgattctttgtacttgaatgtggtctgtcaggccatgggtgagtgccttgcacatagtagacattcaataaatactaaatgaaggaatatgcatgcatctttgtgatgttagtaaagggtgcttgataaaagaaaat

SEQ ID NO: 507 - DNA, 8981 bp, Homo sapiens
gcagcgccggggccctcagatcgaggctgcctccccctctcagccggcagcacattccgtcgccttgccgccgcccggccccacagttgtctttgccggagctgcagtcgcgctggggttagggcgggggggcgggcggggagaggagaaggccgcggcggaggcaggtgagaggaggaaggaagcggcggcgcggcgggcacagcagctcaggcggcggcccggttcctgggagtgtcggtgcggcgcgttggttggggcggatcccgcggggcccgggcgggggaaggagtcaccggcccggccatggcggacaacgagaaactggacaaccaacggctcaagaatttcaagaacaaaggccgcgacttggagactatgagaagacaacgaaatgaagttgtagttgaattaaggaagaataaaagagatgaacatctcttaaagagaaggaatgtaccacatgaagatatctgtgaagactctgatatagatggtgattatagagtgcaaaatacctctctagaagctattgttcaaaatgcttcaagtgataaccaaggaattcaattaagtgcagttcaagctgctaggaagcttttgtccagtgatcgaaatccaccaattgatgacttaataaaatctggaatattgcccattttagtccattgtcttgaaagagatgacaatccttctttacagtttgaagctgcatgggctttgacaaacattgcatctggaacttctgaacaaactcaagcagtagttcagtccaatgctgtgccacttttcctgaggcttctccattcaccccatcagaatgtctgtgagcaagcagtgtgggcattgggaaatatcataggtgatgggccccagtgtagagattatgtcataagtcttggagttgtgaaacctttactttccttcataagtccatctattcctataacattcttaagaaatgttacttgggttatggtcaacttatgtcgccacaaagacccaccaccaccaatggaaaccattcaggagattcttccagccctttgtgttttaattcatcacacagatgtaaatatactggtagacacagtctgggccctctcttaccttactgatgctggcaatgaacaaatacagatggtaatagactctggaatagttcctcatttggttcctctgctcagccaccaggaagttaaagttcagactgctgcacttagagctgtgggcaacattgttactggaactgatgagcaaacacaagtagttttgaactgtgatgctctttcacacttcccagcactcctgacacatcccaaagagaaaattaataaagaagcagtgtggttcctctccaacatcactgcaggaaatcagcagcaggtacaggcagtaattgatgccaatcttgtaccaatgataatacaccttttggataagggggattttggcactcaaaaagaagctgcttgggccataagtaacttaacaattagtggaaggaaagatcaagtggcttaccttatccaacaaaatgttatcccacctttttgcaacttgctgactgtaaaagatgcacaagttgtgcaagtagtactcgatggactaagtaatatattaaaaatggctgaagatgaggcagaaaccataggcaatcttatagaagaatgtggagggctggagaaaattgaacaacttcaaaatcatgaaaatgaagacatctacaaattggcctatgagatcattgatcagttcttctcttcagatgatattgatgaagaccctagccttgttccagaggcaattcaaggcggaacatttggtttcaattcatctgccaatgtaccaacagaagggttccagttttagaaagatgttgtggaagttaggtacaatgcagcactgagatatatatatatatatgtgtgtgtgtatatatatatatatatacatatatataaaaaggtttgatccatcaagcttggctcatgggatctgctgctgcattaaatcgggaaagaaaatgtgaagatttcatttggaatcacagaaaatgcccaaatgaggtcaagatggcgagtgggtgcgagtgagaatgagtggcaaaatgtaatgaaaactttacatgaatgcttatttaggttgttcaaagtaaaaagggctacaggtcacagatcgtcagtgcctgagaaagaacattgacttactctatatcaattgaggggaaagtgcagtaccgtcatcttcaagccttgtaagcataaaagagaataggctgcccatataagtcaaaggaaaatgagcccaggccttgctatgaagcagtgtgtgaatggacaatgttgaatgaatgtctggctcagtgatggagagccaggttcatctttgaaatctagggctcttcactcatgaagcagactcctagtcctggagtgactgtgtacgagagcgtggttgtggtgctgtatgtgaacgcatgcaagcttgattcaccttcagggggctgataacctagtaaatcatcaaaatgagatcataagtgttaatgtacactggacatgaaaacaaagactggtttagcagcagacattggtttactctgcagcctgtgttttctgtttccccctttcccacctccttccccccacccaatccttttttttttcttttttgcttttcttttctttttttttagtttttatttactttacctagtatgcctttttttagttgcttctcaagtcagaaaacttttcaggaaggtttccctgtgcatttgcaccagatgaatgtttgatgctatgaaaagctttccatatcatcaaaactaatttgtgtagatttttgcatgaaaaaaatcataaatttccctcaaaatagactgtgttgcagtacacaagttgccataatagtataaaacagtaaaatgtgcttaaaaggccatccttttcattttcagagataacataaagatctttgcatgaggtaaatctacagcatagttcatttttagattttgttgagtcctgtaaagaagaagaagaaaaaagtttcagttgtggtagaataccgtgctgtgtttaaatgttacttgttttcaaactttgttttctatgaaaatgatatggaaacttctaaaatggaatttggtgcatatgtactgctgaataaagaccgatgaagaggtttgagtagatgtacaaatcaagtaatggtttgaacacctttaataatatgcctaatctgttcaattgttttagaatctttttatcttagatgtaggcagccatgaacaatctattttgagccactttagggagaaaactttgtatttttaaaacttgcataaaagttatgcaagtggtttttataaattggaataatacctcagttttgaggttatgcacactaaattaaatgtgacataaattaatttgtacaaaaagaactctttataaggtggctcattgtaggaaatcctgtgccttcccctttgagcacaagtgttgcatgaacaacagtttgctataagaaacataccagattagccaccattagcatctatatctactttgtgtttaaaaatcaactggtaattctgaaacactgtagaatggataaaaattattttgtgatcataactctttgttgaactagagtatttttgcagcattccttgtcatcagaaacatggttaaagtttaaaactagaagcagcagaaaactagcttgtaaaatttatccaagtagagtgcaggctaggctgtcttggggaaataaacattaaaacttaaagcaatgttttacatggggtgtgtgtgtgtggtgtgtggatttttttttttttataaagttagagtataattcaatggcttacattagcttcctgtctttttacctagaaccagcataataagaaatttctttggttctgtcatttcagtatggacatattaatattttagcccactgagtttgtccagttgacaccatcagtgcttcagttttctctctatccaaagcaaggttttaactttccttcattctccagtaaaacagaccgagacaacttgaactatattttgagtattgctatatcttcaacatatagctccaaatgatggattgtatacaaagcatagtacagaaggtttcagtaattggaaggtgaacacagcaatgctttacataatttgtgttttttagtaaaaaatattggattcaaagtaagccaatgagcttgtatacaaattttatatacaaattattgtatagaacagtgatatggaaaataggtaagggtgatattaatatctctgggtataaggactaccttatcgtttaaatattttatttccatctatagcctaatatagaacattgattttctagtagaaattctgggaagggcttttctgtctctgaaattgattcagtacagttgacagttcatcacggttacctggttaaacactttttttttttttttaattctccagtgatctaggaaattgtttcatttttaacacaggcttatttctgatggggatgggggcatagaataatatgcctaataagctaaacgttcttaacgtttcatgtcttaaactgtctttttgaacattgagaccacctcaagtgctgtaaaaataagaatgttatattaggggtgtgtgagacgccctagtctaaaatctatctttaaatatatttcctttgtaattttcaaagacttcagtaattgtgtgttatggtggaaataatactttccattggtccacattgctctggaccaaacctggagcatttctataattagagctatctatgaatcattaaaaatggatctagaataattttggggagagggagtgtatcatttagtttaggcttacctcagcagcacttcatagggtgaggagttgtttgtttctttaaaggtataactgcattgtaaaatgactgggtttattgtaacagtaatttatgggggcaccctttttggattctccattgcctcagtttcctcaaggaaaaagttacagagattaagctaaattttgaatttagagaataactgctgtgtaattttggtataattaccataaatttagtgtcttaaaacacaacatacattatttcacaatttctgtaggtcaagagtgtagttaggttttctgctcagggtctcacaaggctgcaataaaggtgtcagccagagctgcagtcttatctgaagctagggggtcctcttttatgcacatatggcaaaatccattgcctagcaactgaagaaatcatgggaacttcttcaaggccagcaagagaatctctgatctcagggaaggccttaagcgcttttttaaaggtctcacctgattagatcaggccacctacccaccagggtgatctcccttttgattaacccaaagccaaactgatgaggtaccttcattacccctgcaaaatcccttcacctttgccctgcattgtagtccaatcacaggggtgatacgcatcatattcaaagatcctgttcacagtcaagggagggggttatatggagtatgtataccagggaatcttgggagccatcttaagagttcttcctatgacaaggactcaactatttagaactggaacaatttacaagtgatagccttatatagttatcatagcaagcttatttggggatcaaggttgcctctgagaacctaatgaaaactggaccagcttccccaaaaagtgtatatacatggtagtttttcatacagttttaggggattcataagagtccatgaattacagtctgtcccaacccttccctttagatgatgagttgttgaggtgacttgcccaaggtcacacagctactaagggccaaataaagcccacatctcaactcccatactgcccagggcttctaattactattctaaaggtaatctaaattcatttaaatttgtgaaccaatgcaaaaaaatgtgaatgtagctttttggatattttttttgtttactaaggaatgggtaacattgttatagaagcttgcctaagagttttgaaattagttgacctttttgagtttccaaaattgaatcttccattgtagctattaaagtgaactataaataggccaactttaattgttaactcctcgggtttggtggattatctaccatttatatataaaatttcagttagaatccaccattggcgttttgaaggccaagatagctgagtatcttatcctttttgtaacttcttgattattttacttattggcaaaattcattaactgtcagccaataatttaatattatgggaggaaaaaattttgcccagatatctgaggcaatactcccaaacactaacaaactgatgcctaacaaacttgacattttgaacacttaaagttttccctaaactttttaataagcacattaataaagtatgcttttaaatatatatgtacaataatttttaaaagttgctgcaagatgccttcaaatcaatatgcacgttggtggcattagtgcagtcttctatttttatttttttgagacacagtctcgctctgtggcccaggctggagtgtagtggcgcaatctcggctcactgcaacctctgcctcaagggttcaagcaattctgcctcagcctcctgagtagctgggattacaggagtacgctaccacgcctggctaatttttgtatttttagtagaaatggggtttcaccgtattggccaggctggtattggaatcctgaccgcaaatgatctgcccacctcggcttcccaaagtgctgggattacaggcgtgagccactgcgcccaaccagccttaattcttaataaaggaagttgaaaaataatgaacattggtaaaactattctagtgtgatcagaagcaaatttggactgtagtgtcaaattgataaaaaactaagcacaccaatcatgtataagaaaagtagatttaacatttttttccctaaacacttaacccagaagttaacaataatcttgaaaattccttttaaatccaggccctttaggtgatggcagtttgactcaggatgtccaagtccagtgtattttcaataaaattgacttgacagctactgctctgggtgtaagagcagttgactgtgaggaaaagtaaatggttctacagattctttatgatctacctcccaccagaggactgcagtactcccttgttatttatattttctgccccaatttttgccttctccacaaattttataccttttgtagctgcctactccagattacttcacctttccagactatcagttcttccacttttattcttcataaagaaaattccaataacctgtttcacttaggtttttctattactcttcaagcatgaatcctaatttccctgactatatcttacctctgatctccataactgatggattcctatcctagactatgttactctaatattacccaagattttctccagcctgtttttactcttactttgaaacagctgtttaaaatgactcgtaatctgcttaaatctacatgctttttgtggttctcaatccagttacctaccttccagataattccctcactgtcctgtcctctccattcctctgatgtttaagccctgtgagccacctttcccccatcctttgtgcatagttaccattttactctttcttgttgcccaggcaggaatgcagtggtgccatcttggctcactgcaacctccacctcctaggttcaagcgattctcctgcctcagcctcctgagtagctgggaccacaagcgtgcaccaccacgcccggctaatttttgtatttttagtagagatggggtttcaccacgttggccaggctggtctcgaactcctgacctcagatgatccaccctccttggcctcccaaagtgctgggattgcaggcgtgagccaccgcctggccaccattttactctttttaggtacagtaatctaatatccaaagtcttggactcagctaaagagggtatttaccttaaaaaaaaaaaaaaaaagactccatcttttgattcataattgtggtgggggcggggaatcaagacaaccttagtcactttggtattaccataattcttgtcttttcagggttgtcctgttcagctgcataaaacatcatgtattctaggtatttcctaccttcacttacatttttacttgccgatgtgctgccttcataaatgggtatattccgccacacatctagtaagcccccaatgcagtacacaatgtgtatcactgataaaactcgcacttctgccatgtcagtattatattcagttgagtggtctttagcatagtggcagtcctagtcatcctaaccttttagttaaggtaaaattacatatgtttatagaactcatatagacaagctagtttttaaaatcttccttttaaccagtttaggatgatctaggatagctaagttacctacatggtgactgttcggtctaattcagaaacagaagtactaaaagaatactaaaaagtttttacccattatctctatccctgttttctttttgcaattctcagctgcagggagcaagaaaatacacagcagataggaaatgtttgtttgcatcctggctttctcaaccgcactttacgtccttgaatattctagatatttactccttcaagaagtcaggagtatatccaggcctacctatcatccttgccatccccattaaccctcatttttcagtatgtgttttacatttatggttatttttcagtctatagtatctgttcactcattgctctatcacatctgagtttctccgtctttctttccactagattgtaagctccttaagggcaaggtcggcatataagcaaagttctgtaaacaccgtgaaggtaccatgagttctatgggtactcaataaatgcttgtgataatgatgcaatttctca

SEQ ID NO: 508 - DNA, 3837 bp, Homo sapiens
gaagcgccgcgaggcggggccggggaggcgcgcgcccggcttgcgggactgcggggcgcgagagcgcggccgggtagcgtcgcgcgcgtggatctgccgccgggttgctgtgcgactattctccgggagccgtccgtgtcaccgccggaacctggcgcaggttaattatagaaaatgccaagtaggaaatttgccgatggtgaagtggtaagaggtcgatggcctgggagttcactttattatgaagtagaaattctgagccacgacagcacctcccagctttacactgtgaagtataaagatggaacagagcttgaattgaaagagaatgatattaagcctttaacttcctttaggcaaaggaaaggtggctcaacttccagttccccttccagacgccgagggagtcgatcaaggtcacgctcccgatcccctggtcgaccacctaaaagtgcccgccgatctgcttctgcttcccaccaggccgacattaaggaagcaaggagggaagtggaagttaaattgactccgctgattctgaagccatttggaaatagcatcagcagatataatggggagcctgagcatattgagagaaatgacgcacctcataaaaatacacaggaaaaattcagtttgtcacaagaaagcagttacatagcaacacagtatagccttcgtccaagaagagaagaagtcaaattaaaagaaatagattctaaggaagaaaaatacgttgcaaaagaactggcagtgagaacctttgaagtgacccccatccgggcaaaggacttggagtttggaggagtacctggtgtgtttctcatcatgtttggcctgcctgtgttcctcttcctgttgctgttgatgtgtaaacagaaagatcccagtcttctgaatttccctcctcctttgccagctttgtatgagttatgggaaaccagagtatttggggtctacctcctgtggtttttgattcaagtcctgttctacctactgccaattggaaaggttgtagaaggaacgcctcttattgatggaagaagactcaagtatagattaaatggattctatgcttttatcctgacatctgcagtcatcggaacatctctcttccagggcgtagagtttcattacgtgtacagtcattttcttcagtttgcacttgcggccactgttttttgtgtggtcttgagtgtgtatctctacatgcgctctttgaaagcgccccggaatgacctgtcgcctgccagctctggaaatgctgtctatgatttcttcattggccgtgaattaaaccctcgaattggtacttttgatctcaaatacttttgtgaattgcgccccggattgattggatgggtggttattaacttggtgatgcttttggctgaaatgaaaatacaggaccgcgctgttccatccttggccatgattttagttaatagtttccagcttctctatgtggtggatgctctctggaatgaggaagcgttgttgacgaccatggacatcatccacgatggatttggattcatgctggcttttggagacttggtgtgggttccctttatttacagcttccaagccttttatttagtcagtcatccaaatgaagtgtcttggccaatggcttctctaattattgttctgaaactttgtggttatgtaatcttccgaggtgcaaattctcagaaaaatgcattccggaaaaatcccagtgatccaaagcttgcacatttaaaaaccattcatacttcaacgggaaaaaatcttctagtttctggatggtggggctttgttcgccaccccaattacttgggtgatctcatcatggccttggcgtggtccctcccatgtggttttaaccacattctgccttatttctacataatttatttcaccatgttgcttgtccaccgagaagctcgtgacgagtaccactgtaagaagaaatacggcgtggcttgggaaaagtactgtcagcgtgtgccctaccgtatatttccatacatctactaatgctcttctggcttttctacaaaatactcctgcaattccagctgccatttgcaaaaacaaggaaaaaaatccgaaactttcttttgttgcactgacagggtctgtacttttttttttctttttgagtcaggactatggagccgagtagttgatcttttaatatagccgtgtttacttgtattaacttacagttaacataggaaaaatacaagtaaggatgtgagaatttgcattttaatgggaaattttcaacccttaatctgaaaacagaagacagtcttaatataaatgtactgtgaagaatgctattgatgtttatggtttctgattacttttcaaattttgatgtttttttgccagttggcttttcttaaatgaaaacactgttccatttaaagtacatttatgttttattcagtaagagaatagaattttcatttgtttttctttaaatcctttactaattatataatttgaaagcaaaaagaagggcctatattaaatgctgaaagtgaaaagtgatgacattattagcagacactgcttaaaggagaccatttgtagcagttggcttaacctcaacttctaaaactacattgaaaatgtaaatacatagcttagttttttgtaatatatggtgacttcagatttttttgtacagtattttgaatgtgagatgattgtcaggactaactgtctttttaacaaaacattttcagtattttaaataaaattttgtaaagtaatgtgaattaaaaattttggaacaattagaattcattcactattgtatagaagatgctgttaaaacataggaagggtatttttcttgatccaaagtttgtgaatttggctttgctacctcaattgcaggtgtttgtttgcctttataaactgttgcaaatagaaaaaaaatagaataagtatatatttttggagtaacatcaatatttaaacatttttacacagatcggtgtttgaaaatttgccatttcaggctaatatttttatatatttttgactttttaaaagttcatcagtgtttttgctactgttaagcttatgcagtttatactgtattttttatgtatcctttatatttaccaaacctgactccctgtaaaggagtgctgtcttaaaaacaactgaaggggttaaagtcgtttcttttagtttaatagatgtgcataaggtagctttagcaattaaattctagtgaagttgatatagtctcatttttaattgtcctgtaatggaacagtagcaaattcactaaacttttgtgttcagagttaaattgttctcagtactttcaatgtaggggaatgtaataaacatagtgtgtatgtttgggttttaattacacattttatatatgagccatttagatatgcagtgttaattctatactgcatttgaagtgtatgtaacttagcttatgttaatgcagtcatgaagttggtttgctccagcatccggtagtctttaaacattcttttagtgaaattgtcattgttttatcagtgctaatgtgtgcaagcagtttttttattttgcttttctcctggcatcagaaagtggtggcgttttctgtactggattgcaccaaggaagcttttggggaggaaggaaggacattaaattctttccctggtaatgaaaagagccctttatcaatacagtgctgcaatttctggatatcagctacactttgtttttaagtttgtttttgacatgtttatttggcaaattttataatgaagttttaagttgaaaataaaatgtagcaacattttgatcaaaaaaaaaaaaaaa

SEQ ID NO: 509 - DNA, 6936 bp, Homo sapiens
aggccgcgctcagcaggcggggcgggagccgcgtgcgcccgaggacccggccggaaggcttgcgccagctcaggatgaggacaggctgggcgacccctcgccgcccggcggggctcctcatgctgctcttctggttcttcgatctcgcggagccctctggccgcgcagctaatgaccccttcaccatcgtccatggaaatacgggcaagtgcatcaagccagtgtatggctggatagtagcagacgactgtgatgaaactgaggacaagttatggaagtgggtgtcccagcatcggctctttcatttgcactcccaaaagtgccttggcctcgatattaccaaatcggtaaatgagctgagaatgttcagctgtgactccagtgccatgctgtggtggaaatgtgagcaccactctctgtacggagctgcccggtaccggctggctctgaaggatggacatggcacagcaatctcaaatgcatctgatgtctggaagaaaggaggctcagaggaaagcctttgtgaccagccttatcatgagatctataccagagatgggaactcttatgggagaccttgtgaatttccattcttaattgatgggacctggcatcatgattgcattcttgatgaagatcatagtgggccatggtgtgccaccaccttaaattatgaatatgaccgaaagtggggcatctgcttaaagcctgaaaacggttgtgaagataattgggaaaagaacgagcagtttggaagttgctaccaatttaatactcagacggctctttcttggaaagaagcttatgtttcatgtcagaatcaaggagctgatttactgagcatcaacagtgctgctgaattaacttaccttaaagaaaaagaaggcattgctaagattttctggattggtttaaatcagctatactctgctagaggctgggaatggtcagaccacaaaccattaaactttctcaactgggatccagacaggcccagtgcacctactataggtggctccagctgtgcaagaatggatgctgagtctggtctgtggcagagcttttcctgtgaagctcaactgccctatgtctgcaggaaaccattaaataatacagtggagttaacagatgtctggacatactcagatacccgctgtgatgcaggctggctgccaaataatggattttgctatctgctggtaaatgaaagtaattcctgggataaggcacatgcgaaatgcaaagccttcagtagtgacctaatcagcattcattctctagcagatgtggaggtggttgtcacaaaactccataatgaggatatcaaagaagaagtgtggataggccttaagaacataaacataccaactttatttcagtggtcagatggtactgaagttactctaacatattgggatgagaatgagccaaatgttccctacaataagacgcccaactgtgtttcctacttaggagagctaggtcagtggaaagtccaatcatgtgaggagaaactaaaatatgtatgcaagagaaagggagaaaaactgaatgacgcaagttctgataagatgtgtcctccagatgagggctggaagagacatggagaaacctgttacaagatttatgaggatgaggtcccttttggaacaaactgcaatctgactatcactagcagatttgagcaagaatacctaaatgatttgatgaaaaagtatgataaatctctaagaaaatacttctggactggcctgagagatgtagattcttgtggagagtataactgggcaactgttggtggaagaaggcgggctgtaaccttttccaactggaattttcttgagccagcttccccgggcggctgcgtggctatgtctactggaaagtctgttggaaagtgggaggtgaaggactgcagaagcttcaaagcactttcaatttgcaagaaaatgagtggaccccttgggcctgaagaagcatcccctaagcctgatgacccctgtcctgaaggctggcagagtttccccgcaagtctttcttgttataaggtattccatgcagaaagaattgtaagaaagaggaactgggaagaagctgaacgattctgccaagcccttggagcacacctttctagcttcagccatgtggatgaaataaaggaatttcttcactttttaacggaccagttcagtggccagcattggctgtggattggtttgaataaaaggagcccagatttacaaggatcctggcaatggagtgatcgtacaccagtgtctactattatcatgccaaatgagtttcagcaggattatgacatcagagactgtgctgctgtcaaggtatttcataggccatggcgaagaggctggcatttctatgatgatagagaatttatttatttgaggccttttgcttgtgatacaaaacttgaatgggtgtgccaaattccaaaaggccgtactccaaaaacaccagactggtacaatccagaccgtgctggaattcatggacctccacttataattgaaggaagtgaatattggtttgttgctgatcttcacctaaactatgaagaagccgtcctgtactgtgccagcaatcacagctttcttgcaactataacatcttttgtgggactaaaagccatcaaaaacaaaatagcaaatatatctggtgatggacagaagtggtggataagaattagcgagtggccaatagatgatcattttacatactcacgatatccatggcaccgctttcctgtgacatttggagaggaatgcttgtacatgtctgccaagacttggcttatcgacttaggtaaaccaacagactgtagtaccaagttgcccttcatctgtgaaaaatataatgtttcttcgttagagaaatacagcccagattctgcagctaaagtgcaatgttctgagcaatggattccttttcagaataagtgttttctaaagatcaaacccgtgtctctcacattttctcaagcaagcgatacctgtcactcctatggtggcacccttccttcagtgttgagccagattgaacaagactttattacatccttgcttccggatatggaagctactttatggattggtttgcgctggactgcctatgaaaagataaacaaatggacagataacagagagctgacgtacagtaactttcacccattattggttagtgggaggctgagaataccagaaaatttttttgaggaagagtctcgctaccactgtgccctaatactcaacctccaaaaatcaccgtttactgggacgtggaattttacatcctgcagtgaacgccactttgtgtctctctgtcagaaatattcagaagttaaaagcagacagacgttgcagaatgcttcagaaactgtaaagtatctaaataatctgtacaaaataatcccaaagactctgacttggcacagtgctaaaagggagtgtctgaaaagtaacatgcagctggtgagcatcacggacccttaccagcaggcattcctcagtgtgcaggcgctccttcacaactcttccttatggatcggactcttcagtcaagatgatgaactcaactttggttggtcagatgggaaacgtcttcattttagtcgctgggctgaaactaatgggcaactcgaagactgtgtagtattagacactgatggattctggaaaacagttgattgcaatgacaatcaaccaggtgctatttgctactattcaggaaatgagactgaaaaagaggtcaaaccagttgacagtgttaaatgtccatctcctgttctaaatactccgtggataccatttcagaactgttgctacaatttcataataacaaagaataggcatatggcaacaacacaggatgaagttcatactaaatgccagaaactgaatccaaaatcacatattctgagtattcgagatgaaaaggagaataactttgttcttgagcaactgctgtacttcaattatatggcttcatgggtcatgttaggaataacttatagaaataagtctcttatgtggtttgataagaccccactgtcatatacacattggagagcaggaagaccaactataaaaaatgagaagtttttggctggtttaagtactgacggcttctgggatattcaaacctttaaagttattgaagaagcagtttattttcaccagcacagcattcttgcttgtaaaattgaaatggttgactacaaagaagaatataatactacactgccacagtttatgccatatgaagatggtatttacagtgttattcaaaaaaaggtaacatggtatgaagcattaaacatgtgttctcaaagtggaggtcacttggcaagcgttcacaaccaaaatggccagctctttctggaagatattgtaaaacgtgatggatttccactatgggttgggctctcaagtcatgatggaagtgaatcaagttttgaatggtctgatggtagtacatttgactatatcccatggaaaggccaaacatctcctggaaattgtgttctcttggatccaaaaggaacttggaaacatgaaaaatgcaactctgttaaggatggtgctatttgttataaacctacaaaatctaaaaagctgtcccgtcttacatattcatcaagatgtccagcagcaaaagagaatgggtcacggtggatccagtacaagggtcactgttacaagtctgatcaggcattgcacagtttttcagaggccaaaaaattgtgttcaaaacatgatcactctgcaactatcgtttccataaaagatgaagatgagaataaatttgtgagcagactgatgagggaaaataataacattaccatgagagtttggcttggattatctcaacattctgttgaccagtcttggagttggttagatggatcagaagtgacatttgtcaaatgggaaaataaaagtaagagtggtgttggaagatgtagcatgttgatagcttcaaatgaaacttggaaaaaagttgaatgtgaacatggttttggaagagttgtctgcaaagtgcctctgggccctgattacacagcaatagctatcatagttgccacactaagtatcttagttctcatgggcggactgatttggttcctcttccaaaggcaccgtttgcacctggcgggtttctcatcagttcgatatgcacaaggagtgaatgaagatgagattatgcttccttctttccatgactaaattcttctaaaagttttctaatttgcactaatgtgttatgagaaattagtcacttaaaatgtcccagtgtcagtatttactctgctccaaagtagaactcttaaatactttttcagttgtttagatcttaggcatgtgctggtatccacagttaattccctgctaaatgccatgtttatcaccctaattaatagaatggaggggactccaaagctggaactgaagtccaaattgtttgtacagtaatatgtttaatgttcattttctctgtatgaatgtgattggtaactaggatatgtatattttaatagaatttttaacaaaacttcttagaaaattaaaataggcatattactaggtgacatgtctactttttaatttttaagagcatccggccaaatgcaaaattagtacctcaaagtaaaaattgaactgtaaactctatcagcattgtttcaaaatagtcatttttagcactggggaaaaataaacaataagacatgcttactttttaatttttatttttttgagactgagtctctctctgttgcccaggctggagtacaatggcgtgatctcggctcactgcaaatctccgcctcccaggttcaagcgattctcctgcctcagcctcctgagtagctgggattacaggcaactgccaccatgcccggctaatttttgtatttttagtagagatggggtttcaccatgttggccaggctggtctcgaactcgtgaccgcaggtgatcctcccgcctcggcctcccaaagtgctgggattacaggcatgagccaccgcgcctggcctctgcttactttttatatagcaaaatgattcctcttggcaagatgtttcttatattattccaaagttatttcataccattattatgtaaatatgaagagtttttttctgtttataattgtttataaaacaatgacttttaaagatttagtgcttaacattttcccaagtgtgggaacattatttttagattgagtaggtaccttgtagcagtgtgctttgcattttctgatgtattacatgactgtttcttttgtaaagagaatcaactaggtatttaagactgataattttacaatttatatgcttcacatagcatgtcaacttttgactaagaattttgttttacttttttaacatgtgttaaacagagaaagggtccatgaaggaaagtgtatgagttgcatttgtaaaaatgagactttttcagtggaactctaaaccttgtgatgactactaacaaatgtaaaattatgagtgattaagaaaacattgctttgtggttatcactttaagttttgacacctagattatagtcttagtaatagcatccactggaaaaggtgaaaatgttttattcggcatttaacttacatttgtactttatttttgtataaaatccatagatttattttacatttagagtatttacactatgataaagttgtaaataattttctaagacagtttttatatagtctacagttgtcctgatttcttattgaatttgttagactagttctcttgtcctgtgatctgtgtacaattttagtcactaagactttcctccaagaactaagccaacttgatgtgaaaagcacagctgtatataatggtgatgtcataataaagttgttttatcttttaagtaaaagtaaaaaaaa

SEQ ID NO: 510 - DNA, 4750 bp, Homo sapiens
gagaacggtggccggacggagagactgcgggtctgagggactggcgggcgggcgggccgagcggcgccgccgaggccgggctgggccgagcccaggagcgcccgggatgtagcgggccaccctgccgatgccacagcgcccggccgcgggcggagccggagccggagcctggggaggcggcgggggcccagagcgcagcccgcgccccccgcgcggagccaggcccgctgccgtccccgccgcccgggcccccggcatgcagccccggctgcggaggtgacactcacggaccttagccaccgccgccgccatcgccaccatggacgaacaggaggcattgaactcaatcatgaacgatctggtggccctccagatgaaccgacgtcaccggatgcctggatatgagaccatgaagaacaaagacacaggtcactcaaataggcagagtgacgtcagaatcaagttcgagcacaacggggagaggcgaattatagcgttcagccggcctgtgaaatatgaagatgtggagcacaaggtgacaacagtatttggacaacctcttgatctacattacatgaacaatgagctctccatcctgctgaaaaaccaagatgatcttgataaagcaattgacattttagatagaagctcaagcatgaaaagccttaggatattgctgttgtcccaggacagaaaccataacagttcctctccccactctggggtgtccagacaggtgcggatcaaggcttcccagtccgcaggggatataaatactatctaccagccccccgagcccagaagcaggcacctctctgtcagctcccagaaccctggccgaagctcacctccccctggctatgttcctgagcggcagcagcacattgcccggcaggggtcctacaccagcatcaacagtgagggggagttcatcccagagaccagcgagcagtgcatgctggatcccctgagcagtgcagaaaattccttgtctggaagctgccaatccttggacaggtcagcagacagcccatccttccggaaatcacgaatgtcccgtgcccagagcttccctgacaacagacaggaatactcagatcgggaaactcagctttatgacaaaggggtcaaaggtggaacctacccccggcgctaccacgtgtctgtgcaccacaaggactacagtgatggcagaagaacatttccccgaatacggcgtcatcaaggcaacttgttcaccctggtgccctccagccgctccctgagcacaaatggcgagaacatgggtctggctgtgcaatacctggacccccgtgggcgcctgcggagtgcggacagcgagaatgccctctctgtgcaggagaggaatgtgccaaccaagtctcccagtgcccccatcaactggcgccggggaaagctcctgggccagggtgccttcggcagggtctatttgtgctatgacgtggacacgggacgtgaacttgcttccaagcaggtccaatttgatccagacagtcctgagacaagcaaggaggtgagtgctctggagtgcgagatccagttgctaaagaacttgcagcatgagcgcatcgtgcagtactatggctgtctgcgggaccgcgctgagaagaccctgaccatcttcatggagtacatgccagggggctcggtgaaagaccagttgaaggcttacggtgctctgacagagagcgtgacccgaaagtacacgcggcagatcctggagggcatgtcctacctgcacagcaacatgattgttcaccgggacattaagggagccaacatcctccgagactctgctgggaatgtaaagctgggggactttggggccagcaaacgcctgcagacgatctgtatgtcggggacgggcatgcgctccgtcactggcacaccctactggatgagccctgaggtgatcagcggcgagggctatggaaggaaagcagacgtgtggagcctgggctgcactgtggtggagatgctgacagagaaaccaccgtgggcagagtatgaagctatggccgccatcttcaagattgccacccagcccaccaatcctcagctgccctcccacatctctgaacatggccgggacttcctgaggcgcatttttgtggaggctcgccagagaccttcagctgaggagctgctcacacaccactttgcacagctcatgtactgagctctcacggccacacagctgccggtcgccctttgctgcatggcagggggctgctgctgggctcagtgaagttgctgcttctcccaggcaaggctgtggaccatggagtggcagcccagccagcgtcggtctgtgccccttccgccactggggctcagagccggggtggggtggctgcagcctcaggactgggagcccccagcctgtcagatccaggagctccagtgtcctgagctcagcgtggaggggtaggggctgggaacagtgtgcaaggcagccgtgggccccaccctcggggatgtgtcctgacactgcaattggcaccgaagcccagagggtctgggggcacaagactgacgccagggtatgaagagtgttattttcattcaaagtgttattttgtttttccttccaatgtctggagaccaccagggcatctctgggctggatgagctcccacaagcctgagggaaaggccagcactcgctagcagtggcaggcagaggcccaggctgccgtcccctagagtcccaggttggctctgccagtcctgtcctttaccaaagatgaatgaagcaaatgtcatgctgccttattcagggaaggaggagcctgtcctgcctgtggccatgaccctgcctctcccaggcaggggcccgcgatgtggaactgctgccactgaggggggatccagttttgtcaatgcagttgtctctgttttacaagttggagtcactcttatgctgtacccagtttctaaactggagactgtgtgtgccctctgggctctgagtacccctgctttgggcttgggcctaggctgcattgaaaagagctgaaggttgtggcctttgcgctcctggcccagcctttgttccccactggagcagaaggggagatggacgacacggtcggggcatctggcctggccagtgccctgatcccagagagcccgaggaggtgtctcaggctgcctgagtcgtgacctgctaggccagagcccactccatctggtagaagggaaagcccatatgctaccaccagctgtgtccaaaaccgccagctctgttcttcctcagccagcctcgcccatccccttgaggtctcagcccctttcccttgtagctcctcccctggagggggaatggcagcaggggttggggaaacagcatctccaagcagcttagagttggccatatttacctcagcctgggcgctggtcctttcttccggcccctcccctccaaaatgtgcctattgctagagctcctccctctcaacacccagtttccttgggagttgtcattaaaggaaaaaaaaaaaaaaaaaagccagtgcccagggatgggcatctccagggagctggggattagtgccaggcagccctgccagccatgcctacatccccatgggcacagaacaagccaaagccttcgttgtatgttgacgatgcacttttatgaatgtagtttctatcgctgtttttagccttttcacatcatgtaatgtgaggccttgtacttgttaatttatatctcagatcatatttgatggtttttatatatatcaattctagactgttacaggtgacggacgcctcaagagagagaagagaaaatgaaagcagctggttttgcagaagtgtgtgtcgcatgcgccagttgggcctggaccctcctgtgtccatccctgttcccccaggggctctatcagcccctgtaccccacactgccctctgaagacaacacaggctcctgcttccacctcggcccttgcccagggtggggcctggccctcatcttgaccaaagctgctgtgtggcagctcggcctctctacgaccccatcttggtggctgcacactcttcctggcccgcacccccatccccagtccctgttccccaagaggatacagagcacggtgctggctgactcaactgtgcgtcccaggttcagggtcttacagagctccaccccctggggtcttacctcactgggaatgtgttttgaaaatgaatttgaagacaagccaacaaaccctgcactccaaaaaagcaaaacagaccctaatttttttgtgccaaaaactgtggacatgctggctcagcatcctcaggaccaagttgttgcttaatttattgttttttaataactaatccagataaaaagttgtggggcttcagggtgacctgggcccaaaggttctgaagggcagttcctggcagccccaggcttgctgtgggaaggggccgtgccgtcactttctcatcattccatggggtgtgtctgcctgggccaactctgcatggagaggccagggctggggacagtccgcactctgccaccctcctgccccttccacccaccccagctctatgtctgtgtctgaattgtggatcgtgcagccatggttattgtggaactgtggaacctgcagccatagttatttgactatatcttgaccgagggcttgcagtgcaaagccaggccagtgttgcgcattacttacaataaaagggatcatttatatcagaaaaaaaaaaaaaaaaaa

SEQ ID NO: 511 - DNA, 2960 bp, Homo sapiens
aaatttagattttgcaaacctgtgcattgatgagagtgctattgaaacacattaagaaagattttcaacgcaggaatgtgtcatttcctttcttcatgtaccagatgctgaaatactatgagataaagattttaggtttcaattgtaaagagagagaagtggataaatcagtgctgctttctttaggacgaaagaagtatggagcagtgggatcactttcacaatcaacaggaggacactgatagctgctccgaatctgtgaaatttgatgctcgctcaatgacagctttgcttcctccgaatcctaaaaacagcccttcccttcaagagaaactgaagtccttcaaagctgcactgattgccctttacctcctcgtgtttgcagttctcatccctctcattggaatagtggcagctcaactcctgaagtgggaaacgaagaattgctcagttagttcaactaatgcaaatgatataactcaaagtctcacgggaaaaggaaatgacagcgaagaggaaatgagatttcaagaagtctttatggaacacatgagcaacatggagaagagaatccagcatattttagacatggaagccaacctcatggacacagagcatttccaaaatttcagcatgacaactgatcaaagatttaatgacattcttctgcagctaagtaccttgttttcctcagtccagggacatgggaatgcaatagatgaaatctccaagtccttaataagtttgaataccacattgcttgatttgcagctcaacatagaaaatctgaatggcaaaatccaagagaataccttcaaacaacaagaggaaatcagtaaattagaggagcgtgtttacaatgtatcagcagaaattatggctatgaaagaagaacaagtgcatttggaacaggaaataaaaggagaagtgaaagtactgaataacatcactaatgatctcagactgaaagattgggaacattctcagaccttgagaaatatcactttaattcaaggtcctcctggacccccgggtgaaaaaggagatcgaggtcccactggagaaagtggtccacgaggatttccaggtccaataggtcctccgggtcttaaaggtgatcggggagcaattggctttcctggaagtcgaggactcccaggatatgccggaaggccaggaaattctggaccaaaaggccagaaaggggaaaaggggagtggaaacacattaagaccagtacaactcactgatcatattagggcagggccctcttaagatcaggtgggttgggcgggacatcctctgctaccatctcattaaaaggcccttcacctctggacaagtcatctgcacaactgacttccaagatccttttgtgactcctccaaatgactttggttcccgtgttgtacctgacttccacatggccttctctcctggtccctggtgctgtttgggcctctgctcccatgctcatacctcttcttactccaattactccaccatcacctctctcccctatcacccccagcctggacacctctcatgcacggactggagggctgctccaaccagtcctcagttctctgccacccattgacctagagtcttgaacccaatttaatttattgggttctaggagaactgctgtgttctcaccctaacttggaagagtgatgtttcagtcaagcaaagcgattcctaccatacaatataacacttgtgtgaggctctgtcctaaatatctcaattaccaatatgtggtttggtagtatttctcgccatgctttgctcatgcgcaatgagactacaactagggtgtaaattttaagtatcccatctaaaactcatacaatgataggaaaaatccatttgtttttcatttgatttttactgaggaatcagctcaatcttcaatgaatactggtctctttccaaagcatttttgatcaaagtaaagactgagtcaagggctttttttttttctttttcttgttttaagagacagagccttgttctattgcacaggctggactacacgcattcacctagagtctagaacacaatttaatttattgggttctaggagaactgtcatgagtattgataatatgagagttctttatattcaaacattattctcaaccagagatagggatgtcatagaagaaaatccattcattcaatcattaattcacatgtccattatgtacctccatgagctggacataacagctaataagagataattgtctctggttttacagagctaattgtccctaagagatgtagacaaatgaacaagcaattacaatacatctaagctatactgggggaggaacagggctggataggtatgcagaggagataaaaaaattttaattccttagaatattttttaaaaattgattcttattttaccttctcatcttcttattttccaaattacagcatatatatatatatatatatatatatatatatatatatatatatatatattttttttttttttttttttttttttttaagttttgaagtgtagtcgagcttgggcaatttatccaacccatttaaaccaaaaataaaacttttcatgtattacctggtcatttcaaacaaaaatattttgatcatgaaaaagaataccaatattcttttgttctaaaaatctcttatgggattacatgttatatttttggtttctctctactgatcaacagactacattttcacaactcttctttcctttacgttttaacacacagacccaagattcatactattaagattctagtagaactctagatggtatgcctctgtgtatctcagcatttttattcccactcttgtataatgaacatgttaacacctacctcacagggttgttgtgaggatcaagtaagatattgtgtgtgtgaagatgctctgtgaaatcataaagtcctttaaagatgtaa

SEQ ID NO: 512 - DNA, 1052 bp, Homo sapiens
agagagcgctgggagccggaggggagcgcagcgagttttggccagtggtcgtgcagtccaaggggctggatggcatgctggacccaagctcagctcagcgtccggacccaataacagttttaccaagggagcagctttctatcctggccacactgaggtgcatagcgtaatgtccatgttgttctacactctgatcacagcttttctgatcggcatacaggcggaaccacactcagagagcaatgtccctgcaggacacaccatcccccaagcccactggactaaacttcagcattcccttgacactgcccttcgcagagcccgcagcgccccggcagcggcgatagctgcacgcgtggcggggcagacccgcaacattactgtggaccccaggctgtttaaaaagcggcgactccgttcaccccgtgtgctgtttagcacccagcctccccgtgaagctgcagacactcaggatctggacttcgaggtcggtggtgctgcccccttcaacaggactcacaggagcaagcggtcatcatcccatcccatcttccacaggggcgaattctcggtgtgtgacagtgtcagcgtgtgggttggggataagaccaccgccacagacatcaagggcaaggaggtgatggtgttgggagaggtgaacattaacaacagtgtattcaaacagtacttttttgagaccaagtgccgggacccaaatcccgttgacagcgggtgccggggcattgactcaaagcactggaactcatattgtaccacgactcacacctttgtcaaggcgctgaccatggatggcaagcaggctgcctggcggtttatccggatagatacggcctgtgtgtgtgtgctcagcaggaaggctgtgagaagagcctgacctgccgacacgctccctccccctgccccttctacactctcctgggcccctccctacctcaacctgtaaattattttaaattataaggactgcatggtaatttatagtttatacagttttaaagaatcattatttattaaatttttggaagcataaa

SEQ ID NO: 513 - DNA, 3918 bp, Homo sapiens
ctctcccttctccactctctccccctgtctcctttcttcttcttctttcaccctccgtctctcacaccccctccattcccctgtctcctttctgacactgcactgcagctgctcctcagccctgccccctccccagtgagaacaaaccagcaacattgctttttttcctaaagagatttatattgatccgattaaaaaaaaaaaaccttaagaaaccccaaacgcaaaaaaaaaaaaaaaaaaaaaagaaaaaagaaaagaaaaagccaaaacaaaagggagaaccttctcccggtagcagcggcaggaactgcaaacatgatggcggcagctcccatccagcagaacgggacccacactggggttcccatagacctggacccgccggactcgcggaaaaggccgctggaagccccccctgaagccggcagcaccaagaggaccaatacgggcgaagacggccagtattttctaaaggttctcatacctagttatgctgctggatctataattgggaagggaggacagacaattgttcagttgcaaaaagaaactggagccaccatcaagctgtctaagtccaaagatttttacccaggtactactgagcgagtgtgcttgatccagggaacggttgaagcactgaatgcagttcatggattcattgcagaaaaaattcgagaaatgccccaaaatgtggccaagacagaaccagtcagcattctacaaccccagaccaccgttaatccagatcgcatcaaacaaacattgccatcttccccaactaccaccaagtcctctccatctgatcccatgaccacctccagagctaatcaggtaaagattatagttcccaacagcacagcaggtctgataatagggaagggaggtgctactgtgaaggctgtaatggagcagtcaggggcttgggtgcagctttcccagaaacctgatgggatcaacttgcaagagagggttgtcactgtgagtggagaacctgaacaaaaccgaaaagctgttgaacttatcatccagaagatacaagaggatccacaaagtggcagctgtctcaatatcagttatgccaatgtgacaggtccagtggcaaattccaatccaaccggatctccttatgcaaacactgctgaagtgttaccaactgctgcagcagctgcagggctattaggacatgctaaccttgctggcgttgcagcctttccagcagttttatctggcttcacaggcaatgacctggtggccatcacctctgcacttaatacattagccagctatggatataatctcaacactttaggtttaggtctcagtcaagcagcagcaacaggggctttggctgcagcagctgccagtgccaacccagcagcagcagcagccaatttattggccacctatgccagtgaagcctcagccagtggcagcacagctggtggtacggcggggacatttgcattaggtagcctggctgctgctactgctgcaaccaatggatattttggagctgcttctcccctagctgccagtgccattctaggaacagaaaagtccacagatggatccaaggatgtagttgaaatagcagtgccagaaaacttagttggtgcaatacttggcaaaggagggaaaacattagtggaataccaggagttgactggtgcaaggatacagatctccaaaaaaggagaattcgtacctggcacaaggaatcggaaggtaaccattactggaacaccagctgcaacacaggctgctcaatatttaattacacaaaggatcacatatgagcaaggagttcgggctgccaatcctcagaaagtgggttgagtgccccagttacacatcagattgttttaacccctcctttaccccattttcaagaaggatgtactgtactttgcagaagtgaagtttttctgttattaatatataattatgcaaatgaatgcgactatgttgacaatgtgtatatgtaaataatatgtgttttaccagatgtttcatagaaagaattttttcttgatctgttttgttctctatactttgcttgtgtatatttgtcagaggtgtttctagtgtaagatttaagcctgccattttaccagcattattgtagtttaatgattgaatgtagacagggatatgcgtatagttttcagtattagttctagataacactaaattaactactgttaggttgagtatggtggggtcagtgacctaaaatggagtgaggccaaagcactgtcctgtaagtcttacttcctgcttagggcacagtgaagtaggaaacaatattttgaaaataagttttaaatttaaaatgatcaaaaagcaatatagttgcataaaagcactgtaaaatatttaaaaggttaaaactgtggaaaattatattggtaagtttacagatcaataaaagcacctgttctccatctgaactagacaatggaaataatgctgcatgctggccatggcccattcttcatcatttgtaagttcaacaaaagttctcacatggagtcccacctcttcagaggtttgtacatttgtttttaagcactgaattcactactgatcccatcgcctggccagtagaacagtcattactccattaacatcctcactgtttagacacataactgtggtacagtgtattggaaattttataaacaaaagtgaaagtgccaacaaattattgatagctgataatgtttcattatctgcaactgcttgataagtatgttgcattttaagagcttataattgtgtataatttgttaacactagaaacctattagtattgtgaatgtagattttactgtgaagctatctgtgatttagctgtttgctcccatgatggagtctttgcagcatggcgctagcagccaatgcagtttctaatactcggtaatttgcatgttttgtggagcatttttatgtcaccaaccagacagtatttcctgcatgcttatttagaagaggcagcttatcttgagaggtagtgttatctacctttgtcaggctttttgacaggtcatttcagagtaagcctttgttcccaagacccaacaactgtcaccctcttctgtacctctcctgagtgccaactgtccaggccatttgacacaccatctgttaacctctgagtttgcccactcaaggccactcataggggcatccatccccaagcacctcctcatgctgtgcatgcagtcttaaattcaatggacaaaaataaaatgctggctacctctggatcatctggctgagcaactgaattacaaaagagaattacttccatctcaacttcaacccattgattacgtccatcctagcaagctaaatggcatcccagctgctcctttctgtgcaaccaattaaagaacaatgagtgtgatgctccatgtctgaatttcgtccagcctctctctgaactgtgatctttgtcctcatgaactttcccttttgttcattgaactatatggactcttcatttcatattgatttactgtgcaatttacttttggacattgagaacttgaaattatttcctgatcccttccccttccactattaataattcatttctgtcaaactgtaagagtagactcatttttttttttttagtttttaacattggactgttatttcatttagagttctctatctctaaatatttatttagagaatgattttaaaagggaatgatatgcttgtttaaatgaaagagaaaagctgtagtaaactgtgttaattggtaatgactatttatcgtcgatactctgtagctgtgtaagttttgacaaatagtgtatctcgtggaatcagtggttagcattgccgctattatatttactcattttatcattataaatgtgcttagttcatcatgtagcatca

SEQ ID NO: 514 - DNA, 4454 bp, Homo sapiens
gaaacgtcccgtgtgggaggggcgggtctgggtgcggcctgccgcatgactcgtggttcggaggcccacgtggccggggcggggactcaggcgcctggggcgccgactgattacgtagcgggcggggccggaagtgccgctccttggtgggggctgttcatggcggttccggggtctccaacatttttcccggctgtggtcctaaatctgtccaaagcagaggcagtggagcttgaggttcttgctggtgtgaaatgactgagtacaaactggtggtggttggagcaggtggtgttgggaaaagcgcactgacaatccagctaatccagaaccactttgtagatgaatatgatcccaccatagaggattcttacagaaaacaagtggttatagatggtgaaacctgtttgttggacatactggatacagctggacaagaagagtacagtgccatgagagaccaatacatgaggacaggcgaaggcttcctctgtgtatttgccatcaataatagcaagtcatttgcggatattaacctctacagggagcagattaagcgagtaaaagactcggatgatgtacctatggtgctagtgggaaacaagtgtgatttgccaacaaggacagttgatacaaaacaagcccacgaactggccaagagttacgggattccattcattgaaacctcagccaagaccagacagggtgttgaagatgctttttacacactggtaagagaaatacgccagtaccgaatgaaaaaactcaacagcagtgatgatgggactcagggttgtatgggattgccatgtgtggtgatgtaacaagatacttttaaagttttgtcagaaaagagccactttcaagctgcactgacaccctggtcctgacttccctggaggagaagtattcctgttgctgtcttcagtctcacagagaagctcctgctacttccccagctctcagtagtttagtacaataatctctatttgagaagttctcagaataactacctcctcacttggctgtctgaccagagaatgcacctcttgttactccctgttatttttctgccctgggttcttccacagcacaaacacacctctgccaccccaggtttttcatctgaaaagcagttcatgtctgaaacagagaaccaaaccgcaaacgtgaaattctattgaaaacagtgtcttgagctctaaagtagcaactgctggtgattttttttttctttttactgttgaacttagaactatgctaatttttggagaaatgtcataaattactgttttgccaagaatatagttattattgctgtttggtttgtttataatgttatcggctctattctctaaactggcatctgctctagattcataaatacaaaaatgaatactgaattttgagtctatcctagtcttcacaactttgacgtaattaaatccaactttcacagtgaagtgcctttttcctagaagtggtttgtagacttcctttataatatttcagtggaatagatgtctcaaaaatccttatgcatgaaatgaatgtctgagatacgtctgtgacttatctaccattgaaggaaagctatatctatttgagagcagatgccattttgtacatgtatgaaattggttttccagaggcctgttttggggctttcccaggagaaagatgaaactgaaagcacatgaataatttcacttaataatttttacctaatctccacttttttcataggttactacctatacaatgtatgtaatttgtttcccctagcttactgataaacctaatattcaatgaacttccatttgtattcaaatttgtgtcataccagaaagctctacatttgcagatgttcaaatattgtaaaactttggtgcattgttatttaatagctgtgatcagtgattttcaaacctcaaatatagtatattaacaaattacattttcactgtatatcatggtatcttaatgatgtatataattgccttcaatccccttctcaccccaccctctacagcttcccccacagcaataggggcttgattatttcagttgagtaaagcatggtgctaatggaccagggtcacagtttcaaaacttgaacaatccagttagcatcacagagaaagaaattcttctgcatttgctcattgcaccagtaactccagctagtaattttgctaggtagctgcagttagccctgcaaggaaagaagaggtcagttagcacaaaccctttaccatgactggaaaactcagtatcacgtatttaaacatttttttttcttttagccatgtagaaactctaaattaagccaatattctcatttgagaatgaggatgtctcagctgagaaacgttttaaattctctttattcataatgttctttgaagggtttaaaacaagatgttgataaatctaagctgatgagtttgctcaaaacaggaagttgaaattgttgagacaggaatggaaaatataattaattgatacctatgaggatttggaggcttggcattttaatttgcagataataccctggtaattctcatgaaaaatagacttggataacttttgataaaagactaattccaaaatggccactttgttcctgtctttaatatctaaatacttactgaggtcctccatcttctatattatgaattttcatttattaagcaaatgtcatattaccttgaaattcagaagagaagaaacatatactgtgtccagagtataatgaacctgcagagttgtgcttcttactgctaattctgggagctttcacagtactgtcatcatttgtaaatggaaattctgcttttctgtttctgctccttctggagcagtgctactctgtaattttcctgaggcttatcacctcagtcatttcttttttaaatgtctgtgactggcagtgattctttttcttaaaaatctattaaatttgatgtcaaattagggagaaagatagttactcatcttgggctcttgtgccaatagcccttgtatgtatgtacttagagttttccaagtatgttctaagcacagaagtttctaaatggggccaaaattcagacttgagtatgttctttgaataccttaagaagttacaattagccgggcatggtggcccgtgcctgtagtcccagctacttgagaggctgaggcaggagaatcacttcaacccaggaggtggaggttacagtgagcagagatcgtgccactgcactccagcctgggtgacaagagagacttgtctccaaaaaaaaagttacacctaggtgtgaattttggcacaaaggagtgacaaacttatagttaaaagctgaataacttcagtgtggtataaaacgtggtttttaggctatgtttgtgattgctgaaaagaattctagtttacctcaaaatccttctctttccccaaattaagtgcctggccagctgtcataaattacatattccttttggtttttttaaaggttacatgttcaagagtgaaaataagatgttctgtctgaaggctaccatgccggatctgtaaatgaacctgttaaatgctgtatttgctccaacggcttactatagaatgttacttaatacaatatcatacttattacaatttttactataggagtgtaataggtaaaattaatctctattttagtgggcccatgtttagtctttcaccatcctttaaactgctgtgaatttttttgtcatgacttgaaagcaaggatagagaaacactttagagatatgtggggtttttttaccattccagagcttgtgagcataatcatatttgctttatatttatagtcatgaactcctaagttggcagctacaaccaagaaccaaaaaatggtgcgttctgcttcttgtaattcatctctgctaataaattataagaagcaaggaaaattagggaaaatattttatttggatggtttctataaacaagggactataattcttgtacattatttttcatctttgctgtttctttgagcagtctaatgtgccacacaattatctaaggtatttgttttctataagaattgttttaaaagtattcttgttaccagagtagttgtattatatttcaaaacgtaagatgatttttaaaagcctgagtactgacctaagatggaattgtatgaactctgctctggagggaggggaggatgtccgtggaagttgtaagacttttatttttttgtgccatcaaatataggtaaaaataattgtgcaattctgctgtttaaacaggaactattggcctccttggccctaaatggaagggccgatattttaagttgattattttattgtaaattaatccaacctagttctttttaatttggttgaatgttttttcttgttaaatgatgtttaaaaaataaaaactggaagttcttggcttagtcataattctt

SEQ ID NO: 515 - DNA, 2885 bp, Homo sapiens
acttgaggagtcgactgagagctttatctttgcccctgtgacgggtggcctgtggtttcctgccaacaactcctgtttccggaggcccaacaaggcccacgcagagccaggaggggcagtggggctgggcctgggtggccccaccagccccgccccatctatctttgggaatttatttgtccatgggcgaggctggcctgcagtctgttgccttccaggggccaagagctgctctgatcacccagggattctctctccaacccaagtgcctccagctgacctctggctcctgtcctctggctccacctgcaccgccctgctcttcctaaggggccaggaagcccccagaagctctaccatcgacgtgggtggtggcacccggctcaccctgagagcagaggccgtgcagggggctcagttctgagccccagccggcccaccatggcacggcggttccaggaggagctggccgccttcctcttcgagtatgacaccccccgcatggtgctggtgcgtaataagaaggtgggcgttatcttccgactgatccagctggtggtcctggtctacgtcatcgggtgggtgtttctctatgagaagggctaccagacctcgagcggcctcatcagcagtgtctctgtgaaactcaagggcctggccgtgacccagctccctggcctcggcccccaggtctgggatgtggctgactacgtcttcccagcccagggggacaactccttcgtggtcatgaccaatttcatcgtgaccccgaagcagactcaaggctactgcgcagagcacccagaagggggcatatgcaaggaagacagtggctgtacccctgggaaggccaagaggaaggcccaaggcatccgcacgggcaagtgtgtggccttcaacgacactgtgaagacgtgtgagatctttggctggtgccccgtggaggtggatgacgacatcccgcgccctgcccttctccgagaggccgagaacttcactcttttcatcaagaacagcatcagctttccacgcttcaaggtcaacaggcgcaacctggtggaggaggtgaatgctgcccacatgaagacctgcctctttcacaagaccctgcaccccctgtgcccagtcttccagcttggctacgtggtgcaagagtcaggccagaacttcagcaccctggctgagaagggtggagtggttggcatcaccatcgactggcactgtgacctggactggcacgtacggcactgcagacccatctatgagttccatgggctgtacgaagagaaaaatctctccccaggcttcaacttcaggtttgccaggcactttgtggagaacgggaccaactaccgtcacctcttcaaggtgtttgggattcgctttgacatcctggtggacggcaaggccgggaagtttgacatcatccctacaatgaccaccatcggctctggaattggcatctttggggtggccacagttctctgtgacctgctgctgcttcacatcctgcctaagaggcactactacaagcagaagaagttcaaatacgctgaggacatggggccaggggcggctgagcgtgacctcgcagctaccagctccaccctgggcctgcaggagaacatgaggacatcctgatgctcgggccccaactcctgactgggtgcagcgtgaggcttcagcctggagccctggtgggtcccagccagggcagaggggcctccccaggaagtctcctaccctctcagccaggcagagagcagtttgccagaagctcagggtgcatagtaggagagacctgtgcaaatctgagctccggctccgaccccacacaccctgagggagccctaccctagcctcagccgctcctggtggggaatggctggggctgggcaggaccctcccacacacctgcaccctagcttcgtgcttctctctccggactctcattatccaacccgctgcctccatttctctagatctgtgctctccgatgtggcagtcagtaaccataggtgactaaattaaactaaaataaaatagaatgaaacacaaaattcaattcctcggctgaactagccacatttcaactgctcagtagatacgtgtggttagtggctgccatactggacagctcggggcattttcactgtcaaagaaagttctattagacagccctgcttgagccctgtttcttcctggccttcggtttccctggggaacttatcgacaatgcaagctcctgggcccacccccagacctcctgaaccaaaagctccagggctggccgtatgatctgtgtggatggcaaactccccaggccattctgggacctaagtttaagaagtgccgtcctcgaactttctgactctaagctcctgagcgggagtcagacttagccctgagcctgcacttcctgttcaggtgcagacactgaacagggtctcaaacaccttcagcatgtgtgttgtgtgctcacgtgccacacagtgtctcatgcacacaacccagtgtacacaccacctacgtgcacacagcatccttccacactgtgtatgtgaacagcttgggccctgcaaacacaaccatctacacacatctacacccccaagcacacacacatggtccgtgccatgtcacctccatagggaaaggcttctctccaagtgtgccaggccaggacagccctcccagccatgaatccttactcagctacctcgggttggggtgggagccccagccaaatcctgggctccctgcctgtggctcagccccagctcccaaggcctgcctggctctgtctgaacagaaggtctgggggaagcgacgggtggagtacaataaagggaatgaggacaaacaaaaaaaaaaaaaaaaaaaaa

SEQ ID NO: 516 - DNA, 11025 bp, Homo sapiens
gagcatcttttggggggagggaattcagcggatcagtcttaagaggagcttttttttggagcgagaaatcatataaaataaaatgaaataaaacaaggaggaaggcaaccagctgttaggggaaaaataaggcagataaaggagcggggagagaaattaattgccaaccaggaggagttgggctgtatttttcaaaggtggggagagtggagcacacaccttgaggaggaaagcgagaaagaaaagaaaaaagcaagtggaaaggggggctcgcccaagaagggtgaagaagcgaagaaagtcgaggcgccgaggctcccaaagctggcagctccgggtggcggtgcaggggcgaagggggggcggggggaaccgtcggacatgcggctctggagttgggtgctgcacctggggctgctgagcgccgcgctgggctgcgggctggccgagcgtccccgccgggcccggagagacccgcgggccggccgacccccgcgccccgccgccggcccggccacctgcgccacccgggcggcccgcggccgccgcgcctcgccgccgccgccgccgccgccgggcggtgcctgggaagccgtgcgcgtcccccggcggcggcagcagcgggaggcgaggggcgccaccgaggagccgagcccgccgagccgggcgctctatttcagcgggcgaggcgagcagctgcgcctccgggccgacctcgagctgccccgggacgcgttcacgctgcaagtgtggctgcgagcggaggggggccagaggtctccggcagtgatcacagggctgtatgacaaatgttcttatatctcacgtgaccgaggatgggtcgtgggcattcacaccatcagtgaccaagacaacaaagacccacgctactttttctccttgaagacagaccgagcccggcaagtgaccaccatcaatgcccaccgcagctacctcccaggccagtgggtatacctagctgccacctatgatgggcagttcatgaagctctatgtgaatggtgcccaggtggccacctctggggaacaagtgggtggcatattcagcccactgacccagaagtgcaaagtgctcatgttagggggcagtgccctgaatcacaactaccggggctacatcgagcacttcagtctgtggaaggtggccaggactcagcgggagatactgtctgacatggaaacccatggcgcccacactgctctacctcagctcctcctccaggagaactgggacaatgtgaagcatgcctggtcccccatgaaggatggcagcagccccaaagtggaattcagcaatgcccacggctttctgctggacacgagtctggagcctcctctgtgcggacagacattgtgtgacaacacagaggtcattgccagctacaatcagctctcaagtttccgccagcccaaggtggtgcgctaccgcgtggtcaacctctatgaagatgatcataagaacccgacggtgacgcgcgagcaggtggacttccagcaccatcagctggctgaggccttcaagcaatacaacatctcctgggagctggacgtgctggaggtgagcaactcctcccttcgccgccgcctcatcctggccaactgtgacatcagcaagattggggatgagaactgtgaccccgagtgcaaccacacgctgacgggccacgacggcggggattgccgccacctgcgccaccctgccttcgtgaagaagcagcacaacggggtgtgtgacatggactgcaactatgaacggttcaactttgatggtggagagtgctgtgaccctgaaatcaccaatgtcactcagacttgctttgaccccgactctccacacagagcctacttggatgttaatgagctgaagaacattcttaaattggatggatcaacacatctcaatattttctttgcaaaatcctcagaggaggagttggcaggagtagcaacttggccatgggacaaggaggccctgatgcacttaggtggcattgtcttgaacccatctttctatggcatgcctgggcacacccacaccatgatccatgagattggtcacagcctgggcctctatcacgtcttccgaggcatctcagaaatccagtcctgcagtgacccctgcatggagacagagccctccttcgagactggagacctctgcaatgataccaacccagcccctaaacacaagtcctgtggtgacccagggccaggaaatgacacctgtggctttcatagcttcttcaacactccttacaacaacttcatgagctatgcagatgacgactgtacggactccttcacgcccaatcaagtcgccagaatgcactgttacctggacctggtctaccagggctggcagccctccaggaaaccagcgcctgttgccctcgccccccaagttctgggccacacaacggactctgtgacactggagtggttcccacctatagatggccatttctttgaaagagaattgggatcagcatgtcatctttgcctggaagggagaatcctggtgcagtatgcttccaacgcttcctccccaatgccctgcagcccatcaggacactggagccctcgtgaagcagaaggtcatcctgatgttgaacagccctgtaagtccagtgtccgcacctggagcccaaattcagctgtcaacccacacacggttcctccagcctgccctgagcctcaaggctgctacctcgagctggagttcctctaccccttggtccctgagtctctgaccatttgggtgacctttgtctccactgactgggactctagtggagctgtcaatgacatcaaactgttggctgtcagtgggaagaacatctccctgggtcctcagaatgtcttctgtgatgtcccactgaccatcagactctgggacgtgggcgaggaggtgtatggcatccaaatctacacgctggatgagcacctggagatcgatgctgccatgttgacctccactgcagacaccccactctgtctacagtgtaagcccctgaagtataaggtggtccgggaccctcctctccagatggatgtggcctccatcctacatctcaataggaaattcgtagacatggatctaaatcttggcagtgtgtaccagtattgggtcataactatttcaggaactgaagagagtgagccatcacctgctgtcacatacatccatggaagtgggtactgtggcgatggcattatacaaaaagaccaaggtgaacaatgcgacgacatgaataagatcaatggtgatggctgctcccttttctgccgacaagaagtctccttcaattgtattgatgaacccagccggtgctatttccatgatggtgatggggtatgtgaggagtttgaacaaaaaaccagcattaaggactgtggtgtctacacgccccagggattcctggatcagtgggcatccaatgcttcagtatctcatcaagaccagcaatgcccaggctgggtcatcatcggacagccagcagcatcccaggtgtgtcgaaccaaggtgatagatctcagtgaaggcatttcccagcatgcctggtacccttgcaccatcagctacccatattcccagctggctcagaccactttttggctccgggcgtatttttctcaaccaatggttgccgcagctgtcattgtccacctggtgacggatgggacatattatggggaccaaaagcaggagaccatcagcgtgcagctgcttgataccaaagatcagagccacgatctaggcctccatgtcctgagctgcaggaacaatcccctgattatccctgtggtccatgacctcagccagcccttctaccacagccaggcggtacgtgtgagcttcagttcgcccctggtcgccatctcgggggtggccctccgttccttcgacaactttgaccccgtcaccctgagcagctgccagagaggggagacctacagccctgccgagcagagctgcgtgcacttcgcatgtgagaaaactgactgtccagagctggctgtggagaatgcttctctcaattgctccagcagcgaccgctaccacggtgcccagtgtactgtgagctgccggacaggctacgtgctccagatacggcgggatgatgagctgatcaagagccagacgggacccagcgtcacagtgacctgtacagagggcaagtggaataagcaggtggcctgtgagccagtcgactgcagcatcccagatcaccatcaagtctatgctgcctccttctcctgccctgagggcaccacctttggcagtcaatgttccttccagtgccgtcaccctgcacaattgaaaggcaacaacagcctcctgacctgcatggaggatgggctgtggtccttcccagaggccctgtgtgagctcatgtgcctcgctccaccccctgtgcccaatgcagacctccagaccgcccggtgccgagagaataagcacaaggtgggctccttctgcaaatacaaatgcaagcctggataccatgtgcctggatcctctcggaagtcaaagaaacgggccttcaagactcagtgtacccaggatggcagctggcaggagggagcttgtgttcctgtgacctgtgacccacctccaccaaaattccatgggctctaccagtgtactaatggcttccagttcaacagtgagtgtaggatcaagtgtgaagacagtgatgcctcccagggacttgggagcaatgtcattcattgccggaaagatggcacctggaacggctccttccatgtctgccaggagatgcaaggccagtgctcggttccaaacgagctcaacagcaacctcaaactgcagtgccctgatggctatgccatagggtcggagtgtgccacctcgtgcctggaccacaacagcgagtccatcatcctgccaatgaacgtgaccgtgcgtgacatcccccactggctgaaccccacacgggtagagagagttgtctgcactgctggtctcaagtggtatcctcaccctgctctgattcactgtgtcaaaggctgtgagcccttcatgggagacaattattgtgatgccatcaacaaccgagccttttgcaactatgacggtggggattgctgcacctccacagtgaagaccaaaaaggtcaccccattccctatgtcctgtgatctacaaggtgactgtgcttgtcgggacccccaggcccaagaacacagccggaaagacctccggggatacagccatggctaaggaaggacaagaagttgtcaaagaattcccaacgccaggacccacatccctttggtattgatttcacagtcagctgctcaacggaatggcctctccacaccagggatccttagcacccaaccggtctgcctttaattttacccaggaaggactcacattggggcgaatgaaccaagtttcgccatgctggatgatgaaatggattcccatcccaaagtctgagatggattgcatatacagtgtgcagtcccagagcctcctaaaattctagccatttgtcacacaaccacagcaagaaacgtgttctatatctagagtgtgcccatctgtgtttagtacacatgcatgcatacacacccatacaaacatctgtgtgagggcagttctggagatgagcagagagagaccggaataaactcaatcttttctttcccaagctcctagccaacactatccttgggagaaagaaatttgcagaaactgctaagaccaagtgtggagatgtcaagctagttcacactctgaggctcagaatatgtaggacatgcacaattgtgcagtcctttgggattggaagtgaaacagtctgtgatcccctaccttctagggaactaggacctaggaagaggtaaagattatcaggtatgcaaagcgccccaattcttctgctgccatgggggattttaccccaactccagggttcgaggccaatctgagaatggcttaggattgcaatgtcaaggtattatatcagccccttgcttgaggcttgaggtcataatatccctctaggacttacctgttcccccagatcttgccttgggaccacatttgctgctacttttcctgctgctctatcctatacattgaataatccaagatggtagaactaggttaggaaaaattccacacaaccaaacagtctgccttaaaagtgacccacatttttccatagctcctcactttttagcccttctgcaagagaaaaaccctcatgggtccacatggtgagaagttaagtttcctgtaagtgggcctctcaccctggaaaggagttgagggacatcagatgctggaaccctcactgaaagtccagaatgtctaagccagtgttagattttgtaaacaagtggaacagtgttaaatttctatgatgttggagccatccagagactactggaattgtcgagacttttggattattatccttatccttatcctaatcttcctagcccttcaggctagagtaggcttcgatcctgagaaccttgctgttgctctgaggagatataattctgggagaaagaatcttttataagaacagtacagattgttctcaagagggccatcagaaggaagccaaagagttcacagcctcagcaccaacaactcaacatggtcatcatgttttctatatggtttttccagctagcagtactcccttccatacctgtgactgggcagtgcttttctctctcccatgtctagcctccaaaagttaagtgaaaattagtcaactgcacgtggaagcccccaccactttggggatctctttatttcttttcagccagggacctgtccactccctttgaattaatatgggaagaaattaatacaggatgaactggagagaagggttgagtgtggcatactttctgaaacctggagctgggaattgcggagaagggaaggtctagactagttacatcacatagggattactgtaaatcaagtcatctcaagtctagtgaagacagccaacagaaacaaaacctagcatagggatagaaaataccatgcacgtgtgcagccccacctaattcctgcatccaaggcaggtgttgttaatctatcatagcacttaaaaaaaaaaaaaaaaagagaccaaaaataactttaggaaccaccatattatatcactcccaatagcactgacctggtgatcaaaaacacttgagaagacatctattggccatctctggccaattacactaagaaacatatcaaggtgcttttggcacaggtgcccacaaatacggatgcagtgctgagatagtttatgagacttgtaccatttcacaaactctgaaattgggttccatattggcaaggctgccacagttgttaagaataatcctctatgtttcttcctcacaaaaccatatctcatttatatccagaccattacttcactataattacaaggacaaattattagcaagaaataagaatagtattagaagaattgatcctattttgaacccctctccagtatcttcacactcttgtcaactctccaggcctctctcttgccctgagttatcagcctgtgtggtgttaactaccttagaaggtacaagctaagaaatgtaacagtatcaaccctcccagttgcttaattatacccataggtaatacaaaaagctctgaagacccaaagatgacattactaatgatgtgatttcaggagccacagaagaaccttaccagcttccctcaaatcagtccttatcctctttctatcttcactcccatcatcatctattttcacactatccagctaagcaaagattcctggaggctgacttgtatcttcagactcacagagtgaattcagctcttctgaatcaagacccacccagtctctttcattcagacctgttgctaacaaatttatatttgccaaggatattaggcaaaagaggctacttgattggtggccaacctcgtgcccacatggaaggtatctttaatagggtcttttcaaaccttagtggaggagggtcagctcaatttgggcaatgcatttgttcccagtttcattttcttcctgggaattaactcgtcatttcattccttcagtcatcttctgtgtaggtgaccggagcactgagaggcagctctgatgcactattgtgtgtcagcagctcaaaggccctaaaacactgaaggttctgcatctgaagtattagattgttagcagcaaaatatgaaagatgaggtggacagtcctctaagccctatttagggaagcttttccaagccacaatcttaactacctacccaaaggatttgcattacccccagattctgtgccaacaaccttttaaggaaatacagtccttgggaaatgagttttgatggtgaattggggtgttaaggaagggaaagattgtcatagatggtagggctttgaaaatgcagggtatcagctgccactcctggcttcaacacattgagtcactgcctagacggttctcttggtcttattcccatcctggccaatgcttaaatactatttgttgaaaataattctttgagacagatttcagctacctcccttccaggttcgatttaacttggttgtaattgtcaatttgttgttataggtcttacctgtgtgaaagaaagaaaaagaaagaaagaaagaaagagaaaggaaattataaggtcaagttaacagttttgaggttttgtgtttttttctggaactacttcaagtgagaaaataaaaaaaaatggtgacaaagctgtacagatagagataatagaagacaaagagattaaaaggaaataaaaatgcatgattaaaaactaagaataaaaaacctatttttatgtttcctaaaggaaattgtttattctacagcctcagtaggtagacacaaacataaagatttccctagaagacatagagtgggatttgataacactgtctgttattttctgtacattgtggtaggtccaggaaatatgacattttcccccttgatgtgttattgttgttgttgggtggggtgggcattttgtttatttgtttggtggcaatcagtggtagtagggagtgggagggcttatattggtttttccagctattaaggggacatattgtgtcgttgtgcttttcacgttataaaatgtttatatttaccagtacagcactgggctttataaagactgcactcagaaccacactgcacagtccagttttttaaaaagctgctacatgacagacaggtaatcccactgagtgagttttgagaaacaaatcaaacgaagtaaacaagaaacataaaaaccaaatagcaaatgaataaaagcctgttcttgtaacttattcaacttttgccaaattcctaccaatcacttgctttttaaaagaaatgtataatagccaaaagagaaattatgtccctgttgtacagaagttagaatttttgactccaggcagcagtttgctcagtgatcttgaacaagttatccaattgcctctacatttgcatcagtttctctagctgcaaaatggggataatactatatacctacctcacagtgggagggcaggagattttgaggccctgaggttttaggtgggctgtgagggccaacgcttgacacaaagtccatgggttattattcaagaatgcacaggcccatcggccttttagaaagacaagacagggagtgcttgtttgatatttcaaggaataaagccggagctcctgaattgtagtccaccttaaaagagagacctgtattggagaatattttatttttttggcaaatttgatcttaccctttaccagttctataatttggttaaaagctgattatgtcctacaatgtcaaagtcagctaactgtcgtctacttaagacttctggtcatttccaacttatagaggaagggagtctctaaaatctcttcttcagaaggcacctcacttctcagacttaaaattccacatcaagtgttccattaaaagaagataaggcattctgagtgcaaacaaatgggggcttcttaaactacacaccagcagtcagtgaggaaaactttgaacaattattgagttgctttcttgggtctctataatcaataacctgtctgcagatatctatctatataaagatattatatataaatataaatttacatatatatgcacatgtatatatagttgtacatatatgtgtgtatatatatacttaaatgtaatatttacaaaataaaactgtgatctcgtctagagaaaatgtattcatattacaaactgctcttccatatttatgtaccatattatacctttttattattgttataattattatgggtatttctaattaatatgatgttgaaacctgtttggcaccttctggaagctaccaaaaaaatgacactccattgaagtgcttaaaagctgttctcataagaattctactggcctattgtaaaaaagaaaaaaaaaaagaaaaagaagaaagacacaaagaaaataatctaaacaccaaaaactaaacacaattccaatcctttttctgtacctcacgcgcataaatttgctgctcctatttttttttctgtttatgtgtttttatggatctaagttaaatcttttggcaatatataaaaatgtaaatagtaaactttatttattaagaatgtcatcttttttaatttatatttacacaattgttcatctaatttattttttctatacagttttaaatactcagacatattttgctgttcatgatatttttatcctgttctcatggatttgttttcccatactgttttctctgatctcaattacaggttggatctcacaaataataatgtcagagacagaaatattttgccactgttgattactatactttaaagttctatattatgaaaatatataatagcttgtacgcttcaaaaaaaaaaaaaaaaaaaaaaaaaaaaaaaaaaaaaaaaaaaaaaaaaaaaaaaa

SEQ ID NO: 517 - DNA, 3231 bp, Homo sapiens
ctctctcacacacacccccgcttgggcctcctctctctctccggctccattttctccgccgccgggggccggggtctcctgtggggggcccagccggtatcccaggtctcccttcagtgccggggtgaacccccgggggagccgggagccgggggcagacgggcgggggttggggcggagggagcagcggccccagcgagtttggggggagaagtaaccaggcggggggaggggcggagcagggagggggcctcagggcccccccccagctatggacgaacggctactggggccgccccctccaggcgggggccgggggggcctgggattggtgagtggggagcctgggggccctggcgagcctcccggtggcggagaccccggtgggggtagcgggggggtcccgggaggccgagggaagcaagacatcggggacattctgcagcagataatgaccatcaccgaccagagcctggacgaggcccaggccaagaaacacgccctaaactgccaccgaatgaagcctgctctctttagcgtcctgtgtgaaatcaaggagaaaactggcctcagcattcggagctcccaggaggaggagccggtggacccacagctgatgcgcttggacaacatgcttctggcagagggtgtggctgggcccgagaaagggggcggctcagcagcagcagctgcagccgctgcagcctctggtggtggtgtgtcccctgacaactccatcgaacactcggactatcgcagcaaacttgcccagatccgtcacatataccactcggagctggagaagtatgagcaggcatgtaatgagttcacgacccatgtcatgaacctgctgagggagcagagccgcaccaggcccgtggcccccaaagagatggaacgcatggtgagcatcatccatcgaaagttcagcgccatccagatgcagctgaagcagagcacctgcgaggctgtgatgatcctgcgctcccgtttcctggatgccagacgaaagcgccgtaacttcagcaaacaggccactgaggtcctaaatgagtatttctactcccacctgagtaacccatatcctagtgaggaggccaaggaggagcttgccaagaagtgtggcatcaccgtgtctcaggtctccaactggtttggcaacaagaggattcgctataagaaaaacatcggaaagttccaagaggaggcaaacatctatgctgtcaagaccgccgtgtcagtcacccaggggggccacagccgcaccagctccccgacacccccttcctctgcaggctctggcggctctttcaatctctcaggatctggagacatgtttctggggatgcctgggctcaacggagattcctattctgcttcccaggtggaatcactccgacactcgatggggccagggggctatggggataacctcgggggaggccagatgtacagcccacgggaaatgagggcaaatggcagctggcaagaggctgtgaccccctcttcagtgacatccccaacggagggaccagggagtgttcactctgatacctccaactgatcttgcccctcagggtcacaggggtgggggctctcacaaggcgacttgaagaggacgcaggcttccagaggacaaaccccaatacaggagaagcacaagacagagaagggccaatggggtcatcccctccctaacgagactctctgtgctgggggtgctaattacatggcaggaagaatggggcctctaaggggagtgtggggtctgtctctcccttttttccatctttttcctctctcgctttctttcttacacagaaacatacacataccgagaaacctatttctcagacccctttttctcctctgtctttctctctccctctcccacacctcacacacacatactcccacttgcaactattctgtttctctcctgggctcccccactttcccttccccaccccacttgtatgctctggaatctgtggagacgccagccctgcccaatcagagatgccaaaaatggggacatgacttctggacagaggacatgggccacgcccccatgcatccccacccccgcccctccggacggcttacttacctcatacgcagctcatcttaaaccaatagaatcgctcggtggacgagagtgtctgactcagatatctacctcggagggagtttctgctactttagggaattattgactgggctttggggttgaacttttttttttttaaagaaagaaaaagaaaccctgggatccatctgttttttttgttgttgttgttgtttttgttgttgttggtggtggtggtggtggtggttcttaatttttaatttagtttggggaagtagcttgtttttttttttataaatatgttgatttcttgtctttttttttttttatttcttactttcccatattaggggtgatagccaaaggggttctggtaagagaaagggggacaaacagaactggtaaagaggcccccctggctccaggcctgtccatcaggaagtaaattttacagggcaccaagctttgccccctaaaatcccttaggtgttctttgttcatgcaggcaggtttctgccgcatttgatgtggaggcagtgaagggcttgccctgctggcctctcatcccccttcttcccacaacccttgggcagggctggactcagtaattttgaggaaattgaagatgccatcttcccctgtgagtgacatgtctttaattttttaaaaaactactatttgaaaattggagggggaagaatgggaagggagttattgccaaatatgttaaatatgggttggggtgcttgtatatgtatcttcctcaatttccccataaatgaggtatctttttgtcacaccaaaatcaaggggtagggagagggaggaggttgcaaaaagccagatgtgggggaaaagtaacatcaacactgtcccatcctcagccctgaactagctaccatctgatcccctcagacattctcaggattttacaagactgtcagagtggggaacccctcccattaaagatccgggcaggactggggacaggttggaagtgtgatgggtgggggggtgggaggcatgggccgggggcagttctctcctcacttgtaaacttgtgtagtttcacagaaaaaaaacaaaatgcagttttaaataaagaaatttcttttttccctgggaaaaaaaaaaaaaaaaaa

SEQ ID NO: 518 - DNA, 3393 bp, Homo sapiens
cctgcctgcctccctgcgcacccgcagcctcccccgctgcctccctagggctcccctccggccgccagcgcccatttttcattccctagatagagatactttgcgcgcacacacatacatacgcgcgcaaaaaggaaaaaaaaaaaaaaaagcccaccctccagcctcgctgcaaagagaaaaccggagcagccgcagctcgcagctcgcagctcgcagcccgcagcccgcagaggacgcccagagcggcgagcgggcgggcagacggaccgacggactcgcgccgcgtccacctgtcggccgggcccagccgagcgcgcagcgggcacgccgcgcgcgcggagcagccgtgcccgccgcccgggccccgcgccagggcgcacacgctcccgcccccctacccggcccgggcgggagtttgcacctctccctgcccgggtgctcgagctgccgttgcaaagccaactttggaaaaagttttttgggggagacttgggccttgaggtgcccagctccgcgctttccgattttgggggcctttccagaaaatgttgcaaaaaagctaagccggcgggcagaggaaaacgcctgtagccggcgagtgaagacgaaccatcgactgccgtgttccttttcctcttggaggttggagtcccctgggcgcccccacacggctagacgcctcggctggttcgcgacgcagccccccggccgtggatgctcactcgggctcgggatccgcccaggtagcggcctcggacccaggtcctgcgcccaggtcctcccctgccccccagcgacggagccggggccgggggcggcggcgcccgggggccatgcgggtgagccgcggctgcagaggcctgagcgcctgatcgccgcggacccgagccgagcccacccccctccccagccccccaccctggccgcgggggcggcgcgctcgatctacgcgtccggggccccgcggggccgggcccggagtcggcatgaatcgctgctgggcgctcttcctgtctctctgctgctacctgcgtctggtcagcgccgagggggaccccattcccgaggagctttatgagatgctgagtgaccactcgatccgctcctttgatgatctccaacgcctgctgcacggagaccccggagaggaagatggggccgagttggacctgaacatgacccgctcccactctggaggcgagctggagagcttggctcgtggaagaaggagcctgggttccctgaccattgctgagccggccatgatcgccgagtgcaagacgcgcaccgaggtgttcgagatctcccggcgcctcatagaccgcaccaacgccaacttcctggtgtggccgccctgtgtggaggtgcagcgctgctccggctgctgcaacaaccgcaacgtgcagtgccgccccacccaggtgcagctgcgacctgtccaggtgagaaagatcgagattgtgcggaagaagccaatctttaagaaggccacggtgacgctggaagaccacctggcatgcaagtgtgagacagtggcagctgcacggcctgtgacccgaagcccggggggttcccaggagcagcgagccaaaacgccccaaactcgggtgaccattcggacggtgcgagtccgccggccccccaagggcaagcaccggaaattcaagcacacgcatgacaagacggcactgaaggagacccttggagcctaggggcatcggcaggagagtgtgtgggcagggttatttaatatggtatttgctgtattgcccccatggggtccttggagtgataatattgtttccctcgtccgtctgtctcgatgcctgattcggacggccaatggtgcttcccccacccctccacgtgtccgtccacccttccatcagcgggtctcctcccagcggcctccggcgtcttgcccagcagctcaagaagaaaaagaaggactgaactccatcgccatcttcttcccttaactccaagaacttgggataagagtgtgagagagactgatggggtcgctctttgggggaaacgggctccttcccctgcacctggcctgggccacacctgagcgctgtggactgtcctgaggagccctgaggacctctcagcatagcctgcctgatccctgaacccctggccagctctgaggggaggcacctccaggcaggccaggctgcctcggactccatggctaagaccacagacgggcacacagactggagaaaacccctcccacggtgcccaaacaccagtcacctcgtctccctggtgcctctgtgcacagtggcttcttttcgttttcgttttgaagacgtggactcctcttggtgggtgtggccagcacaccaagtggctgggtgccctctcaggtgggttagagatggagtttgctgttgaggtggctgtagatggtgacctgggtatcccctgcctcctgccaccccttcctccccacactccactctgattcacctcttcctctggttcctttcatctctctacctccaccctgcattttcctcttgtcctggcccttcagtctgctccaccaaggggctcttgaaccccttattaaggccccagatgatcccagtcactcctctctagggcagaagactagaggccagggcagcaagggacctgctcatcatattccaacccagccacgactgccatgtaaggttgtgcagggtgtgtactgcacaaggacattgtatgcagggagcactgttcacatcatagataaagctgatttgtatatttattatgacaatttctggcagatgtaggtaaagaggaaaaggatccttttcctaattcacacaaagactccttgtggactggctgtgcccctgatgcagcctgtggcttggagtggccaaataggagggagactgtggtaggggcagggaggcaacactgctgtccacatgacctccatttcccaaagtcctctgctccagcaactgcccttccaggtgggtgtgggacacctgggagaaggtctccaagggagggtgcagccctcttgcccgcacccctccctgcttgcacacttccccatctttgatccttctgagctccacctctggtggctcctcctaggaaaccagctcgtgggctgggaatgggggagagaagggaaaagatccccaagaccccctggggtgggatctgagctcccacctcccttcccacctactgcactttcccccttcccgccttccaaaacctgcttccttcagtttgtaaagtcggtgattatatttttgggggctttccttttattttttaaatgtaaaatttatttatattccgtatttaaagttgtaaaaaaaaataaccacaaaacaaaaccaaatgaaaaaaaaaaaaaaaaaa

SEQ ID NO: 519 - DNA, 3644 bp, Homo sapiens
gactccggctgcagccgcgggaggtccggacactggcggccatggaactcaccggtaatagaggacacatctcttaactgggttgctctaagaactgatgtctaaaccgtctcagcatggcctgtagaggaggagctgggaatggccaccgtgcctcagctacactctctcgggttagccctggaagtctttacacatgtagaacccgtacccataatatatgcatggtatctgactttttctacccaaatatgggaggcgtggaaagccacatttaccagctctctcagtgcctgattgaaagagggcataaggttataattgtcacccatgcttatggaaatcgaaaaggcatccgttacctcaccagtggcctcaaagtctattacttgcctctgaaagtcatgtacaaccagtctacagccacgaccctctttcacagtctgccattgctcaggtacatatttgttcgggagagagtcacgataatccattcacatagttctttttctgctatggcccatgatgctctcttccacgccaagacaatggggcttcagacagtcttcacggaccattccctttttggatttgctgatgtcagctcggtgcttacaaacaagcttctaaccgtgtctctttgtgatacaaaccacatcatttgtgtgtcttatactagtaaggaaaatactgtactaagagcagcactgaatcctgaaatagtgtccgtcattcctaatgctgtagatcctactgacttcactccagacccatttagaaggcatgatagtataactattgttgttgtcagcagacttgtttacagaaaagggatcgatttgcttagtggtataatacctgaactctgtcagaaatatccagatttaaatttcataattggaggagagggaccaaagagaatcattttggaagaagttcgggaaagataccagctgcatgacagggtgcgtcttttgggagctttagaacacaaggatgttagaaatgtcttagttcaaggacatatttttctgaatacctcccttactgaagcattctgcatggcgatcgtggaagcagccagttgtggtttacaggttgtaagtaccagagttggtggaattcctgaggtgcttccagaaaaccttattattttatgtgagccttcagtaaaatctttgtgtgaaggattggaaaaggctattttccaactgaagtcagggacattgccagctccagaaaacatccataacatagtaaagactttctacacctggaggaatgttgcagaaagaactgaaaaggtatatgaccgggtatcagtggaagctgtgttgccaatggacaaacgactggacagacttatttctcactgcggcccagtaacaggctacatctttgctttgttggcagttttcaacttcctcttcctcattttcttgagatggatgactccagattctatcattgatgttgcaatagatgccactgggccacggggtgcctggactaataactattctcacagtaaaagagggggtgagaataatgagatatctgaaaccaggtagaaggaagcctagattgtaagattttaaacatttgtaatagttctataaagactatggaaaataaccttgcttttggggggtttttgtttttttagagttaatttagtaagttatgctacctctatatcattcaatattttctgttgaggaaagataaaaatgtatgcaattcctgagtgtagaaacttcttgcacttatttaaaatttaggagagaacatttaagccactcaggtatgcaatttttcagactactgaaatccctgtagcagagatgttttaacattatattttgagagctttgggtgctgaagggccaaacgttttctgggcattttttggccagtttttaatgtaacaccattagacactcaccagatgtttacaagttttctttaggggaactacaacaattatatgaactgttttatatcatgttcatatacatttattaggaatctaaatcatgtctttgaacatttattaggttcactcagtaggtgttacatgtaattaacaggttccttgagtaagatagtccatcagttaccagcacattttgaacccctgctctgtgtagaatgttgaactagatgcttcccgccattaaggaccaggggtgcattcactctttgtttaccattcaaatggcttacttcatcataattgtggttgatatgagatcaatatccaacatgccaaaaatgctcatgccagttaatgccaggaaaaaaatcaccgacacactactagtactttgttcctgttgtatgcattctcctaggtagagcctccatcttcagttgtgtttgtgaaggtattttttgctttttaaatactggggaccgatatcactgttgatagtgcagagaaaccctccacatttttcagtgcataattgagttttctataaatgccttcgtgttttctgagcagaatgtacgaggtgtgccatcccaaaaccagctgctaccctgtccttttaatgtaagtcactccccttcactgtggcctcgctgatgtctgataagtattgtcagtgtgcaaaaggctttacttcagaatggtttatttatagcaaactaagttgaaaattttagaaacagtctttgtgggtggatgttattaactgtcattgttgttgcccagagccatgggttttttaaccccaaattatccacatggtgtgtattatgaattctttgaactcttaaggtttttgtgagaaaaggactgtgaattcaaaacaataaggcacttgtgggtgcactacatagattctgacagtgttgtgattctgtataggatttttaaaaatgacaacattcacaaaatttattactttttaaaaaataacatgcctattaactggttgcactgatataaaagaaatatatttgtgttttgtttgtactaaaatgcaaaagcaagagtgcaatttttaaaatctagaagttaggggttttgttggagaaaaatggactgatctttaaactattcagtcttactgggatttttatgcatagaaactcacatataaacatgaaataaacagtgccagtattcataggaaagtgagaaactgtaatatttggccattattctattcaacaggttttagaggcatgccaccattttttccttatatttttgcttaatttttttaaattgtcatttaattcttaaactgtcatttatttgagatggaaataagatctaaagttagttgcctttgcctgtaaaacatgtgatttgcaaattattatttttcttttttttaacaaatggaagtaaatttgtttcacgtaaatcttaattttcaacctttctggataccttaattgtaactgtcagtttgcactggtcggtatatggaaacacattgctctaccctgctacttagttgattttaaagtgaatttacagtgatgagaaatttgtgaaaaatatattgtatttcttttgatgtttcaaaaggttgcctatgaaaaactgatttgttaaaacatgctacatgtccaaaaataaagaccagaatgacattttgataattttcaaaaaaaaaaaaaaaaaa

SEQ ID NO: 520 - DNA, 5656 bp, Homo sapiens
acaatgcaccgcacaatggcccgaccgccgccactaccggggcctgagggggcctggcggagcccgagcgcggcccggcccgcagcgtggggccccgagcgcggtgaagagattgttttctgaaagctgcgttggaggctgtgacagagctgagagcctgtgtggagcggatggggaggctttctcaataacatggccctttgccattagccttgccatgaccacatttttcaccagcgtccccccctggattcaagatgcaaagcaggaggaggaagtgggctggaaactagttcccaggcctcggggccgggaggcggagagtcaagtgaagtgccaatgtgaaatttcgggaacacctttctcaaatggggagaagctgaggcctcacagcctcccgcaaccagagcagagaccatatagctgccctcagctgcactgtggcaaggcttttgcttccaaatacaagctgtataggcacatggccacccactcagcccagaaaccccaccagtgtatgtactgtgataagatgtttcaccgcaaggaccatctgcggaaccatctgcagacccatgatcctaacaaagaggccctccactgctctgagtgcggtaagaattacaatacgaagctgggctaccggcgccacctggccatgcatgctgccagcagcggtgacctcagctgcaaggtgtgcctgcagacctttgagagtacccaggccctgctagagcacctgaaggcccactcacgccgggtagcaggcggtgccaaggagaagaagcacccctgtgaccactgcgaccggcggttctatactcgtaaggatgtacggcggcacctagtggtgcacacaggccgtaaggacttcctgtgccagtactgtgcccagcggtttggccgtaaggaccacctgacgcgtcatgtcaagaagagccactcgcaggagctgctcaagatcaagacagagcccgtggacatgttaggcctactcagctgcagctccacagtcagtgtgaaggaagagctgagccctgtgctgtgcatggcctctcgggacgtaatggggaccaaggccttccctggcatgttgcccatgggcatgtatggtgcccacatccctaccatgcccagcacgggcgtgccacactccctggtgcacaacacgctgcccatgggtatgagctaccctctggaatcctcacctatctcttccccagctcagctccctccaaaataccagcttggatctacctcatacttgcccgacaaattgcccaaagtggaggtggatagttttctggcggagcttcctggaagcctgtctctctcatccgctgaaccccagcccgcctcacctcagccggcggcagctgcggccctcctagatgaagcactgcttgccaagagccccgccaacctctctgaggccctctgcgctgctaatgtggacttctcccacctactgggctttcttccactcaacctgcccccgtgtaacccacctggggccacaggaggcctggtcatgggctactcccaggctgaggcacagcccctgcttaccactttgcaagctcagcctcaagattccccaggagctgggggaccactgaactttgggcctctgcactccttgcctcctgtcttcacgtctggcctgagtagcaccaccctgcctcgtttccatcaagcattccagtagcccccacagaggccctcagctcagtttttggctctgttatggagccttagtacccaccccgtctgtgtcccccatgaaggcagctgagctttcagagctgggttcaaaaaaaaaaattccagtgtctgtatacaggagcacttggtttgggggttcaggctctaggatcgattccagaaggagccttgagccccaaccccgtgaaaagatctcataccgtaggacttcaggtattatttacttttatttttttgacctgaatcgggagccacacttggccctcttcctctccaaagcgccagaacctccttctctttggagaatggggaggcctcttggagacacagagggtttcaccttggatgacctctagagaaattgcccaagaagcccaccttctggtcccaacctgcagaccccacagcagtcagttggtcaggccctgctgtagaaggtcacttggctccattgcctgcttccaaccaatgggcaggagagaaggcctttatttctcgcccacccattcctcctgtaccagcacctccgttttcagtcagtgttgtccagcaacggtaccgtttacacagtcacctcagacacaccatttcacctcccttgccaagctgttagccttagagtgattgcagtgaacactgtttacacaccgtgaatccattcccatcagtccattccagttggcaccagcctgaaccatttggtacctggtgttaactggagtcctgtttacaaggtggagtcggggcttgctgacttctcttcatttgaggtcacatttttcccccgtggggaaataaactgactttggactgcttcagtctctgccatcttccatgactgcatttgttcctgcctgcctcggcggtatccacagaagacaggcaagaggattggagcagttttctcacaggtctgcaattctgtttttctccaagtacattatgaccccctcatccttctcttgaactggagaggggaagaaatgaaaggcatgcccacgtccgtcacctccccatcccctagtccccaccttgaacatcatgagctgttgttattagtcttggaagcagagtctgggttggtgtggatagcaaaggaggaagtctgagcccctcattggtcttcctcccacctgtcccttttccgggaagttgtggaattgttggaagaagagtttgcagaaggttaggaatgggtagatagctaagtcctaatctatgggtacattgttgtgtcccaaaccaaaattttccttatccacaatgtcccttctgtctcttccactttacagtggactcggccactgtgcataggcttctctgctctccatcaaatcacttccactttcctgtgcccccacccccgcctccagttttccgctagtatccggcaaggtttcttgcaacaaatgattagttcttttcttctgactcgtggggctccctgctgcagagagcacagcccttgcctggagcccaggaaccccatccttgcttcatctcagttcttcatgggcttcactcttcccactcacggaagggaggtagctcagggacctccactgtgggacccttgagacgcttccactctgattcagaaacacacttctacctctttactgttaactcttaacagatgcagtcagcagtttctgggcacttctctcagtaggtgcctcatgctgacttctccagtagggtttcaggacaaactaccaaggaattgcctcagcctcctaccagtcctccctcacccaccttctgtctaggttcacttggtttgtcatcaggaactgagcaggtccaggactcagctttctgcttcagcctaagccagtactccttgtttgaggtaaaagccttaaaatttagctccctagctcttgattagaagcaatttggagtaagtgtgttttgatttaggcagggtagcttgggatacctttttaaaaacaccagatattaaaatgtctggcaaggttagaatcagactagatgatttgcttctaaaaattagtttcagtgagtcccagggactaattaaggtttattttaaaaagtgtctaccttggtacgcagccacctcctgcatgctgtgcatgttattgggacttgtattataggtgatggtatgtgagaatccagttgggactcgctgttgccatcctctttgttgtatctggttttcatcactagactcagcaacccttctcaccttaactgccaccttccctacactctcagtttacagaggccactgggcctctggctgcagaatacaaagtcccgggctgttagaggagtcctttcctctctgcctgccctttcctgtccctccctcgaattctctctccccgtaagtgatgctggaaaagtcataggactggcaaagcaactgtttaaaccctttgtaaccggggccttgcccccacctcctgtcttttctccttgccttccccactcctgtgtcctcccatctatcctgtctttcctttcctcctctcagtgtcctcagcacccacaaggaattttcctatcactgtgaactttgctggtacagaggaataatatctgccttcacctttttttttttggaccatagctagccagtcatttcttaaacctcccttcctaaaatctggggggtcggggggaaagaaaaaaaaagccttagtggcctggttgttcaaaggataagaatagctttatcctgcactcagtacccgaactcacttcagtatgcttactgaggccatgagaacctgaggggcatctgcccaggacaggagccatggcatatgacaaagaccaatgagggaccaggaaaaaaagtgatgtcccctttccctgccacctccagcctctgccagcaatgagctgtccccctcccaccctacacagtagctggtcagggctgagtacagtcctgggggtaaggggatgacatgcccaggtgtcagctcaaaggatctctgcatcatcttgaggtgggaggcagggaaaggagcgccaatgaggttccctgcaacccccgccctccagcccaccgcccaaccttttacaaatggcattttcttaattgaaaatccgggaagcaggtgtgattacttttttgctcgtagatattgtcctaagttggaattctcccactgccctaaaactttccctagtagtcctttaaactcccccctccctttttggtagctgttttctccgtcctctctccacctgccctcttatctaggagctgtttgtaagcacgatttttttaacaggttatattgtacaggatcaatattttgctttttaacaaggatatttatgtaataagaaactttgccttaggcaggtgttggccagaaaagtccagattcctctgggatcccaccctggcctctcctggaactctgaacctgctgtggaaggaattggccatgaccttcacctctggagagtagggtctatggcgagggaaaagggtgttcaccatgataacctagtgcctccatagaggggtttggaaaaattccagtccgatttctttgtgtgtcagctgacttccttagctgattgttcccacttgcacctctccacctttggcactagaactcctgagacaccacttctcatgcttctccctccctaccagcggtcaaggctttggagccactcttttgtaactccagattatttaaagagaaaagtacaagacagaaatcttctagcactttgtaaacacagtgaataacctcttggagtatttttggctttatataaaacaaggtttttaattgtaaagtataagtgccattagaaaatgcacagggcatatctttgttaaagtagatttttcaatgttttacagaattacattttcaaaaaaaggtttttataatgaagttgtttattaaaaacttctgaatgatgtgtt

SEQ ID NO: 521 - DNA, 4225 bp, Homo sapiens
cccctcttcctcgccctctctcgcgggtcggggttacatggcggcgactgcggcaaagcgagagcctcggagacgccgctgccgccagcacagccggagacctgagccgacactgggggcagtccgcgagccccgcactctctcgatgagtcggagaagtcccgttgtatcagagtaagatggacggtagctttgattgtgattgtggtgagctggagccacctgatcactaacaaaagacatcttctgttaaccaacagccgccagggcttcctgttgaaataaatatatagcaacaaaggaaaaaaagaagcaaaacggaaatagtgcttaccagcaccttagaatgatgctgctcaggaccagtccaacactgaatgtatctgcactgtgaggagaatgttcatagaagcctgttgtgtgcatatttattcacatttttgttaaatgttaaatcgtttagcacggtaatctgagtgcacagtatgtcatttcattccgtttgagtttcttgttttcgttaaatgtctgcagagttgctgcccctttcttgaactatgagtactgcaatctttttaattctcaatatgaatagagctttttgagctttaaatctaaggggaactcgacaggcctgtttggcatatgcaatgaacatcaagaaaccatcttgctgtggaagcataattatttttcttctccctttttgaaagatctttccttttgatgccagttttcttccttgtttacacaagttcaatttgaaaggaaaaggcaatagtaagggtttcaaaatggcagagaaatttgaaagtctcatgaacattcatggttttgatctgggttctaggtatatggacttaaaaccattgggttgtggaggcaatggcttggttttttctgctgtagacaatgactgtgacaaaagagtagccatcaagaaaattgtccttactgatccccagagtgtcaaacatgctctacgtgaaatcaaaattattagaagacttgaccatgataacattgtgaaagtgtttgagattcttggtcccagtggaagccaattaacagacgatgtgggctctcttacggaactgaacagtgtttacattgttcaggagtacatggagacagacttggctaatgtgctggagcagggccctttactggaagagcatgccaggcttttcatgtatcagctgctacgggggctcaagtatattcactctgcaaatgtactgcacagagatctcaaaccagctaatcttttcattaatacggaagacttggtgctgaagataggtgactttggtcttgcacggatcatggatcctcattattcccataagggtcatctttctgaaggattggttactaaatggtacagatctccacgtcttttactttctcctaataattatactaaagccattgacatgtgggctgcaggctgcatctttgctgaaatgctgactggtaaaaccctttttgcaggtgcacatgaacttgaacagatgcagctgattttagaatctattcctgttgtacatgaggaagatcgtcaggagcttctcagcgtaattccagtttacattagaaatgacatgactgagccacacaaacctttaactcagctgcttccaggaattagtcgagaagcactggatttcctggaacaaattttgacatttagccccatggatcggttaacagcagaagaagcactctcccatccttacatgagcatatattcttttccaatggatgagccaatttcaagccatccttttcatattgaagatgaagttgatgatattttgcttatggatgaaactcacagtcacatttataactgggaaaggtatcatgattgtcagttttcagagcatgattggcctgtacataacaactttgatattgatgaagttcagcttgatccaagagctctgtccgatgtcactgatgaagaagaagtacaagttgatccccgaaaatatttggatggagatcgggaaaagtatctggaggatcctgcttttgataccaattactctactgagccttgttggcaatactcagatcatcatgaaaacaaatattgtgatctggagtgtagccatacttgtaactacaaaacgaggtcatcatcatatttagataacttagtttggagagagagtgaagttaaccattactatgaacccaagcttattatagatctttccaattggaaagaacaaagcaaagaaaaatctgataagaaaggcaaatcaaaatgtgaaaggaatggattggttaaagcccagatagcgctagaggaagcatcacagcaactggctggaaaagaaagggaaaagaatcagggatttgattttgattcctttattgcaggaactattcagcttagttcccagcatgagcctactgatgttgttgataaattaaatgacttgaatagctcagtgtcccaactagaattgaaaagtttgatatcaaagtcagtaagccaagaaaaacaggaaaaaggaatggcaaatctggctcaattagaagccttgtaccagtcttcttgggacagccagtttgtgagtggtggggaggactgttttttcataaatcagttttgtgaggtaaggaaggatgaacaagttgagaaggaaaacacttacactagttacttggacaagttctttagcaggaaagaagatactgaaatgctagaaactgagccagtagaggatgggaagcttggggagagaggacatgaggaaggatttctgaacaacagtggggagttcctctttaacaagcagctcgagtccataggcatcccacagtttcacagtccagttgggtcaccacttaagtcaatacaggccacattaacaccttctgctatgaaatcttcccctcaaattcctcatcaaacatacagcagcattctgaaacatctgaactaaaacactcagcagacatttatctttgtattcttcatgaaatgtgttttgtctttttttattactagtgtttaagtcattttttacttgaatcagatggtgtcatttagtaaggattttatgagttcttgttttttaaaatccagactttctttttctacatgtgagatagttttcattttaactggcatgtcatttgcacacaaaaataaagactagagcaaaataatgcaacgcaggaggagaaaagaaatgcactaagacaagaacattctctcatagaacattgatctgttttacaggaaacaaaccttgccttgaaatttacacagtgagactgtacataattgcatgaaaatagctatttttttcctaagacatttttcattcatgaatattttcaagtttttcatactgtacacatttcttaaaacacatgataccagcagcaactgaaaatgaatgccgaatttggtacacatgtgttatctacctcaaggtaacaagagtatgtggcaaaacatataccacccatagtgcttcacaaaatgcacttctatttagccagcgtttattgtagtaaactattcttaataaaactcactcactgtttataaatgttctggtatgcattctttatagtgaagtgttaatacatcacatcttatttattttagcaaatcagtatattttctgtatttaattataaaaaattaacttagtttttaaaatttatttgcaaatatactttactttttccatttggcactatggtttgttgcctacctagctgcatctataatgtcagcttatcctaaggctgtccacgtacttaatttacttaagtgttcattttaagtaacgtgctcactgtgtataggaatttgtattttggaggtgcttgatctatctacaaagaaaaattaattaggaattactttattataaaatgctcctagaagtcttaattgtgtttattttttaaaaaaacaaatgttagacttgtgtgcatggaagtaattaaggtacatcattattgtagtttgaaagttgtacatgataagacattttgtttttactgtatgtttttactgaatgatctattccccatcccaaggcaagcatgaataaaattaggttaaacgtagcatgtggcatcgcagtctcttagaatttgtttcatctattttattttattgaatactgtctgtatctttggttatcctgtttgaagaaaaaggacaaataaaacatggccagcaaataca

SEQ ID NO: 522 - DNA, 2420 bp, Homo sapiens
tcgggcgcgggcgcggggcgcggggctgggcccgggcggagcggcggctgctccggacatgtcgggccctcgcgccggcttctaccggcaggagctgaacaagaccgtgtgggaggtgccgcagcggctgcaggggctgcgcccggtgggctccggcgcctacggctccgtctgttcggcctacgacgcccggctgcgccagaaggtggcggtgaagaagctgtcgcgccccttccagtcgctgatccacgcgcgcagaacgtaccgggagctgcggctgctcaagcacctgaagcacgagaacgtcatcgggcttctggacgtcttcacgccggccacgtccatcgaggacttcagcgaagtgtacttggtgaccaccctgatgggcgccgacctgaacaacatcgtcaagtgccaggcgctgagcgacgagcacgttcaattcctggtttaccagctgctgcgcgggctgaagtacatccactcggccgggatcatccaccgggacctgaagcccagcaacgtggctgtgaacgaggactgtgagctcaggatcctggatttcgggctggcgcgccaggcggacgaggagatgaccggctatgtggccacgcgctggtaccgggcacctgagatcatgctcaactggatgcattacaaccaaacagtggatatctggtccgtgggctgcatcatggctgagctgctccagggcaaggccctcttcccgggaagcgactacattgaccagctgaagcgcatcatggaagtggtgggcacacccagccctgaggttctggcaaaaatctcctcagaacacgcccggacatatatccagtccctgccccccatgccccagaaggacctgagcagcatcttccgtggagccaaccccctggccatagacctccttggaaggatgctggtgctggacagtgaccagagggtcagtgcagctgaggcactggcccacgcctacttcagccagtaccacgaccccgaggatgagccagaggccgagccatatgatgagagcgttgaggccaaggagcgcacgctggaggagtggaaggagctcacttaccaggaagtcctcagcttcaagcccccagagccaccgaagccacctggcagcctggagattgagcagtgaggtgctgcccagcagcccctgagagcctgtggaggggcttgggcctgcacccttccacagctggcctggtttcctcgagaggcacctcccacactcctatggtcacagacttctggcctaggacccctcgccttcaggagaatctacacgcatgtatgcatgcacaaacatgtgtgtacatgtgcttgccatgtgtaggagtctgggcacaagtgtccctgggcctaccttggtcctcctgtcctcttctggctactgcactctccactgggacctgactgtggggtcctagatgccaaaggggttcccctgcggagttcccctgtctgtcccaggccgacccaagggagtgtcagccttgggctctcttctgtcccagggctttctggaggacgcgctggggccgggaccccgggagactcaaagggagaggtctcagtggttagagctgctcagcctggaggtagggggctgtcttggtcactgctgagacccacaggtctaagaggagaggcagagccagtgtgccaccaggctgggcagggacaaccaccaggtgtcaaatgagaaaagctgcctggagtcttgtgttcacccgtgggtgtgtgtgggcacgtgtggatgagcgtgcactccccgtgttcatatgtcagggcacatgtgatgtggtgcgtgtgaatctgtgggcgcccaaggccagcagccatatctggcaagaagctggagccggggtgggtgtgctgttgccttccctctcctcggttcctgatgccttgaggggtgtttcagactggcggctccagtgggccaaagggcaaccacatgagcatgggcaggggctttctccttggatgtgggacccacagcagcttcctgaggctgggggtgggtgggtgggtggtttggccttgaggacgctagggcaggcagcacacctggatgtggacttggactcggacacttctgccctgcaccctggcccgctctctacctctgcccaccgttgtggccctgcagccggagatctgaggtgctctggtctgtgggtcagtcctctttccttgtcccaggatggagctgatccagtaacctcggagacgggaccctgcccagagctgagttgggggtgtggctctgccctggaaagggggtgacctcttgcctcgaggggcccagggaagcctgggtgtcaagtgcctgcaccaggggtgcacaataaagggggttctctctcaaaaaaaaaaaaaaaaaaaaaaaaaaaaaaaaa

SEQ ID NO: 523 - DNA, 4336 bp, Homo sapiens
gcggcggcggcagcggcggagaagggagcgggaccggaagggtcgcagcgccccggcgcccctcacacccactgcggcggcggcggcggcggcggcggcggggcggagcggagcggggcgggccggcggcggagccggggccgcggagccaggagtgactagcacgcagcgccgccagtccgcccgcccgccctctccccgtggcgcggcggcggggaggcgagggatctgaaacttgcccacccttcgggatattgcaggacgctgcatcatgagcgacagtaaatgtgacagtcagttttatagtgtgcaagtggcagactcaaccttcactgtcctaaaacgttaccagcagctgaaaccaattggctctggggcccaagggattgtttgtgctgcatttgatacagttcttgggataaatgttgcagtcaagaaactaagccgtccttttcagaaccaaactcatgcaaagagagcttatcgtgaacttgtcctcttaaaatgtgtcaatcataaaaatataattagtttgttaaatgtgtttacaccacaaaaaactctagaagaatttcaagatgtgtatttggttatggaattaatggatgctaacttatgtcaggttattcacatggagctggatcatgaaagaatgtcctaccttctttaccagatgctttgtggtattaaacatctgcattcagctggtataattcatagagatttgaagcctagcaacattgttgtgaaatcagactgcaccctgaagatccttgactttggcctggcccggacagcgtgcactaacttcatgatgaccccttacgtggtgacacggtactaccgggcgcccgaagtcatcctgggtatgggctacaaagagaacgttgatatctggtcagtgggttgcatcatgggagagctggtgaaaggttgtgtgatattccaaggcactgaccatattgatcagtggaataaagttattgagcagctgggaacaccatcagcagagttcatgaagaaacttcagccaactgtgaggaattatgtcgaaaacagaccaaagtatcctggaatcaaatttgaagaactctttccagattggatattcccatcagaatctgagcgagacaaaataaaaacaagtcaagccagagatctgttatcaaaaatgttagtgattgatcctgacaagcggatctctgtagacgaagctctgcgtcacccatacatcactgtttggtatgaccccgccgaagcagaagccccaccacctcaaatttatgatgcccagttggaagaaagagaacatgcaattgaagaatggaaagagctaatttacaaagaagtcatggattgggaagaaagaagcaagaatggtgttgtaaaagatcagccttcagatgcagcagtaagtagcaacgccactccttctcagtcttcatcgatcaatgacatttcatccatgtccactgagcagacgctggcctcagacacagacagcagtcttgatgcctcgacgggaccccttgaaggctgtcgatgataggttagaaatagcaaacctgtcagcattgaaggaactctcacctccgtgggcctgaaatgcttgggagttgatggaaccaaatagaaaaactccatgttctgcatgtaagaaacacaatgccttgccctactcagacctgataggattgcctgcttagatgataaaatgaggcagaatatgtctgaagaaaaaaattgcaagccacacttctagagattttgttcaagatcatttcaggtgagcagttagagtaggtgaatttgtttcaaattgtactagtgacagtttctcatcatctgtaactgttgagatgtatgtgcatgtgaccacaaatgcttgcttggacttgcccatctagcactttggaaatcagtatttaaatgccaaataatcttccaggtagtgctgcttctgaagttatctcttaatcctcttaagtaatttggtgtctgtccagaaaaagtcgatttatgtgtattaattggccatcatgatgttatcatatcttattcccttttatgctatgatttattctatcttttgtatttcagaagacatataattaaatctatttaataaataaaaatatatagcttttcttagatttgtgatgtttggggctgagaattatcacggctaaaaccaagacacttatgtggacatcttgttttctttaaactgtcttgtctgggatgattgtacattcagctttactgcacgatacaattttaagttttgcttagtgctgcttgaaatcctagctaccttatctcttttcttcttggtcttctagacttcttatgaatttaaaatgctacctagaacttcaccttctttattaggtgcgtaacactccatcttaattaaatatgatggcagataggttcctgcatccatggcctaacgttggagtggaattttacaaaatgctcactagagatcactgcagtcatttcctaagtgcttcctttgccacagactggcctgggtcctttatttaccttccctcattcactttccctcggccaataccacgttcttgattttctttcttcactggaagaaagcagataaactcctctttggtctgttttcagaggccaggctgattcagatgcctgttgctattgttgctctccattgttgggaggcattccttttcacaagaatgttctgggaaactcttcagaggacgtgaaggaaataccctgaagagtcatgattaactattgactattttctgatttaaaactgctcacctgaaattgatacttttagactttacgatcagtaaattattcagaattcatgaagatgctgagtatgttaagtgtcactgcaggaacggagctgtggtgatcacgttttgcctgcctgtgcccatgtctcttcccttgagcttattctgttgctgattcatatcttgtgttcaattattttggaagcttttcagtcgacattctgtagagtgtgttctgaggaggaactgtgataagaaagtttattataaatattatgtaaaatatatggctctctctgcaccagttatatcttattggttggtcatatcactggaaactggaacctttgattagcaaaattaatattgaaataagaaatagttcttttatattgtgtcatttggacactttcaagtacaaaatggtaataataacttggattgaggcggaaacacctattttatggctatctatctaaacatcttaaaatggccttctctgtaatacactttcttttaaaagacttcactaaatctatctttaaaaggaaaaacaaaagggagaggttgaaaatgcgcgagctgccctgcactgtgtgatgctccctccccgggagacgtggacgggggacgaggcacccgcagacgcccttctgctcactcgctcctctgtgcattcagcgagccacttgccacagatggagcccgtgacggtgtggagggtttcctggaaaggccatcttccaccaggtagaggcgagcgtgcctaggacaggccacagggctccacagaaatacctcaccccagcttcagggttctctctcctgagcctagatttgccagggtcttggtgccacgcaaatggtttcaaactgatctctatggataaatgctgatgttggttaaagaactgaaaaatgtgctcaactgtttcatcttttctattttatttttgtaatttatattgtacacaacccaggaagtaactattttggacatgtatttttataaaccaggtaatttactattatcctggaatttagactaggtttgtttcatttgttgacttagtttccagccaagaaggaaacgactgtctcccccatgtccaggtctcagtttcaagggcagagtccagagagcagacagagttctgtgagagcaggagagcagtctggaaaccctggctgtgcataccgtgtcagccgtgggcctggagatgggagcaggtgagacgcagagccccagtactgagaggaggaagccctcttacagggccccttgcccaccccaagtccgtgtctgaaacacggagcgggtgctgcttcaacccgcatttaatgctgtgtaagtagcgataaccacgtacgagtctgtctggttgatttctaatgtgactcctctggtatttcctcctggtaataaatacaagtgtgacctttcagattgcatatctcaaaagtaacattgctaatgttttataataaaatatattatgtgtgttttggttggtgaaaataatacagactacattttaaaagataaa

SEQ ID NO: 524 - DNA, 6295 bp, Homo sapiens
gcggagtctgcaatgggggctgtccagcagtagcaagcagcgggccgatcctggtggagggttgggaggctgctgtcattttatgggtcggcagccagagtgagagtgtccctgctgccagaggactacggcgggctgggcgcggggtccccgcctctcgctcaccacacagaccccgcgcctcctctggcagccgcggtggtggcggcggcagagcctcgcccactccaatccccaccctctccatccttagtcattaaagaacagcagcgcctggcacgttcttggaggaccccgggcgcagaggaggaaagggagcaggcgcagggggactggaaaggcagcatgcgctcgccaggagcaacctcggcgcccagggtctgaggctgcagccccagttcgccattgtgagccgccgccgggggagtccgctagcgcagccgtgcccccgagtccccgtccgcgcagcgatggggcacctgcccacggggatacacggcgcccgccgcctcctgcctctgctctggctctttgtgctgttcaagaatgctacagctttccatgtaactgtccaagatgataataacatcgttgtctcattagaagcttcagacgtcatcagtccagcatctgtgtatgttgtgaagataactggtgaatccaaaaattatttcttcgaatttgaggaattcaacagcactttgcctcctcctgttattttcaaggccagttatcatggcctttattatataatcactctggtagtggtaaatggaaatgtggtgaccaagccatccagatcaatcactgtgttaacaaaacctctacctgtaaccagtgtttccatatatgactataaaccttctcctgaaacaggagtcctgtttgaaatacattatccagaaaaatataacgttttcacaagagtgaacattagctactgggaaggtaaagacttccggacaatgctatataaagatttctttaagggaaaaacagtatttaatcactggctgccaggaatgtgttatagtaatatcacctttcagctggtatctgaggcaacttttaataaaagtacccttgttgagtacagtggtgtcagtcacgaacccaaacagcacagaactgccccttatccacctcaaaatatttccgttcgtatcgtaaacttgaacaaaaacaactgggaagaacagagtggcaatttcccagaagaatccttcatgagatcacaagatacaataggaaaagaaaaactcttccattttacagaagaaacccctgaaattccctcgggcaacatttcttccggttggcctgattttaatagcagtgactatgaaactacgtctcagccatattggtgggacagtgcatctgcagctcctgaaagtgaagatgaatttgtcagcgtacttcccatggaatacgaaaataacagtacactcagtgagacagagaagtcaacatcaggctctttctcctttttccctgtgcaaatgatattgacctggttaccacccaaaccacccactgcttttgatgggttccatatccatattgaacgagaagagaactttactgaatatttgatggtggatgaagaagcacatgaatttgttgcagaactgaaggaacctgggaaatataagttatctgtgacaacctttagttcctcaggatcttgtgaaactcgaaaaagtcagtcagcaaaatcactcagcttttatatcagtccttcaggagagtggattgaagaactgaccgagaagccgcagcacgtgagtgtccacgttttaagctcaaccactgccttgatgtcctggacatcttcccaagagaactacaacagcaccattgtgtctgtggtgtcgctgacctgccagaaacaaaaggagagccagaggcttgaaaagcagtactgcactcaggtgaactcaagcaaacctattattgaaaatctggttcctggtgcccagtaccaggttgtaatatacctaaggaaaggccctttgattggaccaccttcagatcctgtgacatttgctattgttcccacaggaataaaggatttaatgctctatcctttgggtcctacggccgtggttctgagctggaccagaccttatttaggcgtgttcagaaaatacgtggttgaaatgttttatttcaaccctgctacaatgacatcagagtggaccacctactatgaaatagcagcaactgtttccttaactgcatccgtgagaatagctaatctgctgccagcatggtactacaacttccgggttaccatggtgacgtggggagatccagaattgagctgctgtgacagctctaccatcagcttcataacagccccagtggctccggaaatcacttctgtggaatatttcaacagtctgttatatatcagttggacatatggggatgatacaacggacttgtcccattctagaatgcttcactggatggtggttgcagaaggaaaaaagaaaattaaaaagagtgtaacacgcaatgtcatgactgcaattctcagcttgcctccaggcgacatctataacctctcagtaactgcttgtactgaaagaggaagtaatacctccatgctccgccttgtcaagctagaaccagctccacccaaatcactcttcgcagtgaacaaaacccagacttcagtgactttgctgtgggtggaagagggagtagctgatttctttgaagttttctgtcaacaagttggctccagtcagaaaaccaaacttcaggaaccagttgctgtttcttcccatgtcgtgaccatctccagccttcttcctgccactgcctacaattgtagtgtcaccagctttagccatgacagccccagtgtccctacgttcatagccgtctcaacaatggttacagagatgaatcccaatgtggtagtgatctccgtgctggccatccttagcacacttttaattggactgttgcttgttaccctcattattcttaggaaaaagcatctgcagatggctagggagtgtggagctggtacatttgtcaattttgcatccttagagagggatggaaagcttccatacaactggagtaaaaatggtttaaagaagaggaaactgacaaacccggttcaactggatgactttgatgcctatattaaggatatggccaaagactctgactataaattttctcttcagtttgaggagttgaaattgattggactggatatcccacactttgctgcagatcttccactgaatcgatgtaaaaaccgttacacaaacatcctaccatatgacttcagccgtgtgagattagtctccatgaatgaagaggaaggtgcagactacatcaatgccaactatattcctggatacaactcaccccaggagtatattgccacccaggggccactgcctgaaaccagaaatgacttctggaagatggtcctgcaacaaaagtctcagattattgtcatgctcactcagtgtaatgagaaaaggagggtgaaatgtgaccattactggccattcacggaagaacctatagcctatggagacatcactgtggagatgatttcagaggaagagcaggacgactgggcctgtagacacttccggatcaactatgctgacgagatgcaggatgtgatgcattttaactacactgcatggcctgatcatggtgtgcccacagcaaatgctgcagaaagtatcctgcagtttgtacacatggtccgacagcaagctaccaagagcaaaggtcccatgatcattcactgcagtgctggcgtgggacggacaggaacattcattgccctggacaggctcttgcagcacattcgggatcatgagtttgttgacatcttagggctggtgtcagaaatgaggtcataccggatgtctatggtacagacagaggagcagtacatttttatccatcagtgtgtgcaactgatgtggatgaagaagaagcagcagttctgcatcagtgatgtcatatacgagaatgttagcaagtcctagttcagaatccggagcagagaggacatgatgtgcgcccatcctcccttgcttccagattgttttagtgggccctgatggtcatttttctaaacagaggccctgctttgtaatatgtggccaaggagataatttatctcacagaagcaccgggaagacttagccttaaagagcctacagtgtccttttggactctttcacttcgggacatttaataatggaccaaattcaacagaacaccaggaaggtcaagacgctctccaaagggcaggaagtacagcacttccgaagagtttagttggccctttgctggttgggctgagttttttatttttaagtgtttgtttttcagtgcaataatttttgtgtgtgtgtgattcttatcagaaagttgaattgttttctgcctacaccgttcatcagccccataacccaggaaggaacaggcattgttagcatcagattatacctcattattaaaaggaggcatggccacacatgaagaaatggtcattctacttcaaagaaattgagccagcactatctgtactccaacattaccggatctggattggggaggttggtcagggaagagaggggttctacccacagatcaactgtgtaatcttttactattcaagctataattcagcttcaaagtagagtagaaaaaaaattgtcttaactgttctagttcttgatggttttcttccttattaacagttggtgtttcttccttggcccttttggactaatgttactgtccaagttctttctcaagaaaccacatctggttcagaagagtgtcaagttggactctttgaactctgttgctgtctgagcaatcgtggtgcctagactttgcattccttgttctgttgacctgcatacatgtgagagctatttctttaagaactatataggctgtgaaaacgcactttctttcccccaaagagctgggaatttatgaagttatggcaatgaactgcagcatgctgggacaattatttgactacttttttttgtaatattgtcaaatgtctctatggattctgacagagatttctttttgttttgttattcttttggttgtcagtttcattttaacgagtgtaactagtaacattttattctttggattttgtataattacagtacatgattgtgtattgtgacatgaatgctgtcaaaatgacattgatggcattgtgaagcctgttactttgtgtcacttcctgataaataagaggtgatgacatggatatacaacagaaaacactttgagttgaaagtaaacacaagctggctgcttccctgtggcaactgtggctattgtgagcctccgtgtgtgtgcttccaggaggctttgctcctcttcatgcacccgacactgccccttccctggcttccctccatccctgatcatcttcatgaagccacagatataagatcagcttaatattttatcagtgaccttagtgttggtgaaggatgccaaatgaacagctctgcaccccaccgtctcttgtcactgaaaaggcttggccatggcagaccttggcagagtttcttgcaagatctggccagtgagtctcagtttcaccttgcagggtgaatggcagaggatgcccataccctgcaggttaacagcttgggctcctcaggggttgtcagttcctactcacctccctgctaccacctcctcctcttcttctcacccccgactcctttatttccctttttggacattttaataatgtgtcgcaccattctcaggaacaaacatggttaatgaaaggtggcaaagggatgtgtgacattcttagattttcacacatgggcagtcaggagtgaaatgtgcaaccttggaagagctgatacaatgtatggtaagctgaagtacgtttccaacactgctgctcagagcatacagaagttttgcatcctggaacattgcttcccatgaaacaaagcacttcataaatattttatgtttttcttgagcaccctttcaaggtagggatcaaatagtgccagatcaattttcccaaaaggaaagaggaagtatccagagtttagactgaaggcttagagtcaaaactacaggaaggtcacactgttctctggaacactgttgctcttcagtttgtagagtttatgatggaaaaggcatcagtctgtcaaaagacttgtttaatcctgataatgactttggaattatctctcctgggtctcagttaataaactgaagaatgacctaa

SEQ ID NO: 525 - DNA, 2275 bp, Homo sapiens
cgctcggggggtgggaaagcgagcccggcagctcaatgacaaatcggtggaggacggctggggtccggccccgggagggggcggggcgcgtttaagagctgcgggccgggtgcggacggcggaggcggcgggactggtccctgctcttcagtgggtcatctgtgtgtcacagcctcagaagaccagcgagatggctgccaacaagagtaagggccagagctccttggccctccacaaggtgatcatggttggcagcggaggcgttggcaagtcagccctgacgcttcagttcatgtatgacgagtttgtagaagactatgaacctaccaaagctgacagttatagaaagaaagtggttcttgatggggaagaagttcagatagatattctggacaccgctgggcaagaggactacgcagccattcgagataactactttcggagtggggaagggtttcttcttgtgttctcaatcacagaacatgaatcctttacagcaactgccgaattcagggaacagattctccgtgtgaaggctgaagaagataaaattccactgctcgtcgtgggaaacaagtctgacctagaggagcggaggcaggtgcctgtggaggaggccaggagtaaagccgaagagtggggcgtgcagtacgtggagacgtcagcgaagacccgggccaacgtggacaaggtgttctttgacctaatgagagaaatcagaacaaagaagatgtcagaaaacaaagacaagaatggcaagaaaagcagcaagaacaagaaaagttttaaagaaagatgttgcttactatgagtgtcaaggtgacggatgaagccagctgctcctaaggacacagggctgggttggtaaagagaaggctatggttgacttcttgcttgtgcttcccactctccccgacttcattcactcaaacttctttaaatggggaaaaatatttgtgactctgtggctggcagaagaaataagcccatgcaagtggaagggctgctttgtcaggaggttgtggaatttctttcttctccccttcttccctcccaaaagcttagctatgtataaagtgccacagataggaaacagctgttaattacaaagagaaagaattgtcatagcatcttattttgttcctagttttataacattaccatccttcgttttgaactacagatgttgtagtgggttttggaggagggagtggagtaagatgccctcccacttttatcagtttagtagtagtactgagaaaaatcccttcagctctaagaacactgaaaaatccaccgattttttgggtaagcttcttggcaataccctgtggatctgaaacagctaaaaaaatgaatttgaattgcgccagataggtcaataccaagcttctgattcctcctcacatatgaaaagtgaaagttgtgagttgttttcctcttatttaaacattggcctattataatctgtgttggttatttttctcctgtaagcatcctgatttttctgtaggaacttttctttggcagaccaagtgaagactcaggaatggtgtgcattataaatgacacacattgccacttgtgtagatatttttaagttctttggctaagtcctctcctaactgcctgtcctctggttaggcccctccctctccactagtggtgaatgcatgtgtctgtctgatcagcatcactgcacacggaggtctagtgagcctcttgctaagtgtcacacacactcttcccaaagacgtgatgagttaaagttgtattctgaaatcatgaagccagagcctgtgccagaccttctgctacctctcatagaattgctctgtaattctaaatttaaaattagaagtagagagagataagccatcgcccctttgcctctgagaattggctgctgtttctaatataattattttctaagatagccagatagttagaaaaagattttcattgatgacatatctttaaactttcttgcatcagtattctaaattgagcaaactgaaagattttcatcaggaaaggagcactgtgggaagagcccagtattcacattttttccccatttttcagaagcgacatttcatatataggtgccaaaagtgaatcggggtgcggagagtgggaaccttttgaatttatgattgtcacagagatggtagaaattatgatctgactggaaaacaatcctgtatcccctcccaaagaatcatgggctttttttttgaataaaaaagcagacaaatagaaaaaaaaaaaaaaa

SEQ ID NO: 526 - DNA, 4296 bp, Homo sapiens
agatgccgcctggcaccaagcgcagccgccgctgccgcactttccacttgtattgatcacctctcagccccgcgcagccggctcgcccgagcggaccgcggccagcgcgccagcccttggcagccccggagcagtcgggctccgggaggaaactccttgggagcgccctgtccggggtgccctctgcgctctgcagtgtctttctttctgcctgggaggaggaggaggaggaggaagaggaggaggaggaggaggaggaggaggaagaggaggaggaggaggaggacgtctggtcccggctgggaggtggagcagcggcagcagcagcagccgccgccgccgccgccgctgccgccgccgccggaaagggagaggcaggagagcccgagacttggaaaccccaaagtgtccgcgaccctgcacggcaggctcccttccagcttcatgggcaaagtgtggaaacagcagatgtaccctcagtacgccacctactattacccccagtatctgcaagccaagcagtctctggtcccagcccaccccatggcccctcccagtcccagcaccaccagcagtaataacaacagtagcagcagtagcaactcaggatgggatcagctcagcaaaacgaacctctatatccgaggactgcctccccacaccaccgaccaggacctggtgaagctctgtcaaccatatgggaaaatagtctccacaaaggcaattttggataagacaacgaacaaatgcaaaggttatggttttgtcgactttgacagccctgcagcagctcaaaaagctgtgtctgccctgaaggccagtggggttcaagctcaaatggcaaagcaacaggaacaagatcctaccaacctctacatttctaatttgccactctccatggatgagcaagaactagaaaatatgctcaaaccatttggacaagttatttctacaaggatactacgtgattccagtggtacaagtcgtggtgttggctttgctaggatggaatcaacagaaaaatgtgaagctgttattggtcattttaatggaaaatttattaagacaccaccaggagtttctgcccccacagaacctttattgtgtaagtttgctgatggaggacagaaaaagagacagaacccaaacaaatacatccctaatggaagaccatggcatagagaaggagaggctggaatgacacttacttacgacccaactacagctgctatacagaacggattttatccttcaccatacagtattgctacaaaccgaatgatcactcaaacttctattacaccctatattgcatctcctgtatctgcctaccaggtgcaaagtccttcgtggatgcaacctcaaccatatattctacagcaccctggtgccgtgttaactccctcaatggagcacaccatgtcactacagcccgcatcaatgatcagccctctggcccagcagatgagtcatctgtcactaggcagcaccggaacatacatgcctgcaacgtcagctatgcaaggagcctacttgccacagtatgcacatatgcagacgacagcggttcctgttgaggaggcaagtggtcaacagcaggtggctgtcgagacgtctaatgaccattctccatatacctttcaacctaataagtaactgtgagatgtacagaaaggtgttcttacatgaagaagggtgtgaaggctgaacaatcatggatttttctgatcaattgtgctttaggaaattattgacagttttgcacaggttcttgaaaacgttatttataatgaaatcaactaaaactatttttgctataagttctataaggtgcataaaacccttaaattcatctagtagctgttcccccgaacaggtttattttagtaaaaaaaaaaaaacaaaaaacaaaaacaaaagatttttatcaaatgttatgatgcaaaaaaagaaaaagaaaaaaaaaaagaaaagaaaacttcaattttctgggtatgcacaaagaccatgaagacttatccaagtgcatgaccggatttttgtggttttgttcattttgtgtttaatttgtgttttttttttccagctgtatgaaatgggctttctgaagtttaaatagtccgacttcacccatggtgttctgtgcttgcagtgcgagtgttgctgtaattcagtgttgccgtcagtgtctcttttcttagctttctgtctttctttcaacgtagtgtgaagtgtcttatccttttctatgaattccaatttgccttaactcttttgatgctgtagctgtttcagtaaaagttagttcaaactaatgatgtagaatgctttgaccaaatgagctggtctattatgccttgtaaaacagcagcatagggcttttaaaaggtagtcaataaaagttgctgaaattttggcttttttaaatatgtagtaggtgtttttaatgatttttcacataatgtgtaaggtagtgaaatgcaagaagggaaaaatgttttgtgtgaaacacattttctgactggggaacttttattagggtaaattgtttgtaaggctgtacgccaacagtttcctctgatagtttgactgatttaggatatctgctgtatgatgcaatgtaaagtcttttttgccttttttcaggaaaaaaaaaaagctaacttgatgtactagatttagtgtaggtagtgttggggttggggatgggggtgggggaggggagtcactgaatgttttgtccttcctttatactaatgatagtgctttagaatgagaattatgcctgaaatctggcaaaccgaaaaatgttgctattgcaacaaagtggcaaaagctaaaagtaaggatttatcttcaaacataagctgagataacgaatagaagcaaaacgattggctactagctctctctctctctctctattaggtaaatttgaaaaataaaaatgacttggcacttttaaaggtaacttcaccaaagaccgaagagccagtaaccagtagctccaacttgtctcagcatcacatcttctgtgctctttatttttgccggaccagtttgcggttaggagaatgtgccttttttgtacctttgcatttaggttttataattttaattgatgtatggacacacacaaacaaaaaagcatgaaggaagatttggatccaagcagtgccacactttacatcatcactacaagtgttcaagtgtaaagaaaaccaattttgaaactatgaaattcctgattcataaatacacagttatttctactttagtacatataagataattcactgttattaaagctcttttattaaggcaattgcatatgttttaaaagcaatggtaaattaagttgtcttccaaaactgtgtacttgtctggtcagctgtgtatgatcagttatctacctcagagtctattttcttttgtgctgggacaggttgctggccctccctgtttccacagaccaaatcctcctagctcaggagctagggctaagcagttatttctttcaagtattttttagttcttaaattttatgcttgtatttgatgatagatgtcagtgacatttcatagtttcaaaagtccttgctgctctgagaagtgtagattctagtgaaaattacatagtcataagagaaatgtgtttttgtttttgtttttgtttcatttttttaaagttgtggtattattggttctatgctccctggaatattactgctttgtgaaagtccagactgaacgcagcaccctctgtgtacctagtacagttataaacctgggtctctcactacttgatatttttgcattagttaagacagaaatttgatagctcggttagaggggaggggaaatctgctgctagaaatgtctgaactaagtgccatactcgtctgggtaagatttgggaaacataacctctgtacataaaaaaaaaaaaatcagttaaacatcacatagtagacagccattaaattataaaaaaattaatttatgaagaaagaccttttgtacagattgaaaaaaaaagattttcatagagatatctatatgatcaagagagttaattttttatttttgttttactagtgccacagacttgccagtggtaacttatttgtccggttcaagataactctgtagttttctttcctaggacttgttgttaaacgccaaaagacatttttgaactgtacatttgatcagattgttagcttttctgttttatttcttttgagaacctttgaataaaaaacatctgaaattttaaaaaaaaaaaaaaaaaaaa

SEQ ID NO: 527 - DNA, 8504 bp, Homo sapiens
gagctcattctctgcccgcagccccccttcatctctctcctcctgctccttttctcctcctttctcctccccctcccttttttcctccctccctctccccctttccctcgctcccctcctccctccctccccgtctttcttaccccctccctttctctctctctctctctctcgctcgttccctaacattaaagagaaaatgctgctatccgtgacttccaggcccgggatttcgacttttggctacaatagaaacaacaagaagccatatgtgtcattggctcagcagatggcaccacctagcccaagcaacagtacacctaacagcagtagtggaagcaatggaaatgaccagctgagcaaaaccaacctatacatccgaggattgcaaccaggcactactgaccaagatcttgtcaagctgtgtcagccatatggcaagattgtttccactaaggccatactggacaagaccacaaacaaatgtaaaggctatggctttgtagattttgacagcccttcagcagcacagaaagctgtaacagcactgaaggccagcggtgtacaggcacagatggcaaagcaacaggaacaggaccccacaaatttatacatctcaaacctcccactgtcaatggatgagcaggaactggaggggatgctgaagccctttggccaggttatctccacccgtatccttcgagataccagtgggaccagcagaggtgttggctttgcaaggatggagtccacagagaagtgtgaagccatcatcacccactttaatggaaaatatattaagacaccccctggagtaccagccccatccgatcccttgctttgcaaatttgctgatggcgggccaaagaaacgacagaaccaaggaaaatttgtgcaaaatggacgggcttggccaaggaatgcagacatgggcgtcatggccttgacctatgaccccaccacagctcttcagaatgggttttacccagccccctataacatcacccccaacaggatgcttgctcagtctgcactctccccatacctttcctctcctgtgtcttcgtatcagagagtgactcagacatctcctctacaagtacctaacccatcctggatgcaccaccattcatacctcatgcagccttcaggttcagttctgacaccagggatggaccatcccatttctctccagcctgcctccatgatgggaccccttacccagcaactgggccatctctccctcagcagcacaggcacgtatatgccgacggctgcagctatgcaaggagcttacatctcccagtacacccctgtgccttcttccagtgtttcagtcgaggagagcagcggccaacagaaccaagtggcagtggacgcaccctcagagcatggggtctattctttccagttcaacaagtaacagtgggattcccctccccatctttactgaatagaaatgaattcttggagatactcatgctcccagattccagagggttaaccaggaatggagaccatccgtcggccctgctaaggactaacacttagccatcgtttttcacaggcctgggcctggaaaaagaaatctctacgttcctgccctttactattgctgatggagcctgggggaaccatcactttttttgtgtgctacattcaaggagatcaaaaaaacttttcttcttttgcaaagaaagctttttgtttttaactgcaacgtacttttcccctaccttgaagagacatggtggtcgcagcttctcatctatatgaaaaagttttcgatgtattggaattatttgggaatgcttttaaaacaatttgtaattatttctttacaaaccaaaacagaacagaaaggtgtggtgctggaacatcgatgaaggagccctacttactgagcttagttatggacttttttgatgcatgtgtgtatgtgttttaaaaagtatgcaggctctaaaaatgttattttgtaaagctctcagctcatgcaccccatctcctcttcacccatattatgccttctttctcttgtccagattcttctttttctcttttctaaacagctgagcctgcctactttgcccttttacagcttttaattttatggatttttaaaaatgaaatttcatgtggaatttggggttggggggcaggctgggcaaggaacaaggcagaacactaagtaggccatggaagtggctgttctttcccccaccctgccacaccctgggagaaaaaactagactttggcttcagaaagcacagatgtgacccaggcttactaaagagacaactccacagccctgggaacacacccttgagccaaacttggttgaagactaggtcttccctggcaagttccggaagaatggacttactgacttttatcaactcttctcactgccaaggccaacagcatctgaggtatagctttttgggagtacctgctttcttgcctcctggaggatattttctgtcctgggcttcatggcccctctcttccctgttacacattgctgtgctcagagcctttgcagctgcgacctagttgaatccacataggctccttccacacggtggaagatctgctgcttcactcacagaccaggagttctcaatcagaggtggttttgtccctcaggcctttggcaacatctagagacagttttgattgccacgcctggaggtgggatgtgtgtgctactggcatctagtggctgctaaacatcctacactgcataggatagtccccactacccccagccaagaattatctgactccaggggtcaatattgccaagactgggaaacactgatatagacagtgttgtccctgcctcctgggttagggtaaattttcaccccaaccctggacaaacagtgccttttgacactcatgcaactgttggggaaggactggactgggatccttgaattctccccagactttgacttttgataactctgcatatagcaagagtgattcttgaaagagctgtggctccatgctgaatgcacacatgtactcagagggattcaggtgggcattgttctggtgtgtgctgtgcaatggtgggaaaggacaaagctctctaaactgtccagagcaacctgccctgccccggtgtgcttggaccctttgcccagggaaccaggacatcagaaataatgttccttctgtggaaggacaacggggagctagggtagcaaagagcaataaattccaactctttatgaggtcaggagtcctttaaaaaagcctatgtcttggtctttaactgtccccttctgcaagatgtgactctatacacatggagacagattgaagaaagacttcacccatcttctaggaaataaaatcctgctcttgtcttctcccagtcactcccttatgcactgaaaggagaatttgactcccttgcacttcaaggccaggtgcctctccactagacagtcagacaaaggcaaataatggaggatagagagacaggtgttcattaggctggccatagggagaggaagggggtgacagcaggggaaaagaaactgtagtatcagttgtcacaagtagagctcggcccagctttccctcccttcccagccaccctagaattgagagtcccagtgcccctagtgtcgactttctatgtacatcctaggggtgagggagtgcggggcaatgggtaggatataaagcgtaaaggacaaattgccgcagtcttctaattgatgcttccaaactcaggaagggcttatccagtgtaaaatagccccaagcccagcaaccttctagagggctctggctgggcagatagcttttgtttttgagtctccagccctcagtcaaggaaaatataccatagctgctttcttgtcagtggcctttgagagaaagagaaaacaaatctagaattctgttcatctgatagaccgggggagctttgctatggtaggaggtttaggaagggcctttcacgcatagaaaccattgttgatattgccactcccctctcctctgcctcacagaactcctgattctgtcttctttctctctctatatatatattttaaaatgtttaaatggctctaattttttgttttgaattttgaatttaccttttggagttcttctcatgtgaatctacttgttagattgtattaatgagtgtttctggtttgggcatgggaagtgatgggggcctgaagttattttgcagtggctaatggcactgaggaatttcttttttggtgcatttggtttacactcatttcctctcctaattgttagttcatttgtaacagtgggtgagtgtttggaggaaaggagggagaagaaaggagggatactgtttctcccatgaaatagtctaattggttgggttgatggcagaaggaaacataggggagccttccagctcacagccaagggttgggctcttaaacactatgcctagtgttttctgaatgctgtcttcatggagcccagctcttactctctttgtactttacatctcacccccactcattacagatgctcataacattcttaaaatattttagtacttggcatttttctgttttcagtcagctagaacacactagagtcctttcctcagatggcataatcctttataggctctgagcctgcctagccatctcctatcggtgttattactcctcatctcaggctctgagatgatactcagaccctaaactgattggactttttggaggagggtgccagtagagaggtcaggaagatgtggagatgatgatggagagagatgtttttattttattttattttttcagacagagtcttgctctgtcgcccaggctggagtgcaatggcacgatctcggctcactgcaacctccgcctcccaggttcaagcaattctcctgcctcagcctcccatgtagctgggattacaggcacccaccaccatgcccggctaatttttttatttttagtagagatggggtttcaccatgttggccaggctggtctcgaactcctgacctcaggtgatctgcccgccttagcctcccaaagtgctgggattacaggcgtgagccaccgcgcccggcctttattttattttttagagatggtcttgctgtgtcacccaggctggagtgcagtgatgcagtcgtagtctactacagtcttgaattcctgggcccaagggttcttcccacctaagcctcccaagtagctggaagtacaggcacatactaccaagcccagttcgttattttaagtttttgtagagacaggggtcttactatgttgcccagactggtcttgaactcctgtcaagtgagcctcccacctcagcctcccaaagtgctatgattacaggtgtgagcctccatgcttggatgagatgttgtttttaatgtttttggttttttggttttgttgttttgtttttttgagacagggtctcactctgtggcccaggctggagtgcagtggcaccataatggctcactgcagcctcgacctcccaaggctcaggtgatcctcttgcctcagccaccccttccccggccaccaagtagctgggactatgggcttgtgccaccatgcctggctaatttttttatttttagtagagatggggttttaccacgttggccaggctagtgtccaactcctgacctccaaacagctaatttttgtatttttaatagagacaggttttcgccatgttgcccagcctcgtctcgaactcctgggctcaaatgatccacccacctcggcctcccaaagtgctgggattataggcatgagccaccacacctggccttttcagtttttttatttttattttttctttgagacggagtctcgctctgtcgcccaggctggagtgcagtggcgtgatcttggctcactgaaacctccatctcctgggttcaagcagttctcctgcctcagcctcctgagtagctgggattacaggtgcctgccaccatgcctggctaatttttgtatttttagtagagacagggttttgccacattgcccaggctggtgttgaactcctgggctcaaatgatccacctgccttggcctcccaaagtgctgggattacaggcgtgagccactgcacccggccctttgtagtgtttttaactaaagaatttgtagagttgcccaggccaggaagcctggtggctctaaagggtaatagaccttgtcagtaacagataaggagtggtaagaggacattactcatattgaagatgaagaccagactttgctgcttcacaggccatgcgctgggttgggccacttcagctccactccattcgttttcctttcctaacttgacaatcagctcactcaccctcccttagtgcctccagtgcctactcctgtcactccaatgtcaacccattgggagttgaggcctgtcactccaatgtcaacccgtgggctgttactttgcgtcatatgatgctgtgagaggccttgctggaatgtcctaggaatccctagtagcagtggctattagtcttctagaaaagaactattgctgctgccttgtgcacatgccccaccttctgggcaagtggcagcattgcgctcatgaggggctttgcattcttagccaagggcaataaactgggtgggtgatctggcccaaacttgcccctaggctctgctagccctgaatcagcaggcttcagagacgagggtgggtgttataaaagccagtctgtaaagggtaaattccaaatcttgtgccttgttataccaatccttcctgattcccgtttaaaccaactactctatttctgtgctgcctacattttcaatcctcccacgcattagcaaattcctgaaatttcctcatttggtaggccttccataggagtcagctatggacttccataggagttggcagctaaaaccagactgtgagcttctgtctccgttctgatttttgctgcacctcccaggggacagtccccacatgattacaaaagccaggtgccctcatcacccgttacccctgacctgtccacttgttttgaataaaccttcattctccaagcagatccccaaacttccttgtccttgttacacgtctacctcacaacctcacaattcaacaacaggtaaatacctggattcactgatttctttactgtccttctctgagggttgggaaggtgggggctagaaaaggctcataatttttaaactcttgggaattaaacttgggaatttctattcctacagtgttttctctgggatttttagctcactgatcgccctagaatagtgtgaactctccagataggtcctgctgtgataggccaggggagtaggctgtgcagtgacggcttagggtaataagtaatggttggaggacaccagcataggagcagagtttagaacttaagaggacaagaaagctgctcagtggctggcgtatagctgtgaaggtaaccaaacaccaaagagggagtctgtcatttttataaggctggaagcgaatgttccttttctaccttaacatacagtttagggggttgcaccaagacaaagtttccaggctggagggtaatacatatccagcgcgagtgaagtccccactccaacatataccctttttgggtgggtaaacacctctttgcatgtggacagaaaatgtttatacttaaacagacatattttgcatatttttatctggagacttcttctagttttatactcttcccacatctatgccaatgccaccattctaaaacttacactccttttctacccctggtcttttccttgtccttccctacaacttggtagaggtccattttgtcttacttcacacttttttttttttaaataaaacacaaaagtctacgtcttggtgtcttatccgtgagtgggaagtggtaagctggtgatggtcccatatttgctatgacaggaacacagaggtggcagcttaggaagctggggccacatctcacaaggcaggacctggatgcactgaatccccctttgctccagcaactcagccagacatttaggcaggagcactaatgaccctttccatccacacagagggtatggaacaggagcccctgttgttcccttgcctgtggtctcttaagccagtcatacctatcccaacgccgtctccccctcaggtgtgtagaagggaagatgaatacacagagtcttttgaatctctatcaaatgtggttttttttattcaacaactgacaagcacttttctacagctgcacttgtggaacatcacatggcaaaaacaggagttttttcgctagactttttttttctttttaaccttattaaaaatgagattggtcctaaaaatatagaaagaaataaatttaaattcacaaaaaactgtacattatcaaaaagtcactaaaacaccacatttggttatataaaaagtcccttttgctgtaaaaggaacacagaaacttaaaaaaaaaaaaaaaaaa

SEQ ID NO: 528 - DNA, 2529 bp, Homo sapiens
gacgtggctccgcggccccggcttcccccggcagctcagcgaccaatgggcgcgcgagcggggccgcccgcagcttcccagcccgaggcccaggcgcgcccctctgctccggctcggggcgggcactggcggagggactggccagtcccctcctccgcgccggccccaaccctgtcgctgccgccgcgctccgagtccccattcccgagctgccgctgttgtcgctcgctcagcgtctccctctcggccgccctctcctcgggacgatggcgcgcggtggccgcggccgccgcctggggttagccctggggctgctgctggcgctggtgctggcgccgcgggttctgcgggccaagcccacggtgcgcaaagagcgcgtggtgcggcccgactcggagctgggcgagcggccccctgaggacaaccagagcttccagtacgaccacgaggccttcctgggcaaggaggactccaagaccttcgaccagctcaccccggacgagagcaaggagaggctagggaagattgttgatcgaatcgacaatgatggggatggctttgtcactactgaggagctgaaaacctggatcaaacgggtgcagaaaagatacatctttgataatgtcgccaaagtctggaaggattatgatagggacaaggatgataaaatttcctgggaagaatacaaacaagccacctatggttactacctaggaaaccccgcagagtttcatgattcttcagatcatcacacctttaaaaagatgctgccacgtgatgagagaagattcaaagctgcagacctcaatggtgacctgacagctactcgggaggagttcactgcctttctgcatcctgaagagtttgaacatatgaaggaaattgtggttttggaaaccctggaggacatcgacaagaacggggatgggtttgtggatcaggatgagtatattgcggatatgttttcccatgaggagaatggccctgagccagactgggttttatcagaacgggagcagtttaacgaattccgggatctgaacaaggacgggaagttagacaaagatgagattcgccactggatcctccctcaagattatgatcatgcacaggctgaggccaggcatctggtatatgaatcagacaaaaacaaggatgagaagctaactaaagaggaaatattggagaactggaacatgtttgtcggaagccaagctaccaattacggggaagatctcacaaaaaatcatgatgagctttgatagacactcaccagaatatggcagactgtcataggcattctgttattgtcttggattgttgctacaattgtctaatttacagcagttgtgatcccacaaaaagcaagtttatacctcagattggggtataaaaattgtttttcgctcagtatttactggaaaatggacatcactagtctttcagtaagatttctctcaaaacacgtgaaaaccttggtaaattgcaattctttctggggatatattggtacaacatgacttaaaacttttttttttctattaaaacttaaaggggaacaaaacttgaaaaagccctgttcttcagaaggtgagtgggttgagggaggcagtaatatgaagtgactgctgtgtattttaactaccagattttttatatttgccactgttaaatagttggaaaggggaaattctgattaagcgaaagtggtatcatcctaggtaagcttatttcagaacaagtctaatatttcagattctttcttttcgactttatactctgagttattacttactgtaagtggtgtatatgaaacctccatgcattttccagtatggatctgctaatatgcacagtaaatccatgtctttgtttgtttttctattaaaaagcaatcaagaaagataatgtgaaaaagaaaggaatttagaggtagggaaaagatgaatgtcagacatttgaagaactatagtaaaatgataaacactaaatatacttgagaaaactttcttaatatgccaatgaggtaggcctgatctttgaaatagtgaataggaatacaatgcatttcctcagtgatcactgattagaatgagttggtgggatccttgggaagccaaacggagcggagttctggatcatgtcccatccagtccagtgaatccacgacccgcagacctgtccccccgcaacagcttataccatggaatgaggacaaggtgatactctgagctgtggactgaactggcagacacaacctgtacagattgaaatttcaccttgtaaggaggaagtgaatgaaataaaggatccccctaaggattttctactgtgtcctgtggtgtttgacttcacagatgctatttgtgacattattcatatagcataaaacagtggggttggatcccatgaataacattataaaggttctggggttttttttcatccaattactagaatgttcagaatagactcatatttactaatttaataaatgtatgtacttaatgcctttaaaaaaaaaaaaaa

SEQ ID NO: 529 - DNA, 4498 bp, Homo sapiens
ttggcgctcagtccgcggcgcgaggacggccggccggcagggggaggcgggggggcgccgggcagccccgccttttcccgcggaggcgccgagcggccatattgcggagctgtctgcggtggcggcggcgcctctcgtctcccgcggcccagcgctcgcaccaccgcttctccctccctgtcgcagccgcgccgccgcgcagcgccccagccacacgccggcgggcagaagccgcccgctctccggaaagtgataacagaattcattgaagtggagaatttttaaagaaggtaacaaaaagagaaagaaaatgccgaaaccaatcaacgtaagagtaactacaatggatgctgagctggaatttgccattcagcccaatacaactggcaaacaactttttgaccaggtggtgaaaacagttggtttgcgtgaggtctggttttttgggctgcagtatgtagacagcaaaggttattctacatggcttaaactaaataaaaaggtaacacagcaggatgttaaaaaagagaatcctttacagttcaagtttagagctaaattctttcctgaagatgtttctgaggaattaattcaagaaataacccagagactcttcttcttgcaagttaaagaagccatcttaaatgatgagatatattgcccgccagaaactgcagttcttttggcttcctatgctgtccaagccaagtatggagattacaataaagagattcataagccaggctacctggctaatgatagactcctaccccagcgtgtattggaacaacacaaactaacaaaagaacagtgggaagaaagaatacagaactggcatgaagaacatagaggaatgttaagggaggattctatgatggaatacctgaagattgcacaagatctagaaatgtatggagtcaactattttgaaataaaaaataaaaaaggaactgaattgtggctaggtgttgatgctttgggtctgaatatttatgagcatgacgacaagttaacacctaaaattggttttccctggagtgaaatcagaaatatttcatttaatgacaaaaaatttgttataaagccaatcgacaaaaaggcacctgattttgtgttttatgcacctcgtctgagaatcaataagcggattttggccttatgtatgggaaaccatgaactatacatgcgaagaaggaagcctgatactattgaagtacaacagatgaaggctcaggctagggaggagaaacatcagaagcagttggaaagggcacaattagagaatgaaaagaagaaaagagaaatagcagaaaaggaaaaggaaagaatagaacgtgaaaaggaagagctaatggaacgtctaaaacaaattgaagagcagacaattaaagctcagaaagaactagaagaacagactcgaaaagctctagaactggatcaagaacgaaaacgagcaaaagaagaagcagaacgacttgaaaaggagcgtcgagctgctgaagaggcaaagtctgccatagcaaaacaagctgccgaccagatgaagaatcaggagcagctagcagcagaacttgctgaattcactgccaagattgcacttctagaggaagccaagaagaaaaaggaagaggaagctactgagtggcaacacaaagcttttgcagcccaggaagacttggaaaagaccaaagaagagttaaaaactgtgatgtctgccccccctccacctccaccaccaccagtcattcctccaacagaaaacgaacatgatgaacacgatgagaataatgctgaagctagtgctgaattatcaaatgaaggggtaatgaaccatagaagcgaggaagaacgtgtaaccgaaacacagaaaaatgagcgtgttaagaagcaacttcaggcattaagttcagaattagcccaagccagagatgaaaccaagaaaacacaaaatgatgttcttcatgctgagaatgttaaagcaggccgtgataagtacaagactctgcgacagattcgacaaggcaatacaaagcagcgtatcgatgagtttgaagcaatgtgagagctgttattttgcatatatgttcttcataagctgaaccaccaacagagaaaagcaggcctttgcagatatgatggaatgcatcccaccttgccaaagcacttacaccagtttgactgtgctagctaaaagacaaatttaaggggagctcttcaacattaaggcagtatgatatcatgcttggttttcttttttcttttggtccagggaatggagaatggtgttccattgcctcttttcacattttttttctttttcttttttttttctgttgaagattaacactaattatcacgtctgacaaatgtgtatgtgtggtttcagttctgtgtacattttaaaggataatggtgaacattttaatgggtttcccttgccctttccatatttaacctatttccacattctctctcactcacattttctcagtgtgcccttctcttatctgccatgtccatagccataattccaccatcatacagatcaggcagtgtttaaaatgatggtaggtagcacagtggacagtctttgatcatcatgtagaatatggctatgaatcaggaaagagattagaacatttaataatgtatgtacagctggtgcttagtttttttttaatctaaatttaattaccttattggatatttgatatttggttatttaatcacagtcatctttaacagcttacactgattggtgttttatctcctgtgatcctttgatggctttttttgcctaccatttcacagaggtttagacagcagtagtagctccctaggagagtttactgatgaaacagcctctgcaagattttaaaagttttgttcttttatagactgatttagaaaaacaaatgattagttaaaaaaagaaaatatacatttgttggtaactaatgttattttttaaaacctggaccttttctggaagggcagcatataaaaacatcagtcccgaggaggggacaacaatactacctcactactacatctgtgatgactggttgttcaaacacaatggagtgtgtaaggtatatgttttataattcataaccatagcctcgatcatcaagaaatactttcgaaatttcattttccttcagaatatcttaagagtgctaaatttttaactgcctttttgtcgagtcaaactgtgggattctgatttgtattaaaattgtaagctcctcactggtatactatcatcctggaggggtgttgtatggctgagcaagagagagagagaatgagagagagactgtgtgtgtgtgtgtgtgtgtgtgtgtgtgtactctgtgtgtgtatgagagagagaaatgctaaccttgtagcatgtgaagaatgtctgtaccttgatacgatagttacataatcagtatatttggtttctagatcactgtgcttattttgtttcaatctctgactaaaaatacttaaatttggtttgttaattcttattttagaaattataattttagtttatattaatttcggttatagcttactgaagaaatctttccagttagaaggaggttctaatattcacatgttctaatactttgtttattgtaaaacagctaaatttggagatacgtaaagccttgttttctctgtgtggttcagctactttccatttggtattacacagtcaaatttacatttatctattaaaattgccattttattaaacattttcatgcacagtagattcaagttgtgtctgaaaatatctcttgtgcttttttgattttgctgactttaaaaggattaatctgggcagacattatgtaaaagaaaggttgcgtttaatatattttttgaactttgtaggacaaaacatagctggttaaccttgaagtgactgttgtaccatggttgtgcacatgcttcagaatcctatggaagagaatattcctacttgcagtacatcaaaggaatggatggtggaccctactattcatgttttgagacataaatgttcactttaaagcaattgcataatagataaaaacctgaactttcattggatttttgttaattttcctcattttgaattatgtgcactaccatagctacatcagtttgatacagtattgaaaaattatcagttatattttgctgtttatgatctatttgtagattaggattaaaatggatttaatccatttttaaggctgtgtgaatttttctaaacaagaaccatttgcaatatggatttcttagagattaaaccaattataacttattagcagtcgcgagcacatgttcatatagtcaatgtaaaaatacactaatgagtatttggtaaatcccagtaggcttttaccattagcataattttgtgttgtacaattaagttacaattacatctctaattttggataatattcattggttaacaataaagtgacaaaagctcatgccttcaaaaaaaaaa

SEQ ID NO: 530 - DNA, 2432 bp, Homo sapiens
aagcagcggccgctcagtctgggcgcttgcaggctgctaaacccaaccgcagttgactagcacctgctaccgcgcctttgcttcctggcgcacgcggagcctcctggagcctgccaccatcctgcctactacgtgctgccctgcgcccgcagccatgtgccgcaccctggccgccttccccaccacctgcctggagagagccaaagagttcaagacacgtctggggatctttcttcacaaatcagagctgggctgcgatactgggagtactggcaagttcgagtggggcagtaaacacagcaaagagaatagaaacttctcagaagatgtgctggggtggagagagtcgttcgacctgctgctgagcagtaaaaatggagtggctgccttccacgctttcctgaagacagagttcagtgaggagaacctggagttctggctggcctgtgaggagttcaagaagatccgatcagctaccaagctggcctccagggcacaccagatctttgaggagttcatttgcagtgaggcccctaaagaggtcaacattgaccatgagacccacgagctgacgaggatgaacctgcagactgccacagccacatgctttgatgcggctcaggggaagacacgtaccctgatggagaaggactcctacccacgcttcctgaagtcgcctgcttaccgggacctggctgcccaagcctcagccgcctctgccactctgtccagctgcagcctggacgagccctcacacacctgagtctccacggcagtgaggaagccagccgggaagagaggttgagtcacccatccccgaggtggctgcccctgtgtgggaggcaggttctgcaaagcaagtgcaagaggacaaaaaaaaaaaaaaaaaaaaaaaaaatgcgctccagcagcctgtttgggaagcagcagtctctccttcagatactgtgggactcatgctggagaggagccgcccacttccaggacctgtgaataagggctaatgatgagggttggtggggctctctgtggggcaaaaaggtggtatgggggttagcactggctctcgttctcaccggagaaggaagtgttctagtgtggtttaggaaacatgtggataaagggaaccatgaaaatgagaggaggaaagacatccagatcagctgttttgcctgttgctcagttgactctgattgcatcctgttttcctaattcccagactgttctgggcacggaagggaccctggatgtggagtcttcccctttggccctcctcactggcctctgggctagcccagagtcccttagcttgtacctcgtaacactcctgtgtgtctgtccagccttgcagtcatgtcaaggccagcaagctgatgtgactcttgccccatgcgagatatttatacctcaaacactggcctgtgagccctttccaagtcagtggagagccctgaaaggaggctcacttgaatccagctcagtgctctgggtggccccctgcaggtggcccctgaccctgcgttgcagcagggtccacctgtgagcaggcccgccctggggcctcttcctggatgtgccctctctgagttctgtgctgtctcttggaggcagggcccaggagaacaaagtgtggaggcctcggggagtggcttttccagctctcatgccccgcagtgtggaacaaggcagaaaaggatcctaggaaataagtctcttggcggtccctgagagtcctgctgaaatccagccagtgttttttgtggtatgagaacaggcaaaaagagatgccccgagatagaaggggagccttgtgtttctttcctgcagacgtgagatgaacactggagtgggcagaggtggcccaggaccatggcacccttagagtgcagaagctggggggagaggctgcttcgaagggcaggactggggataatcagaacctgcctgtcacctcagggcatcactgaacaaacatttcctgatggcaactcctgcggcagagcccaggctggggaagtgaactacccagggcagcccctttgtggcccaggataatcaacactgttctctctgtaccatgagctcctccaggagattatttaagtgtattgtatcattggttttctgtgattgtcataacattgtttttgttattgttggtgctgttgttatttattattgtaatttcagtttgcctctactggagaatctcagcaggggtttcagcctgactgtctccctttctctaccagactctacctctgaatgtgctgggaacctcttggagcctgtcaggaactcctcactgtttaaatatttatttattgtgacaaatggagctggtttcctagatatgaatgatgtttgcaatccccattttcctgtttcagcatgttatattcttataaaataaaagcaaaagtcaaatatga

SEQ ID NO: 531 - DNA, 532 bp, Homo sapiens
gagaaaccagagactgtagcaactctggcagggagaagctgtctctgatggcctgaagctgtgggcagctggccaagcctaaccgctataaaaaggagctgcctctcagccctgcatgtctcttgtcagctgtctttcagaagacctggtggggcaagtccgtgggcatcatgttgaccgagctggagaaagccttgaactctatcatcgacgtctaccacaagtactccctgataaaggggaatttccatgccgtctacagggatgacctgaagaaattgctagagaccgagtgtcctcagtatatcaggaaaaagggtgcagacgtctggttcaaagagttggatatcaacactgatggtgcagttaacttccaggagttcctcattctggtgataaagatgggcgtggcagcccacaaaaaaagccatgaagaaagccacaaagagtagctgagttactgggcccagaggctgggcccctggacatgtacctgcagaataataaagtcatcaatacctcaaaaaaaaaa

SEQ ID NO: 532 - DNA, 813 bp, Homo sapiens
agctggtttcagacttcagaaggacacgggcagcagacagtggtcagtcctttcttggctctgctgacactcgagcccacattccgtcacctgctcagaatcatgcaggtctccactgctgcccttgctgtcctcctctgcaccatggctctctgcaaccagttctctgcatcacttgctgctgacacgccgaccgcctgctgcttcagctacacctcccggcagattccacagaatttcatagctgactactttgagacgagcagccagtgctccaagcccggtgtcatcttcctaaccaagcgaagccggcaggtctgtgctgaccccagtgaggagtgggtccagaaatatgtcagcgacctggagctgagtgcctgaggggtccagaagcttcgaggcccagcgacctcggtgggcccagtggggaggagcaggagcctgagccttgggaacatgcgtgtgacctccacagctacctcttctatggactggttgttgccaaacagccacactgtgggactcttcttaacttaaattttaatttatttatactatttagtttttgtaatttattttcgatttcacagtgtgtttgtgattgtttgctctgagagttcccctgtcccctcccccttccctcacaccgcgtctggtgacaaccgagtggctgtcatcagcctgtgtaggcagtcatggcaccaaagccaccagactgacaaatgtgtatcggatgcttttgttcagggctgtgatcggcctggggaaataataaagatgctcttttaaaaggtaaaaaaaaaaaaaaaaaaa

SEQ ID NO: 533 - DNA, 6971 bp, Homo sapiens
cccgcctcctcgcttcctcggctccagcctccgccggcggagcccactatgccagacagtttcgacactttgcaaagacaaagagccctagaccggagggaggaggaggaggaagaagagcggagagagaaggaagaggcgatgtgagctgggaagggggcaagtgtccgggacacccacacccctgtattctcctccgaaccccttcatgcccaaatcccggaaactccagcgtgtctccagccgtgttggtaccattttcagatttcatcttcctaaactggaaatgtcaatgagaggaaattaacacccccaagagctgcagtgagcaaatgcattgagcttgggtcaggacaattccatttggggaccagagatggacggtcactcagcctatggagatgaagaaactgaggttcagagaggttaagagactccactgaggtcacacagccgatgacagacaaccttctgtgccttcatcaagctggttgtgtacccaccatgtccctggcgacaggatgggaaagaaaaagccctaattaaggatcgtcagaaaccacagttggaggaggacggcagagacagtttccctccccgctataccaacacccttccttcgaggtcctcgctcctgagggaccctggactgtcacagagattaatgaccccttatcttctttggatgtgaaaggaaatcactggttaaagcttgatcgagagacattatcagctctttaaggattgcagaagaataggctactttattttctgaaaaggtaaatatatgcaagcaaagccaacatgccacgaatggcgttggtctaccacacagccgtgtctgggacacagttgggggtcatcccccagcaggagtgaagtcgagcttagcggcccttgtgtcctcccttggaattcctgccatcccttttgattgagcctccacctctgggatttttcttccatttttctcctctcttaggagggagttcctgctacccatcgtgggaggccaccatcaggactgcgaagatggtgaccctgcggaagaggaccctgaaagtgctcaccttcctcgtgctcttcatcttcctcacctccttcttcctgaactactcccacaccatggtggccaccacctggttccccaagcagatggtcctggagctctccgagaacctgaagagactgatcaagcacaggccttgcacctgcacccactgcatcgggcagcgcaagctctcggcctggttcgatgagaggttcaaccagaccatgcagccgctgctgaccgcccagaacgcgctcttggaggacgacacctaccgatggtggctgaggctccagcgggagaagaagcccaataacttgaatgacaccatcaaggagctgttcagagtggtgcctgggaatgtggaccctatgctggagaagaggtcggtgggctgccggcgctgcgccgttgtgggcaactcgggcaacctgagggagtcttcttatgggcctgagatagacagtcacgactttgtcctcaggatgaacaaggcgcccacggcagggtttgaagctgatgttgggaccaagaccacccaccatctggtgtaccctgagagcttccgggagctgggagataatgtcagcatgatcctggtgcccttcaagaccatcgacttggagtgggtggtgagcgccatcaccacgggcaccatttcccacacctacatcccggttcctgcaaagatcagagtgaaacaggataagatcctgatctaccacccagccttcatcaagtatgtctttgacaactggctgcaagggcacgggcgatacccatctaccggcatcctctcggtcatcttctcaatgcatgtctgcgatgaggtggacttgtacggcttcggggcagacagcaaagggaactggcaccactactgggagaacaacccatccgcgggggcttttcgcaagacgggggtgcacgatgcagactttgagtctaacgtgacggccaccttggcctccatcaataaaatccggatcttcaaggggagatgacgcagtgaagggctgaggatggacgcactgtcacacctctgcatttccagccccagcatcttgctggagccgttccatcccggagcttggaggggcagcctcaggtgtgtgcctgggcaccgctcacagcctcttgcacccagccgttggcagcatctactcagcaaggtcactaagctctgccagcgtggcagagcatgtcttggaacctgtcttgagtggggacaacgtccccccactgctgccctagagctggggagacgctgggaaaggttcaacctccacacactaaaatcattttggctcctggggcaagcttggggaatgaatgtggaagatgcctatattctgagagacaggacagtttcccaggaagatgggcagagacttgagtggcgattacctccagcacagagacgtgccaggcggtgttggcgctcggggcgagatgctgcccttctttgcacgaagcctggcctcttgcttggcgtgataaccctgtcatcttcccaaagctcatttatgagccaccagaggctcctaccccaaagattttcacagaaacttgaggccaggtgccgtggctcacacctgtaatctgaacactttgggaggccgaggcgggaggatcacttgagcccaggagttcaagaccagcctgggcaacatagtgagactcctgtctctacaaaaataaaagatttaaaaaaattagccaggcacggtggcacacacttgtagccccagctactagggaggctgaggagggaggatctcttgtgcctaggagttcgaggctgcagtgggctgtgatcacaccactgcactccagcctgggcaacagagtgagaccctgtctctgaaaaaaaaaaaaaaagaaaagaaaaaaaaccccaaacttggcaccgtgtttctgactcctgcagatgcctcttcccaagcagttgttcctttgagtagtcagtctcatggttctaatcgtggcgagagcggatctgaccacttccatgtgcctttgtatttgggaaagaaaagcatgcattggctgaaatgaaacaaaagcccttacttgggaaaagggacccccaccagcggccctgcttgctccgtagctgggaacatcttttctggtttcctgagccagcacctgaattgcaacgaagctctgaggatactcaacaccacccagcagtgcgtcagaatggaacgtacattctcattctcagactgttcaatatggtgcccgtaacctccaaagccacacaggaggctgccagcagcattttccccaagggcctgagctcagggtcaagtccctgctggccatcttggggctgtcactgggggtctgggtcaaggacatcccaggaatggtaactgccacatacctcatcttcttactccccagctactctcttttcctcattagccttcctgattatttattgatttcttttttttattcaactgacattgtttgcaccctggctctgttggtggtcctggtgttttaatgaagcttgcctcacccagtagctgggaaattaggtgggggtgcttaagggaggtttgtaggagtcctcggacgtgggatattgggggtatctagggcttggatggtttgtggaatgtcctcagcatcctcccgtcccaacccaaccttccttcttcctcattgtggacttggatttattctcaggctaggagtctccaaaactccgtgaaaccttattgctgctgggtgtggagtggagagtgacaggaatgtgggggacggtgattgttggctccagttactaatgtttaagcagaaaaaccactttcttgttgaaaatatccctgaaaaggtcgctgctgctttgaggaggcgtgactttttcctggtggagtgtgacggaggcatggggcctgtgctcccaggctcgggggagccccctctgcacacggggagggaggaacttggggacatcagtcatgggtcacaggtggcttcaggccattcacaagagtccccggaagttgcgtgccaagtttggttttttccctgaatctctgcatatgagcatttttctggagaaaggaccatagcttttattagattctcaaaggttcagaatggggaatgtgttaaacaaaccgaaaacctgtttcagctttaaaatcctccaaaactttaaagacttttcttttttctgagaaaggctggtaaatcactgagtcatcattcagaacatacagcctcgaagggcagagctcacacccatatatgacgttaagagctcaacaaatgtttgttgagtgactgagtgaccccaggggcagactccagatcatcagacactgatacagagagcgatgctatctcctcaactctccctcttctcctaaaagctgagtctatatagggatgacaggctcaggctgagcagtcgacttctctgggttttgctgtgtaagaataggtccctcaacatgaagatgtgtctgcgtctgagccagatgctgcctgggtcggttgcctggcctccgtctggtctccctccctcctactagggtggtcaagctgtgagatctcttccagcctccaaatccagctttcccattttactgatgagaaaatcaaggccacattgcagctgggtggggagtggagcgtgacaggcacgggagaggacagcgattgttgactctagttcctgatgtttaatcagaaaaaccacttttcctgtagagcacatttcctaaaaggctgctgctgtgtagggaggtgtggccttttcctggtgcagtgtgaaggagggaagtgacgggcagtcgtgaactgtctgggacagatagcacaagtcagagtttgagcaaaactagggtgttaccggcgctatgttgaaattgtctggaggcgggctttcccagcgagtctccattcagcatctggaaaaagtgtaaccagaatggaggtgtctgactctcctgtgctctctcagcgccgagctctagctgcaggctgcctgggtggccttctcacaccctcccgtgcaggagactgcatttctctttcccacagcccagcagatagctcattggcttagcaatgggcacttaacagaatccagttgttgcagccagaattaaatgcaccagtctggcttaaaccaactggaactcatccctggggtgaaggtggctgggaattagacaagagtgtgtgttagccaaaaggcacatgcatgctgtcagcaggagaatgaggagcactggttctgggcaggcagtggcaggggctccctcaggcccctgattcccagcccacagctctttctactctgcagacagagttccttggagactggccctgcattcaggcagggagcagaggggtccctgcctgcagcacccagagctgaacctgaagctacaaagatgggctgatgaggtggcccatgaggtgtcagcaacatcccaaccccctgggtctccccagtgagtcagggcactgatttgctatagctggagctacatgcacctctcctcccctcagccaccttttaggggagaaaggagggcagatttgtaacctctggttctctgcagggatcctgggctggaagaaagttcataaatggatgaatgccttttaaaactccagcttttccaagcatcattcaccaaagcatttggttaggcttagagagaaaagctggatatgagaaaatagaatgtaaaataggagggaaaaaaaaaaagaaggtggagagggcagttaagatctgggtgattctttagggaaacggctggttgagaggctttgatggaatcccattctctgctgtggccagaaggtggtgctagaggccagtcccacttggatgtgaccctggcctctgccaggattcaaaccacaaagaacatttggaactgggatgtttgctttgaagcagcccgaaaacaagtgaaaggaaaccaagataactctctctccctccgctggcaaggatcaaaaataccttgtgcagggaagcccgagcctcgaggggccactgcccagctaaagatgactggacaccagccatgcaccatcaggaaccagcacctgtcctcacccctgagaagagccccgggggtatcattatatccatcgcagacatctggtttgcagcaaatgtggctacacgccatcaggattatcctgccctgtggactgggctagctagttttgagatagagtcaacctccccatttttgtttgtcatgaaaacaccagctcctgcacccctggggtgctacctgacacctgtgcaaagaaaaggaggaaaacttagaagaaaaggcagagacaggcaagacagcatctcacagcttgtcaggatcagggcattaccgactattttttcttaccaaaagagcactgaatttcctaggggaaggtgagccacctttacacctcctgtcctccctcccagcccgtcaagcgatcccatcacccagcctcatcactcagcttcttcctagtacaaaactgccatcggttgtacgtcctgagctgtgggacgtcagctttaaccctagcctgtctcagggcctcgccctccagccccccgccccttagggtgatcgtgggtttcttcccttcctcctgcacaatcgcttcccttcactgaattcccttcaaagccaaagtttcttgagcactttttcttgtgtgcagtcttgtgtgtttgggtgttggtgtttttaaatttgctttctattcccccctgcctctctccatgtcgttacgcagctgagcactggttgggatgcattcgaatgacttcagcaagatcctgctttcctcagcccccgctctgttttatttattgtttaatatttccaatgatccaaatcaaagtgaataaacaaagagctattttattgtt

SEQ ID NO: 534 - DNA, 9737 bp, Homo sapiens
ggggggggttgcctggcggcgcagcagcgcgggaggcggcgaagggcgcaggagcatcgctcggaggggacaaggggacgccacgggccacatgtttaggagggagccgagccttctcccggaccctcgccgagggcgaccgtgatgctgcagaaccggcgggagcgactcgccgccgccgctctctgcgcactcggagaccccagcgcccgccttctgcaggggaagcgaccatggccatagatcgtgacttcacccccagccacttcccctagaaagaaatccttggaaaagttgcatttgaaaaaatccttgcgctgacctttggggccgacggggccgaagaagcgtgcgtgcgtttgcaagtaagagaaccaaaggtgtgtgtgcatggggggctggcggtgggggaccctccgctgccacttcgcctagctttgtgctgaggccccggcccccgcccctgggacgccggggctgcgatgagcccctgcgggcgggcccggcgacaaacgtccagaggggccatggctgtactggcgtggaagttcccgcggacccggctgcccatgggagccagtgccctctgtgtcgtggtcctctgttggctctacatcttccccgtctaccggctgcccaacgagaaagagatcgtgcagggggtgctgcaacagggcacggcgtggaggaggaaccagaccgcggccagagcgttcaggaaacaaatggaagactgctgcgaccctgcccatctctttgctatgactaaaatgaattcccctatggggaagagcatgtggtatgacggggagtttttatactcattcaccattgacaattcaacttactctctcttcccacaggcaaccccattccagctgccattgaagaaatgcgcggtggtgggaaatggtgggattctgaagaagagtggctgtggccgtcaaatagatgaagcaaattttgtcatgcgatgcaatctccctcctttgtcaagtgaatacactaaggatgttggatccaaaagtcagttagtgacagctaatcccagcataattcggcaaaggtttcagaaccttctgtggtccagaaagacatttgtggacaacatgaaaatttataaccacagttacatctacatgcctgccttttctatgaagacaggaacagagccatctttgagggtttattatacactgtcagatgttggtgccaatcaaacagtgctgtttgccaaccccaactttctgcgtagcattggaaagttctggaaaagtagaggaatccatgccaagcgcctgtccacaggactttttctggtgagcgcagctctgggtctctgtgaagaggtggccatctatggcttctggcccttctctgtgaatatgcatgagcagcccatcagccaccactactatgacaacgtcttacccttttctggcttccatgccatgcccgaggaatttctccaactctggtatcttcataaaatcggtgcactgagaatgcagctggacccatgtgaagatacctcactccagcccacttcctaggaacaatggaagaagaaaggactgaaccagggtatttttgttaggttttctatgtgactccaagagggaatggtcaagttgtttcatgagtttgcatgggcccttggaaaaacaggaaaggagcaatgaagatccaagcaaaactttactttcagcgttggcttggaggacaaataagaaatgaaacatcctatgaaatactttatagcacatggcagatttgcaactagtaaaatgctggtgaaatgctgttggtaaagcacatggttcaaatctagaagatgcagttcaaaaacaagacagactcgagttgttagggctgaggaaccaatcaaggtagaacaaagaaaatgttggggtaaaagtgttgctgattgtcaacacaaactggcttaataatattaataagaacctgtcttattaagactggctttagaaccgtaggtttttttaaaaaattattatttatttttgccctctttggggaagtgggtgggtagatttaaaaaatcccttcctgagtaataaagatacaaaatgttactgctgataattgtgatttgttgagccacgtctatattaactatagctcccctctatttttaaaattttacataagaattgcttcttcctcttttgtcaagtccacagagacaatgtgaagcattattgaatttagactgtgttgcttcatagtctggataacaggagccactttccttcctcagaatttaggacataaacccaattttaggtctgcattatgtaagcctgtttgcattgtcatttttattttagtgcaaaagactaccaatatgagtgaattatttgtttgtaaattggcataattgtcttcataatttaatgttcagaaatgcagtaaagcacgttgatgaaaagcttagtctctgtggaagacagaccagaagacaaatcccttttctatctactgtggcatattcactgcaaggtaaaggacatgtatgcatacatgcaagaatgaattgagcgaaactttgaatatgtttcctcttttgagctattgttatttagtagttacctaaaaaagaatacatttttactagtataccattaaaaatgtaaaaggcttaacatgtatgcatacatgtagacacacatacacacacacaaagttaaacaaagctcattactgtgcaactatgaaagctgaactcatatgacctggtatggcaaaaatttgtaaccagtgttggagaatcacaaatgtgttatgcactatccattacatgttgatataagacaaccgagctcactggttgccgcacataatacccatagcagcacaagatgcaagtcttacccccaaatgcttacccggaatgagcagaattgtcttactcatcctgattttacccaaaatctcatgaatgggcttgctgttgagcgtggtcacacaaggtatagtttgtacaagtaaagaaatgtgaattagtagctatttatttccttagtagcaggtaggactacttagcttgttacaacagctttgatacacagtaagaaaactctactgacagattacaagcagccaaatgtgtttacatttcagagaagggtaagggaagcctctcgttgtcttcatactttggaatgtcttaagctaaaatgtgacactagagttcaatttcttttttattttaaatgtcactaaattgtaggtaaactgtaccaaaaagttctagtttaattttaacagtaaaaactcagcataccatgttaccacgtaaacaataatggctggtattttctgtgggttaatttaacatgacataaacataggaaagcccttggcaaaattctacatcattgaagtagaccatttctaaatgcaattaaatagtgaggttattataaaaattagaatttaaaatatgacttgttgatagtgcagattataatgttacttagaaagttaagaattcgagagtaatgatgctattggagaactggtttgctatacggcagcaaaaacataatgagaatgtaccatgaagaaattgtgttaaatattcactttgagtgaaactttaaatatgtttcctcttttgagctactgttatttagcagttacctaaaaaagaatacatttttactagtctaccattaaaaatataaaaggcttaacaaaaacgcatataaaagttaataaaatgttactcagattagtactttaattgttaaaatgtaattaatgagctccatagagcccatacatcacagttccattgaaaatatcatctggactagaatctcttaaacccaggaagtggaggttgcagtgagccaagatggtgccactgcactccagcctgggtgacagggcaagaccctgtctcaaaaaaaaaaaaaagaaaagaaaaagaaagaaaatattatgtggaaatttttcatctttttatgatgcctgggatagatttatgcagtagatttatatataatgtttagtttacaaacttgtgaaactatttcatgtgggttctgaaaggcaaaacagaaatggccagtgctggtgatgtttgattagaccagctcttctcagctggggtgattcattatccctctctggtgacatttggcaatgtctggagaccagagacattttttattttcatgactcaagggtgctaatagcatgtacttagtagaggttagggatcctgctaaagatcttacaatgcacaagtcagcctctcacagcaaaataattatccaggctgagatgtcagtagtatcaaggttgacatctcagacctggattagacctggattagaccaaaatgaaattttgattgttccaccttgtcttcacttaaagatagatatacatgctcacagcattcaaaatatgactacaatttaatgaaaatattttcttatggtagattacaactcactagatacaccatacatatgccttttggacataattggttagataggagtgtgtgtgtgtgtgtgtgtgtgtgtgtgtgtgtgtgtgtgtgtgtagcatgaagttaggcatctctatccttaactgtgctatgtgttcctaagtaaggacctcgctagaatcatcctgtagagtgctctggaatactctattattaagatcttcaattctaagctcccattatctttctttgtttatctgaaattaagaccttcagaattaggcctggtacttttccagatttgatcagttacattttgatataactgactcttaaaattcagcttagaagacattcaataagaaaatctttaatcacttttggtgatgcacctgccaagagggggcatcactttgtaccatcagactaattaaaaaaattgttgtgtagtcataaaaattaggctgatccataggggcaaaaggaagggtgaagagactaaaaactagtaccctgatagaattttagtttttattagcctcgatttgagaactgcattgattccaaagatcatgaaggtaggtgaaggattaagtcattccataattaagaaaagtaatgtttatatgaaagatttttatatggacaatgactcacagacacatatgctttgtatagaggattttgccaaaagtttatacaaaattgcacatctaaactgcataattctcatacaagaagttaaggaagtgctcactggattttgcttctgtatagttcacttttatctgtcttcacaagggtaggaagtaaatgatctcaaatggcacatgttcagacaatactgtgtttggctttgtgatgtctcatgtctttctcttggctaaaaaaaattgtttaggctatatataacttgtacctgaagcaatctggacaacatggcttaaaatggaaaataactgaaaaaatcctgggattttaaatttgccaaaaatacccttggattagtcaaaggctttacaagagtgttatagatgatccaaaatggaaacaatattgataacatttcttttcgtcagcagctacatattccagttttataactttattatatacattttttgattattaatagaaagtcagccatccagagttttaacttctgtggttgaaatattgactttgtgaaatttttcactgacaaatacttgttaggagggacctaagggggaggggaatgttaccagtccactgaaaactttaggaaatgttcattgtgttgtgtaaatactttcccaccagcaccaggtaatatattctctatgtttgtagaattccaaagatcaaaagctgtaaggacgtttatgtgaacttgacgcaaacttgtggaggaataaggactgagagtaatgttgtgctttttctttatcttcccgtcgtataggtcgactctcaggttatatgacttttattgggcacacgtcaggggtggaagtggtagaagtgggttaacaatttcaaggcctggcaacctaggtcaaaacctctaataaagtcagcagtaaacataactagcaacttcattccactatgtgctaggaggagggtgaggcaagttgaaaggagatgaccctatccccacactctcaggatgtaaaagggcagagtgctctctacccttaaccttggctttttagcaccgtcagtctctgtcctctcccaggagagctgccttggctccagagttgagctagtagcattgtgactagagaggtagtgtggaaattcgctgaggacctcaaaattttacactgccttaaactgttttgtttttgcttaaactcgtgctgtctaaatgtgggtgttttgtggcagagtctgatcaccccgacctagttatagccctgccagtgattctaaagtggaacttttccccctcattcatatggatagtctgagtccttgaagctagggagatatcaaatattctaccagttcctacatagcttctttaaaagtcctagagactaactcacaggaagtctgaagcccagagcgtctgtttataaactcctaaatatgaggccacaatatttaggttgagcactagaaaatttctattttgcaagtggaaggagacttgaatctataattgctgtagctttttttcccttctatcataagaaaatggataccatctgctttaccctcagcccagacttgtcttttgaattttttacatacatcttaggggtgagagattgaaacaagtgcatgaatgaaaagcttattgaaacataacacagcccctgctcaccatttcagtaagggaaaatacatgtttctgtttccctctaatttgttttctctggtgccaacatttctgatttcttctgtctctaatacataaggaataaataccatattttaaattgacttacatgcctgcgagcatttgccagataatcaaagcctatgactctaactttttaaagcacagaagaggaattatattttatggtcactcctctgtgtttctattgatctctatattgtgctaaaattctttcaggtaatttttttcttgttgaagctgtgggatataatcaatgatgccaagctgtctgagaattttatagaataatatccaaatatattgatcctgcctctttctgcttctatgtaattaaactttcttttgatgtttatttttaaaatgtatgcttcacacaacaccaataaacatctaagagatgtgatataatccaaggcaaagaaaagtaagaatcagttaatgtctattttatctgcacagcattacgaacagaaaattgtaataaaaaaaggtttaaccaaactgaaaaaaagagagacaaaatcttggttttaatttgaaaagatgattgggagtgatctcagaagagagttcagcaggaagcaaggaagaggctgttgaccttgagtgcagcctcaagaatggaacctttttgaaatattttaaaggaaatatcttgtcatccagctgttatggttaataatgaatagttttctctgggtgaagcttatccattgcacacctgatgtgctggcccctgcgatttccccaaatgttggaatgttgcctgcataatttgtggtaatgggggactgtgttcctgcttttacctggttacaaaaaacaaaacaaaacaaaacaaaacaacaaacagaaaaaaaaagagagaaaagatgctagaggaagcagtgtgacagacagatcatgagatgctgacggagagaacagagtggtacctgtttacccacttggaccatgacagtatcaaggctccaccccttgctgtcccttcccaagaggtgctctcctgggagtttgatcacagtgaaacaacactcccgttttctttttcctttctttctttctttcttttttttttttttttttttttttgttgagacagagttttttgctcttgttgcccaggctggagtgcaatggcgtgatctcggctcaccgcaacctccgcctcccaggttcaagcgattctcgtgcctcagcctctggagtagctgggattacaggcatgcgccaccacacccggctaattttgtacttttagtagagatggggtttctccatattggtcaggctggtcccgaactcctgacctcaggtgatctgcccgcctcagcctcccaaagtgctgggattacaggcataagccaccgagcccagccccacactcctgttttcatagcccttttttgtctgtactttggtacatattccccaaataagattattatttacatctgtcatgatgaggcagtgatagcagcaagtgtcactttgaccctcacccttggaaagtgggctatgcatagctagagttagaacaggaggttctaatcctgcttccacaattacttcagtaacaggcttttgtatccatgattacttaagctgacttagatgcattttctaccctgtattctagtgtacacaacacaaacacacataagccctttacctgtggagaagagggagatggttgattcagtgggagtggggagtggcagagggtgccttaactttttctggcttgacccctacttccttatgtgtttccttcatatacctctgtcactttagagatgtaatcatgtctgttccaagttgtatcgttattatcaagaagtcctataaatgtagcaaatgtgactattttatagaaatgcacaatagtttataggccttggagaagtctgataatagtatgtaaatatccttcattgaagtcatagaaccttctagtaggaagctccataggtgataactgcaagaggattaatgtttgtttctccagtaaacaccggaagcaaggaatcaatctgtcactgtttatcattcagtcttgagcaccgttgggtgttgataggttactatagacactccccttataattaatatacaggactcacaatttaggatgtctgatggccactagggtacatcatagagacactagagagaagagaacaaatatagctccatcaaaaagcctgcttaatctttaacaagtctgaaatattactaaaattccagttaccgtgcagcatagtcagtctaaaaagcactggggaaaaaggtgtctttttggtctctttaattctattatggcacattttaatattattccacatgtgtgcaaactatttctcaagagcaaagtttgaggctggagttaagaaaatagaaaaattaaaacattattttttctcatataatataatctgactactagttcatggatataataattctgggaaaaattttagattaaactataaaattgaaatcacctttgaagagtatatggaattgcttctttctattaaagccaacctacattggcaaaaagtgtggagaaaatcagtgtgctcaattctttttgtagagtttcatctaaaatgttgcaggtaaaaaagaaaactttaattggtactttctacggtgtgattagaaaaattagtatctatctctgttggttctgctgacttgcttctttccaccgaatctaaatgcaatgtcataggaggaggtttgctgtaaaaacatgtctttttctttggtgtattcattgtaattatggctggcagtgagaaggttcggtaagtctcaatttctctacctcctttacttggagaaaatttgtaaatgtaccctgtgaataaaatgattttttataaaaaaaaaaaaaaaaaaaaaaaa

SEQ ID NO: 535 - DNA, 4494 bp, Homo sapiens
gcgaccctccgcccgccctcggaagaccgagacagcggagaggttgcgggtgagctgcgctgagcccaggagccgaggagtcgggagcgcagtagcgctgagcccgagcccgagcggccccgcgtcccgagcgcatcggagcggccgagccgcccggatgcagcgcctgtcccgggcagcgcagccccggccgcaggatctcacccagggtggcagaaggaggccttctggagctgacccacccccgacgaccatcagggtgaggcaactccaaggtcctactctctttctgtgcctgttacccaccccgtcctcctagggtgcccttgagccgcaaaactgctgtccacgtggaccgggggtgacatcgcacgtccatctgccaggacccctgcgtccaaattccgagacatggcgaccaacggcagcaaggtggccgacgggcagatctccaccgaggtcagcgaggcccctgtggccaatgacaagcccaaaaccttggtggtcaaggtgcagaagaaggcggcagacctccccgaccgggacacgtggaagggccgcttcgacttcctcatgtcctgtgtgggctatgccatcggcctgggcaacgtctggaggttcccctatctctgcgggaaaaatggtgggggagccttcctgatcccctatttcctgacactcatctttgcgggggtcccactcttcctgctggagtgctccctgggccagtacacctccatcggggggctaggggtatggaagctggctcctatgttcaagggcgtgggccttgcggctgctgtgctatcattctggctgaacatctactacatcgtcatcatctcctgggccatttactacctgtacaactccttcaccacgacactgccgtggaaacagtgcgacaacccctggaacacagaccgctgcttctccaactacagcatggtcaacactaccaacatgaccagcgctgtggtggagttctgggagcgcaacatgcatcagatgacggacgggctggataagccaggtcagatccgctggccactggccatcacgctggccatcgcctggatccttgtgtatttctgtatctggaagggtgttggctggactggaaaggtggtctacttttcagccacatacccctacatcatgctgatcatcctgttcttccgtggagtgacgctgcccggggccaaggagggcatcctcttctacatcacacccaacttccgcaagctgtctgactccgaggtgtggctggatgcggcaacccagatcttcttctcatacgggctgggcctggggtccctgatcgctctcgggagctacaactctttccacaacaatgtctacagggactccatcatcgtctgctgcatcaattcgtgcaccagcatgttcgcaggattcgtcatcttctccatcgtgggcttcatggcccatgtcaccaagaggtccattgctgatgtggcggcctcaggccccgggctggcgttcctggcatacccagaggcggtgacccagctgcctatctccccactctgggccatcctcttcttctccatgctgttgatgctgggcattgacagccagttctgcactgtggagggcttcatcacagccctggtggatgagtaccccaggctcctccgcaaccgcagagagctcttcattgctgctgtctgcatcatctcctacctgatcggtctctctaacatcactcaggggggtatttatgtcttcaaactctttgactactactctgccagtggcatgagcctgctgttcctcgtgttctttgaatgtgtctctatttcctggttttacggtgtcaaccgattctatgacaatatccaagagatggttggatccaggccctgcatctggtggaaactctgctggtctttcttcacaccaatcattgtggcgggcgtgttcattttcagtgctgtgcagatgacgccactcaccatgggaaactatgttttccccaagtggggccagggtgtgggctggctgatggctctgtcttccatggtcctcatccccgggtacatggcctacatgttcctcaccttaaagggctccctgaagcagcgcatccaagtcatggtccagcccagcgaagacatcgttcgcccagagaatggtcctgagcagccccaggcgggcagctccaccagcaaggaggcctacatctagggtgggggccactcaccgacccgacactctcaccccccgacctggctgagtgcgaccaccacttgatgtctgaggataccttccatctcaacctacctcgagtggcgagtccagacaccatcaccacgcagagaggggaggtgggaggacagttagacccctgggtgggccctgccgtgggcaaggatacccggtggcttctggcacctggcgggctggtgacctttttaatccaggccccatcagcatcccacgatcggccttggtaaccgccgcggtagatcatttttatcccgccagggagtgtgatgcaggaagaccacatgcgctcctggcttttaaacctgttcctgactgttctcttactgccgaaacccttgactgttatctcggactttgcaggagttcctttccctccgaacgctgctccatgcacaggaaaagggcattttgtacaatggggacttcccgggaacgcttgctcttaagtaccagaagccggcggagctctggctttcgtgtttttggttttctccttcccaaggcagctggattgaaaaaacaaaacaaaacaaaaaaacccaggggcgtcagtcgatattcccagggccgcttctcctgcagtctgtggagcgtccttgtccccgccgccggaatgaatgagcattctgcagcccgatgtccctgtcccctcctcgccgggccattctgattggacctggcccagtgcaatctgtccagacaagccctgcttgctggaaaactgccacaagcacaattgatctctttttatcgccattccaggggcctcaggtcctactggggaaacttcctataccggagctccagtttctcttaagctgcccaatttcacagagtacaaaatagttgtaggggaaatcaaggtgaaggatctgtccgacagtcaagacggatccacagtaatctttcggtctccttaaactaccaccctcgctgccacccaccccaagctgctgccgcctcaccttccttgaaatttctcagcgggagtctcctcactgccactaaaatccacccagcccactaactgaggagctagtgttaatccagagaaccccccgcaatgtgcttccgagattcagactgcttcattgggaagtatgatttgttcctttctggaattgggctccgtggtggcggcggcacttcaagcaaagacagtttcttgcaagctccagtagctccgcgtgtctcatttgccaggaagatgggttcccacgtagcaaatcgtacattgtgccctgtagctccttagctagttagctcacaagccgtgttttatgactaatccttaataactatggtaaataactgtgactgtggggtttttaatctcttgtcattctcatccaaaagtgaccagcataccagttcttgcaataagatattaccctcagaatattaagcacattattgtagagaaaaaaaaatatgtgtacacatatgaacgcacaacatgcacattcatcctcacatgtggcacgtaaggtctcatttgatattgtgtaggaaatctgaagccttttcctgaggtcatctgtaaaatagtctcattgccaaggcatccccagtgccagctggtgaatccatgatcaaaatgcatacgtattgttaaatgataaggtttagaatgacaggaacccatcactgtgtctcatggtcccacttccccatctgtgtgtgaattcctttagactaagggcaggaagacttccagctttctctttgttcttcaatgtgaaactgagaccaagtctctctaagacaaatgcagtgtatttaatgtttgtaagcaattctaagtgagatgtttggcaagaaatcccctaactgatttccatccaaacctaccttatagagcacaatattaagtgttgtacaattactgtgagaactgtgaatatgtgtaacttttttttagtatttgcccggggggaaaaagatattgtattatcatatatgcttttttgcaataaggatttattctcagaacaccaagtaaatctatctctatataaaaaatatatgtaatatatacatattcaaagtatatacagagcctgttttaaaaaatacagtattatttagtaaaattatctgttctatggaccaaatgtaaaatatttataaatgaagatgcattttaaatgtctataaatggtgtcataactagagcacgggcgttatgtaagtttctaagaatttagaggataaataataaaggttctatgatatacaaca

SEQ ID NO: 536 - DNA, 5780 bp, Homo sapiens
ctgggcggggccgggaagcggcagtggcggctacgcgcgcgggggtgcgcgcgggaacgaccgggaaacaccgcgagggccggggtgggccaggctgtggggacgacgggctgcgacgatggccgcagcggcgggcggcggcgggccggggacagcggtaggcgccacgggctcggggattgcggcggcagccgcaggcctagctgtttatcgacggaaggatgggggcccggccaccaagttttgggagagcccggagacggtgtcccagctggattcggtgcgggtctggctgggcaagcactacaagaagtatgttcatgcggatgctcctaccaataaaacactggctgggctggtggtgcagcttcttcagttccaggaagatgcctttgggaagcatgtcaccaacccggccttcaccaaactccctgcaaagtgtttcatggatttcaaagctggaggcgccttatgtcacattcttggggctgcttacaagtataaaaatgaacagggatggcggaggtttgacctacagaacccatctcgaatggatcgtaatgtggaaatgtttatgaacattgaaaaaacattggtgcagaacaattgtttgaccagacccaacatctacctcattccagacattgatctgaagttggctaacaaattgaaagatatcatcaaacgacatcagggaacatttacggatgagaagtcaaaagcttcccaccacatttacccatattcttcctcacaagacgatgaagaatggttgagaccggtgatgagaaaagagaagcaagtgttagtgcattggggcttttacccagacagctatgatacttgggtccatagtaatgatgttgatgctgaaattgaagatccaccaattccagaaaaaccatggaaggttcatgtgaaatggattttggacactgatattttcaatgaatggatgaatgaggaggattatgaggtggatgaaaataggaagcctgtgagttttcgtcagcggatttcaaccaagaatgaagagccagtcagaagtccagaaagaagagatagaaaagcatcagctaatgctcgaaagaggaaacattcgccttcgcctccccctccgacaccaacagaatcacggaagaagagtgggaagaaaggccaagctagcctttatgggaagcgcagaagtcagaaagaggaagatgagcaagaagatctaaccaaggatatggaagacccaacacctgtacccaatatagaagaagtagtacttcccaaaaatgtgaacctaaagaaagatagtgaaaatacacctgttaaaggaggaactgtagcggatctagatgagcaggatgaagaaacagtcacagcaggaggaaaggaagatgaagatcctgccaaaggtgatcagagtcgatcagttgaccttggggaagataatgtgacagagcagaccaatcacattattattcctagttatgcatcatggtttgattataactgtattcatgtgattgaacggcgtgctcttcctgagttcttcaatggaaaaaacaaatccaagactccagaaatatacttggcatatcgaaattttatgattgacacgtatcgtctaaacccccaagagtatttaactagcactgcttgtcggaggaacttgactggagatgtgtgtgctgtgatgagggtccatgcctttttagagcagtggggactcgttaattaccaagttgacccggaaagtagacccatggcaatgggacctcctcctactcctcattttaatgtattagctgataccccctctgggcttgtgcctctgcatcttcgatcacctcaggttcctgctgctcaacagatgctaaattttcctgagaaaaacaaggaaaaaccagttgatttgcagaactttggtctccgtactgacatttactccaagaaaacattagcaaagagtaaaggtgctagtgctggaagagaatggactgaacaggagacccttctactcctggaggccctggagatgtacaaggatgattggaacaaagtgtcggaacatgttggaagtcgtactcaggatgaatgcatcctccactttttgagacttcccattgaggacccataccttgagaattcagatgcttcccttgggcctttggcctaccagcctgtccccttcagtcagtcaggaaatccagttatgagtactgttgcttttttggcatctgtggtggaccctcgcgtggcatctgctgcagcaaaagcggctttggaggagttttctcgggtccgggaggaggtaccactggaattggttgaagctcatgtcaagaaagtacaagaagcagcacgagcctctgggaaagtggatcccacctacggtctggagagcagctgcattgcaggcacagggcccgatgagccagagaagcttgaaggagctgaagaggaaaaaatggaagccgaccctgatggtcagcagcctgaaaaggcagaaaataaagtggaaaatgaaacggatgaaggtgataaagcacaagatggagaaaatgaaaaaaatagtgaaaaggaacaggatagtgaagtgagtgaggataccaaatcagaagaaaaggagactgaagagaacaaagaactcactgatacatgtaaagaaagagaaagtgatactgggaagaagaaagtagaacatgaaatttccgaaggaaatgttgccacagccgcagcagctgctcttgcctcagcggctaccaaagccaagcacctggctgcagtggaagaaagaaagatcaagtccctggtagctctcttggttgagacacaaatgaagaaactagagatcaaacttcgacattttgaagagctggaaactatcatggacagagagaaagaagctctagaacaacagaggcagcagttgcttactgaacgccaaaacttccacatggaacagctgaagtatgctgaattacgagcacgacagcaaatggaacagcagcagcatggccagaaccctcaacaggcacaccagcactcaggaggacctggcctggccccacttggagcagcagggcaccctggcatgatgcctcatcaacagccccctccctaccctctgatgcaccaccagatgccaccacctcatccaccccagccaggtcagataccaggcccaggttccatgatgcccgggcagcacatgccaggccgcatgattcccactgttgcagccaacatccacccctctgggagtggccctacccctcctggcatgccaccaatgccaggaaacatcttaggaccccgggtacccctgacagcacctaacggcatgtatccccctccaccacagcagcagccaccgccaccaccacctgcagatggggtccctccgcctcctgctcctggcccgccagcctcagctgctccttagcctggaagatgcagggaacctccacgcccaccaccatgagctggagtggggatgacaagacttgtgttcctcaactttcttgggtttctttcaggatttttcttctcacagctccaagcacgtgtcccgtgcctccccactcctcttaccacccctctctctgacactttttgtgttgggtcctcagccaacactcaaggggaaacctgtagtgacagtgtgccctggtcatccttaaaataacctgcatctcccctgtcctggtgtgggagtaagctgacagtttctctgcaggtcctgtcaactttagcatgctatgtctttaccatttttgctctcttgcagttttttgctttgtcttatgcttctatggataatgctatataatcattatctttttatctttctgttattattgttttaaaggagagcatcctaagttaataggaaccaaaaaataatgatgggcagaagggggggaatagccacaggggacaaaccttaaggcattataagtgaccttatttctgcttttctgagctaagaatggtgctgatggtaaagtttgagacttttgccacacacaaatttgtgaaaattaaacgagatgtggaaggagaacctcagtgattttattccctagtgaggcctctgagggcctccacactgcctggcagaacataccactgaactagtatgtgctagaggagggcacaaacatccgctccttccctaggcctgctggctctggttttctatgcagatgattcattggattgggggtgagtgttttgtttttctgggggcagtgtgagctttgagggttggaatattgggaggcattccttagtttcctcaactagcctggaaagttaggagtctagggtaattacccccaatgagtctagcctactattcactgctttgtgtgcatttttttctccctctttaaaaaaccctttaaaagaaaaaaaaaagtagatagtgctaaatattttagctcatgaaacttggttaggatggctgggggtacaagtccccaaactacctcttgttacagtagccagggagtggaatttcgtcaaccggtacttttaaggttaggatgggacgggaaaagtgaagcaggatattagctccttataccttctcccttccatttctgagatctcacattccatctatcacagggttttcaaagagatgctgagggtaacaaggaactcacttggcagtcagagcatcatgctttgaggtttggggtgctcaggctgggagggtagaatgccattccagaggacaagccacaaaaatgccttaatttgagctcgtatttacccctgctgataagtgacttgagagttcccggttttttcctcttgtccttccctcccttctgtccttccatgtgtggggaaagggtgtttttggtagagcttggtttccaaagcgcctggctttctcacttcacattctcaagtggcagtttcattatttagaatgcaaggtggacatcttttggatatctttttctatatattttctaaagctttacatatgagagggtatagggaggtgtttataaaacacttgagaacttttttccttaatatcagaaagcaaaaaaataaaaccacaattgagatttgcctttcaaaccctcaggtttgcctctaaccaggtgtccctggtcaccatcagagtactggaatacgggaaccgaggagaccttggtccttttgtttttgttctggactcttgggagtggaaatgagaatgagtttattcctactggagcttagttccaatgcatttggctccagaaagaccccagtgccttttgacaatggccagggttttacctacttcctgccagtctttcccaaaggaaactcattccaaatacttcttttttcccctggagtccgagaaggaaaatggaattctggttcatactgtggtcccttgtaacctcaggtctttaatgtgatcactttcaaatttaaaagatccaggtggaaatatttttactatagtaataattctacaaaatacctgaattcttaacactgttatatttcagtataagtggtggctttttcttttcatgtctttgatctggttttattcctgtaattcagccacctgattttgtgaggggggggaataatatgtggtttttgtacaaacatgtttctcagtgtgttgttattttggaaaaaatgaggggagggagtttggcaagaatggagaaaatgaatgaagaaggcctaatctctctctttttcagtgaataaatggaacaccatttctggattctaaaaaaaaaaaaaaaaaaaaaaaa

(The sequence listing continues in the following parts.)

What is claimed is:

1. A method of modulating proliferation of a cardiomyocyte, said method comprising:
(i) transfecting a cardiomyocyte with a nucleic acid encoding a micro RNA modulator, thereby forming a transfected cardiomyocyte; and
(ii) allowing said transfected cardiomyocyte to divide, thereby modulating proliferation of said cardiomyocyte.

2. The method of claim 1, wherein said nucleic acid is a lentiviral vector.

3. The method of claim 1, wherein said micro RNA modulator is an antagonist of a mir 99 micro RNA, a let-7a micro RNA, a mir 100 micro RNA, a mir 4458 micro RNA, a mir 4500 micro RNA or a mir 89 micro RNA.

4. The method of claim 1, wherein said nucleic acid comprises a nucleic acid sequence as set forth in SEQ ID NO:1124 or SEQ ID NO:1125.

5. The method of claim 4, wherein said proliferation of said cardiomyocyte is increased compared to a control cardiomyocyte lacking said nucleic acid encoding said RNA modulator.

6. A method of modulating proliferation of a cardiomyocyte, said method comprising:
(i) contacting a cardiomyocyte with a small molecule, thereby forming a treated cardiomyocyte; and
(ii) allowing said treated cardiomyocyte to divide, thereby modulating proliferation of said cardiomyocyte.

7. The method of claim 6, wherein said proliferation of said cardiomyocyte is increased compared to a control cardiomyocyte lacking said small molecule.

8. The method of claim 7, wherein said small molecule modulates expression of a mir 99 micro RNA-regulated protein, a let-7a micro RNA-regulated protein, a mir 100 micro RNA-regulated protein, a mir 4458 micro RNA-regulated protein, a mir 4500 micro RNA-regulated protein or a mir 89 micro RNA-regulated protein.

9. The method of claim 6, wherein said small molecule is a synthetic micro RNA molecule.

10. The method of claim 9, wherein said synthetic micro RNA molecule is an antagonist of a mir 99 micro RNA, a let-7a micro RNA, a mir 100 micro RNA, a mir 4458 micro RNA, a mir 4500 micro RNA or a mir 89 micro RNA.

11. The method of claim 6, wherein said synthetic micro RNA molecule comprises a nucleic acid sequence as set forth in SEQ ID NO:1124 or SEQ ID NO:1125.

12. A method of treating myocardial infarction in a subject in need thereof, said method comprising administering to said subject a therapeutically effective amount of a nucleic acid encoding a micro RNA modulator, wherein said RNA modulator increases cardiomyocyte proliferation thereby treating said myocardial infarction.

13. The method of claim 12, wherein said micro RNA modulator is an antagonist of a mir 99 micro RNA, a let-7a micro RNA, a mir 100 micro RNA, a mir 4458 micro RNA, a mir 4500 micro RNA or a mir 89 micro RNA.

14. The method of claim 12, wherein said nucleic acid comprises a nucleic acid sequence as set forth in SEQ ID NO:1124 or SEQ ID NO:1125.

15. The method of claim 12, wherein said administering to said subject a therapeutically effective amount of a nucleic acid comprises administering a first nucleic acid and a second nucleic acid, wherein said first nucleic acid encodes an antagonist of a mir 99 micro RNA and said second nucleic acid encodes an antagonist of a let-7a micro RNA.

16. A method of treating myocardial infarction in a subject in need thereof, said method comprising administering to said subject a therapeutically effective amount of a nucleic acid encoding an antagonist of a mir 99 micro RNA and a nucleic acid encoding an antagonist of a let-7a micro RNA, thereby treating said myocardial infarction.

17. A method of treating myocardial infarction in a subject in need thereof, said method comprising administering to said subject a therapeutically effective amount of a small molecule, wherein said small molecule increases cardiomyocyte proliferation thereby treating said myocardial infarction.

18. The method of claim 17, wherein said small molecule modulates expression of a mir 99 micro RNA-regulated protein and a let-7a micro RNA-regulated protein.

19. The method of claim 17, wherein said small molecule is a synthetic micro RNA molecule.

20. The method of claim 19, wherein said synthetic micro RNA molecule comprises a nucleic acid sequence as set forth in SEQ ID NO:1124 or SEQ ID NO:1125.
